United States Patent Application Publication US 2020/0109395 A1 - sequence listing, part 13

SEQ ID NO: 50415 - DNA, 1167 bp, Anoxybacillus flavithermus AK1
atggaaaaagagttcgatgagaaagcaaaagaagcgttaactgcgctgtttgagcagttttgggttgttcgggaaaaagagccggaactttttcaaaaaatacgcgaacgtgaaaaagtgttaaaacggtatgtgcaagagaaattcggctaccggctcatcgttcaccgctatttcgctaagttggaaaaaataccagcggagccagaagcatggatgggaatagaatcgtttcaagaaccgctcgactacgcgatgttttgttgcttgttagcatacttagaaggaaaagcagtcgaagaaaagtttctattgtctgacgtatgtgaagaaataaaagcgatgtatccaggcgaaacagcgatcgactggacgaactaccaacatcgacgagctttaattcgcgtcttaaaaacagccgagcaaatcggaattgtgcatcacgtcgacggagaagttgaggcgtttgcgaatcaagaagatgaggaagcgttgtatgaagtccctgtattatcccgctattttatgcgatcctatccgaaagattttattcaatatgaaacaatcgagcaactgctggaggaagagtggaaagtgtcacccgacgattaccgtcgccactttatttatcggcagctctttttatcgcctgttgtataccgacggcagaaagacgacccaaacttttattacttgcgcaacttccgtcaccgattgcgcgatgacatcgaggcgcataccgattttcgctacgaactatacaaaaacgcagcattgttgacgctgccagaacggcaacatgtgtatacgttatttccagatcaaaagggaacgtcggatataatccttcatttcgcttctgtcgttcgtgctcatttagacaactatccgccggatgaatacgggaaaatccgcgtaacgatgtccgattttcagcagctgctgtatcggtgcagcaagcagtacggcgaaggctggagcaaaacgtatcgtgaaatgtcgatggcacaactcgccaccgagcttctttctgctttaaaagactggaagatggcagaatatgaacaggaaacgggcatggttgtgctttatccgttgcttggacggtttgtcggccaatatccagacgatttcacaacgaaaggaagagacgatgatgacaaataa

SEQ ID NO: 50416 - DNA, 4104 bp, Anoxybacillus flavithermus AK1
atgacaaataaatgggtgcttcatcgcgcgggattgattaatttttggtattacgacgaacaatatttcgaatttgctgacggcaagctattgcttcgtgggacgaacggctctgggaagtcagtgacgatgcaaagcttgcttcctgtcttgctggacggaaagaaaacgccagatcggctcgacccgttcggttcccgagcacgaaaaatggaagactacttacttggagaaaaggaaattgttgatcgcgatgaacggacaggctatttgtttttagaatataaacgaaagcaaacggaccaatacgtaacgacagggattggcttacgggcaaaacgacaaaaaaatatggacttttgggggttcgtcatttttgacaatcgccgcatcggccgtgatttatttttatataaaacggaaaaatcagcgaacggaacggaaaaaattccgctcacgaaacgcgagttagccaatttgcttggcaacggtggaacggttgttgattcacaaaaagaatatatggagctcgtcaataagcacgtcttccgctttgaatcgatggaggcgtttcaagaattaattgagctattgattcaattgcgtagtccgaagctatcgaaagattttaagccgacggttatttatgaaattttagaaagctcgcttccggcgctgacagacgaagagttgcgccatttatccgaaacgattgaaaatatggaccaaacgaaacaacagctagagcagctagagcgcgatgaacaatcgttaaaacggctttgtgcgcaatatcgagcgtataacgagtatatgatcgcggaaaaagcgagcgaatggataaaggctgacaaacaagtgaagcggttagcagaagaagaaaagcagtggcttaaggaagaagcagaaaaacaaacgcaccttgcggatttgagcgagtacattcaaacgcttgcgaacgagcaggacgtattgcatcaacgagaaatagagttagcaagccacgaagtgttccaagcggcaaaagaatatgaacgtgttcagcaagagataaacgacattcacgaaaagcaacaaaaattattgcggcaaattgacgaaaaagagcagttggaacgtcgctacaagcgccagttagaggaagacaaagaccggctatatcaagtggaaaagcaactcatgcaacaagtagaaaacttgcggcatgatgcgatggaaagttccttttctgcccatgctctcaacgaagctgatttctctcgccagcgcgaaacgaaatttgattttactgtctggaagcgggaagggcaagaatatgtggaaaaactagaacaaacgattgcgctttggcggcgccacgacgaaatgaaggcgcgctatgaagaaacgagcaaagaagcaggggaactgcagcgggaagtagacgaattgcgccacgaagaagtgaaatggctcgaactgttagaaaacgaaaaagctcgtttccaacaagaagtatttcgctggctcgaacaatgccgagacgtttccgtatcggaaccctctgtccaactatttttacagcgtcttcatgaactatacgaaacgtatcacgtcgatgagatgaagcaaccgtttacggaagcgtattacgaagctctcaatcgaaaaaacgaagaaaaaatgaagcaacagcatgcgtgcacattattagaagaaaaaatttccgtaaaagaagtcgaatggaaccaatggaaaacgcaaaaagacccagagctcacgcgcgatgaacagacggttaaagcgcgggtggagttaaaagagaaagggattgcttttgtcccgttttatgcagcggtggaatttcgaaaccatgtaccagatcctctccgagagcgtatcgaatcggcattatatcatgcggggatacttgatgcgttaattacggaaaccggtgtcgaagtaacgtgtgaccgagtgtttgttccacgccctgtcgaactggagcatacattggcagactatttacaaccggatgtagatgaagcgtgcggcgtttcaaaagcgcgcatcgaagaagtgctccaaagcattgttcttgccgatggagaagtggacggcacattgattctcaacgaagaaggatattatacgctcggattagtcaaagggcatgccccgacgcgggagaaagcgttgttcattggacgtactgcccggaagcgttggcggttagaacagatcgccgcacttgaggcagaacttcacgaacttcgcgctcagcttcatgaggaagccgatatgctaaaacagatcgatcagacaattgcgcaaataaaccattggtttcgtgcctttccaactgaccgcgacatgcgtgcagcttttgaagaacgggagaaaacgaaacggcatctcataagcaagcaacaagaatgggagcggaaaaacgagaagcttgcccaactagcacgtggttggcaacaagtaaaacaaacgttgcgtgaacaaaccgaagcactcgatttagaattttccaaaaacggctatgaacaggcgcttctctttatgaaatcgtatatgcgtgagcttcatgaattgcaaatgacccatcgagagttcctccatttgctcgacatgattcaccatcggacagagcagctagaaacgttacaacaagaaatcgacgaaacaaaaggcgaacggcatatgcttgcaaaagagcagcagaaacttgaactgaaacggcaggaaattgaacgtacgctacatcgaatgggcgcagaagaaattcaaagggaaattcaacgcgtccgcgaccgattggcagttttacagcgagaaatgccaaagaaaatgaatgagcgcattgcgctagagcatgagctgaaagctattcgtgaaaaatgcgcgcagttgtcagcgaaagaatcgtttgctaagcggttagcggaggagtggaagcgttcatttgagcgagaacttgcccttgaacttgtggaacttcatgattctgatctattagaaaaagcaaaagaagcgatgcagcggtgtggagcattgttaaaagaaacgagaacgtcgcttgtgaatcgattaaatagcgtatttttccaagaatcagcaaatttaacagaataccgactcagccaagaaccagtctcgatagaggaaacaaatccatttgcggatattgagctagacgaggaaatggaattaaaagttgcagggtggagagaaaagcaagaccgtatcgttcttttgcttgattataaagggcagcgcgtatcgccattttatgtattacgtgaaatcgagcacgacattttcttgcaacgcgaatatatgaaagagcaagaccgcgagttgtacgaagaaattattttaaaaacgattggccgaattttgcgcagccgcattcaacgggcggagcgttgggtaaaagatatgaacgaacggatgcagcagctcgacacgtcttctgggctggtgttgtttattcaatggaagccgcgcaccgcggaaacggaagaagagatggatacgaaagagcttgtcgaattgttgcggatgaactcgcggctactaaaagaggaagacttgcagcgagtgacgaaacatttccgctcgaaaattcatcgggcgcgcgaattgttagaagagcgtggccaaggcaatacgcttcaccaaatcattaaagaagtgttagactatcggaaatggttctcgtttaccctttattaccaaaaaacgaatgaaccgaaacgagagttgacgaaccaacgtttctatcaattcagtggcggagagaaagcgatggcgatgtatattccgttgtttgcggcgacgtattcgcgctaccaagaagcagcagacgacgcaccgtacattatttcgttggatgaagcgtttgcaggggtagacgaaaataacattcgcaatatgttcgggcttgtcgagcagcttgggtttaactatgtgatgaattcgcaagcgctctggggcgattatgataccgttccagcgctgtcgatttgtgagctcgttcgtccgaaaaacgcgtcgtttgtgacggtcattcgctattattggaacggaaaagtgaagcagcttgtcgtcgagtaa

SEQ ID NO: 50417 - DNA, 1233 bp, Anoxybacillus flavithermus AK1
ttgaaccgattagatgaggcggtgcaattttttcgcggggaacgttcgtttcaccgccttttttgtgaaatgaaaaagaaatacgaatcgcttggccgcatcggtggtacgatttctgttgtgtctttttcggcagaggaaaaagacgcgatcgcgtcgttttttggaaaagaaatgaaccgcgtaccgcttgcagcgtttgaaaaacagcttgcgaacacaaagtttgctggtatttctctcgtggagttgctttcatgctatcttggcgagccgcttgtaacgaaaaaagagcaacaacaagaaatagagagagaaagggaagcttattttacccggcttatgaatacgtatcaagcgcagcgcgattggttgatggctgtagaaaaacaacggtttgtacaattagcgtatcaacaaaaccatcacgcgttagaggcggcgctttctgccgtttgccgcgcactcgaacagcttccgtccacctacgtacgtttgcccatttttgcgcaaaaagtagcgaacgacccgcacatgtttgatttgcatacgcttgcggggaagctattgctttcggcgctacaattttatgcgggcaccgaatacgacctctcggcggtcgaagacgtgaacgaactactgcagtcgtatcggctattgcgggaggatgtattaaactttgtgacgtgcgctggtttgatggcagaaacagagaaaggtcaccatcctgttttcgctgccgcatgtgaaacgaatacggtgctaaatgtgccgctacgggaagtgatgctgtttacgcgggcgtatccatccgaaggcaacaacgtctttgtcgtcgaaaatgcgggcgtgttttcgacgttattagatgtgaatgtgccgctcattagcacaaacggtcaattgaatttagcgacgaggtggttgctcgatttactcgtaaaagaaggggctaccctttattactcgggcgattttgacccagaaggattaaaaatggcgcagcgccttgtcgaacggtacggttcatctgttcggctttggcattacgactgttctgattatttggcgacaaaaccgaccgttccgctatccgatgaacgtttggagaaactgcaatcggtgacgctttatgacttacaggcagtgaaacaagaaatgttgcggcggaaaaaagcaggataccaagaagcgcttgtggaacggttgaaaggagagatgaagagaaggtag

SEQ ID NO: 50418 - DNA, 1527 bp, Mesorhizobium sp. STM 4661
ttgcctaagcacattgcgaatgacccggcggatctatttcgtcacgtaagcgccgagaaggctgcattctaccgctgcatcatggatgtcttcgcggcagccaagcggcaatatcgtctacagttgaggcctgacgaagtgcttgccgaagcccgatggccggacgggtcgccacgcgtcgaggaagtcaatgcggcgctcggccagcttgcggaatggggcaatctcgaatcgcaccccgacaccgcgcgggtttccaacctcagcgacttctatcgcgcccgcttcctctaccggctgtcgcccggcggcgaagcggtggaatcggcattggcggtgttcgtgcaaaccttgcaacgccgcgccgagttgcaaacggtggcgctcgaagacatagcgagccggttgcaggcgcttcaagcactggccggaacggacgagcccgatgtcgctaagatccacgaaacgctgcgggacctggtacgtgtcttcgaaggcctggccgagaacgcgcaggcgttcatggccggtgtcgcgcgcagcatcgagttgcaacaggccgaagcgggcgcagtcgcgaactacaagaagcggctgatcgactatctggaacgcttcatgggcgatctggtgcgccgttccgacaccatcgcgcgcctcatactcgccttggaaccgagcatcgacgccctgctgggccaggtagccgagcgcgaatcgcgcgatgcggctcccggcggcgcgcaggaccagtccgatgcgcgcgaccgcgtcctgcaagcctggtgcgagcgatggaagggcctgcgcggctggtttctcagcaccggccacgagcccccgcaagccgaactgttgcgggcgcgggcacggtcggctatcccgcagctcctggccgcgatcgcagccctcaacgagcggcgcagcggccgcagcgatcgctcggccgatttccgcttgctcgccggctggtttgccgcttgcgcggacaatggcgaggcgcaccagcttgcgcgcgccgccttcgcactcaatcccgcacggcatttctcgctcaacgccggcgcggacgccgacctgccggccagcacctcctgggccgatgccgcgccgctccggattcatcctcgtttgcgcgaatatggcgaagccgccccgcgcgggccgctgccccgcgtgagggaccgcgccgaggaccgcgcgtttctggcgctgcaattcgcggaggaatcgctgcaggtggaagcggcgcgcaagcgcctcgccaccagccatcccgcgcggctttcggatctaggcgaactcgacacgcatgccttcggcctgttccttgggctgcttggagaagcgctgagcgaacaggccgggccggaggccccgatagaacggcagacgggcgatggcctgctgcacattcacctgaggccgcttgcccgcgacagccacgccaggatcgacacgccgcatggcgtctttgccgggcgagaccatctgatcaccatcacgcctctgcaggacggccgatga

SEQ ID NO: 50419 - DNA, 1284 bp, Mesorhizobium sp. STM 4661
atgaaagcgacaaacaggtcaaacgatggccgcaacatcggcctgcagcagcaacatttccagcgcgaggagtttcgcgcctgcttgcgcgctctgctgatgacgcccttgatgaaccccgcggatgatgatttcgctgccgtgcgccgacaggccgaagcattgcgcgaatggttttcgcgcgagacaggctggatattgcaggtcgagcgcgagggcgcgcgcctctacaagcgtcctggaaccgtgacagacaccatgcgcggccttcccggctacgaccgtcgccgctacgtgctgctttgcctcgcttgcgcggtgctcgaacgcgccgacccgcagatcaccttgcggctgctgggcgagaggctgctggaactcgccgccgacccgatgctcgacttcacctttacgctcgaggcgcagcatgagcggcgcgaactcgtgtcggtgtgccgctcattgctggatctcggagtgctggaccgcgtcgccggcgacgaagaggctttcgtgcaggccggaggcgaccaggccgacgcgctctatgacgtgcaacgccgcatgctcgctgggatgctggcagcggtgcgtggcccatccacctgggcgccaggagaagcgcccttcacactcgaagagcggctgcgcgccatggtcgacgaacatgtggcggacagcgaggaaggtcggcgcacagagctgcgccaccagctcgcgcgccggcttctcgacgacccggtcgtctatgtcgaaacgctggatccggaagcccgcgcctatttcttcaaccagcgcggaacgatggccgcccgcctgtgcgatgccgccggcctggtggcggagcagcgcgctgaaggtttggcgctggtcgacgaagccggcctgctgaccgatgtggcgatgcccgccgaggggaccgacgcccatgtgacgctactcgtagccgagtatctggccgtcggccaaaggcagcggcgcaaggatggcgcagacacgatgcaggctcctattatgcgagagcatgacattgcggacttcctgcacgaagccaagagccggtacggccgttactggcgcaaatcggcgcgcgagcccggcgccgaacgcgaactcacgacaattgccatcgaacgattggaaaagttgcaactgatcgtgcgaaaagccggagccgtacgcccgctaccggcgctcgcgcgctttgcgctgggcgaggccgaaattcacgaaacccgcaatgtggcagcacaggccgccggctctctgtttggaccaacatga

SEQ ID NO: 50420 - DNA, 4176 bp, Mesorhizobium sp. STM 4661
atgaacgaccgcttgaacctgtttgctacgccactggaaaagcccatcttgccgacaccgacgcggccacgatggcagcctctgcgcctgggcctggtagaactttatcactatgacagtgaggaattctggttccgcgacggccatctgctgctgcgtggcaacaacggcaccggcaagtccaaggtgctgtcgctgacgttgccgttcctgctcgacgcgcaactcaagtcttctcgtatcgaacccgacggggatgccggcaagaggatggcctggaacctgctaatgaacagccacgaccggcgcaacggctacgcgtggatcgagttcggccgtgtcgccgaagacggcacgccgcattttctgtcgctcggcgtcggtctctctgcaacggccgcccgcccacaagttgacagttggttcttcctgctggaagacgccgacggcgcgccgcgcatcaaccaggatctgtggctaaccagcgagcatcggatcgtgctgaccaaggagcgcctgcgcgatgcgctcgaaggccgtggccaggtgttcgacaccgccgccggttatcgccgcgcggtcgacgagcgcctgttccgtctgggcgccaagcgctacgacgcgctgatggatacgctgatccagcttcgccagccgcagctttccaggaagcctgatgaaaccgcgttgtcgaacgcgctgaccgaggccctgccgccgctggcgcccgaactgctcggcgacgtcgccgaggccctcggacagatcgaggaagaccgtcgtcaactcgaggagtatcaggcgctggccaaggccgtcggtcgcttcgaggagcgctatcgcgtctatgccggtacgcagacgcgccggcaggcacggctgctgcgtcaggcccagacggaattcgacaatgccagccgggcacgcggcgaagccaaggcccggttcgacgaagttcaggcgcgggaagcgctcgcccagacggcccgagacgattcggaaatcacgctggcgcgcgatcgggcgcggctcgacgccttgcgttccgacccgacaatgcaggatgccaaccgcctcgaaagcgccgagaaagaagcggaagcgcgccggcaagcgatgcagaaagccgcggcggcggtcgagcagacaggccggcggctggaactcagcatcgaggaaaccgggcgcaccgcccggcgtgtcgagcaggcggaacgcgccttggccgagttgcgccggcaaagtacccttcacgcagatgcggcaggcatcgtcgaccagcacaccgcaaacccgctcgccgcattggagacttccgtgctggtcgagttgacgcagcatgctttcgacagagcctgctccgagcttcgcaatcttgtcgccggccggcgtgaacagatcgccctgctgcgtcgtcgtcacggcgaagtcgcgcgagccgaggcagaccatgtccggcgccgcgaaatccaggacgagcgacaggtcgaagccgaagaggctgccgaacgtcgcacacaggccgacgccgaaatcgaacgccaaggccggggactggcggaaagctgggatcgccatttcattggcctgaagcaactgcaagtcgatccgaacgccaagttcgcggccctaacggcgctggcggaatgggcagtgacgctgcaaggcgacaatcccgcccggcacctgctgcaatcggcgcatgacgcggcaagcttcgcactgacgcagcagcgcgcgacgctcgacggccaacggcagacgctggaggcggaacttggtacgctcgaagacgaacgccaacgcctggaggccggcgacgacatggtgccgcctttgccctacacgcgcgacgcctccgtccgggacgcgcgtcagggcgcgccattctggcaagtggtggattttcgcggcgcggtggctgtcccgcagcgcgccggcctcgaagccgcacttgaagccgccgggctgctcgatgcgtggatctcgccggacggtcgtcttcagtcaagcgacgatggcgcgccgctatacgatacacatgtgctggaacggcgaaagtcttctccgtcgcttgccgactttctggaagtcacggtgccggccggctgtacggtgccggccgatatcgtcgagcgcttgctgtccggcgtcgcctgtgcggatgacgacccggtcgacacagaggcctggattgccgccgacggccgatatcgtctcggtgccctgtccggcgcctggggcaagccgacggcggtctatatcggccatgcggcccgcgctgcggcccgcacgctgcggttggccgagattgccgagcgcctggcgcggctttccgacgaattggcggcagtgcaggccatggctgggcagctcatactggatcgcgagcaggccgacgaagaatggcgcaaggcgcccgccgacgagatgctgcgcagcgctcacctggccgccgtcgccagcgcccgcgcagcgcgtgtcgccagtgaaaggtttgccgaagcggatatgcggtgccacgaggccgaacaggcactcaaggtcgtgcgcgaacggctcgcaacggatgccgccgacctgcgcctgccggaatcgcccgaggcgctgtccgccgtcgaagcggaactggatcattatcgcgatacgcaggtgcggctcgagcaggcagcccgcgagctgcgcctggcgctgctcgaatggcaacggcaacttgccagggaggacgagacacggggcgatcttcagcagcgcgagcaggagtccgcggcggcccgcgtcgaagcggaagaggcccttgcgcggctcgaagtgctgcgcgacatggtcggcgccaaggtcgaggagttgcagcggcaactcgccgaagcacgtgtcacggtcgaaaccggggaggttgcgctgaagctcgccggtgacgtcctgcgcaaggcgggcgagactcgcgcggtggctagccagcaagcagagacggcgaacaacgtcttgcacgagcgtggcgaggcgcgcgcacaggcggtctccaaattgcagcagttcgccggcaccggtctgctgtcggcggcgctgccgcttatcgagctgccggatatggagggcctttggacgatcgatccggcgctgactctggccaggcgggcggaacaggaactgtcgaacctcaaggacgacgacgacgcatgggcgcgcgtacagcggcagattgccgaggaattgaccgagctgcaacgcacgctcggcgcgctgggccaccaggcccaggccgaccccagcgactgggggttcagcgtcgacatcatctaccagaatcggcgcgagcggccgggccgcctcgccggccgactcgccgaagaaatcgctcagcgcagcgaattgctgaccgccaacgagcggaccgttctggagaaccatctgcaggccgagatcgccgctgaaatccagcggctgctgcaagccgccgaacggcaggtcgatgccatcaacagggagctgcacaagcgccccacctccaccggcgtacgctaccgcctcctgtggcagccgctgtccgaggaggaaggtgcgccggtgggcctcgacgtggcgcgcaagcgcctgctcaacaccagcccggatctctggtcggcggaagaccggcgtgtcgtcggagcgatgctccagcagcgcatctccgctgagcgggagcgtgccgattccagcagcggaaaggacagcggcaccctgcttgaccagctcgcccgcgccttggattatcgccattggcaccgttttcgcgtcgaacgctggcaggaggggcattggcgcaagctttccggccctgcctcgagcggcgagcgggcactcggcctgacggtaccgctgttcgccgcggtcgccagcttctacagccagggcagctatgccctggcaccgcggctgatgctgctcgacgaagccttcgccggcatcgacgacacggcgcgcgcgcactgtatgggactgatccgcgagttcgacttggacttcgtcatcaccagcgagcgcgaatgggcctgctatgccgagctgccgggcgtcgctatctgccagttgcagcggcgcgaaggtatcgatgccgtgttcgtctcgcgatggacatgggacgggcgggagaagaggtccgaggccgatcccgatcgccgattttcgccggcatga

SEQ ID NO: 50421 - DNA, 1302 bp, Mesorhizobium sp. STM 4661
atgaacgaccaggtcgaaccgcgtcttcaacgcctgctcggtggcgagcatctcgcctcgctgcgcaggcggctgcgccaacgtttcgagcgcgcaccactcggcggcgctgtcgatcacattcgcgtcgccggactcagcgcggaagaacatgcgacactggcctcgctgctcggccggccgcagcgccgctccaagtccctgcggatcgatgtccgccaggtcgatgccgatctgctgcgctccggcatcgccgcgtccttgcgtgacgcgttggaaaagctcgacgggcccatccttcacctcgccgggatgcgccttcatttgcaaacagtgtggtccgatgtaatcgatggttgcagccatcccggcttggctagcttgctcctgacgccggagggcatcggcctgctcaagcggctttctcgacaggatgcgatcgccgcggcggagctttgccggcgcaccgaagaggtgctgcggcatctgccggcaaagggtatcacgcgttcgcaactggccgctgacgtgttgggcgatgcccatgccctcgacaacggccgcggggtcgcggcacttgtgctggcggtctggcgtcagaccaccacgcccgctcctgacgccatcgcacctattaccgacgaaggcggcggcacggcgcggaaatcgggagaggacgtcgatctggaaccggccggcggtgcagagcgagcccgcgagacatgggccagagcaggcgttctggtcaacgagctggcacgccccgcactgttcctgaacctgccgacaagcgggagcgaaagcgatcgtcggcctccgggagaaccggcctatgcatcgctgcgatcactgctgcgctcgtcaacccgatgggacgcagcgggccgcggcgtctacgtgtgcgaaaatcccaacttgctcgccatcgccgcggaccgatggggagctgtctgcgcaccgctggtgtgtactgatggtatgccggcggctgcgcagcgatgtcttctgacccaactcgcgcaggcgggcgcgcaactccactatcacggcgattttgactggtccgggttgcacatcggcaaccacatcatgcgcgagcacggtgcaaggccgtggcgctttggcgccgtcgactatattgccgccgtgcgaacggcgcgtggccttgcccacccacttggaggaaaggcggtcgaagcatcatgggatggggcgctggcgcccgccatgcgtgaacaccgcgtcgccatcgccgaggaggccctggtcgcctcgttgttgcaggatctcgatgatcgatga

SEQ ID NO: 50422 - DNA, 1503 bp, Anoxybacillus flavithermus NBRC 109594
atgatagaaggggagcgaaagatggatacgtcgtggctaaagccgattacggaggcgaaatatttagtagtggataacgcatatcggtatcgggcgattttgcgctatttttacacgcaacacgagcgaatgcggcaatatttgtttcctgaagaagtgtacgcttttttaaaacaattcgatgaatttcaagcgtatacagaggaagagctgcagcaagacttagaacagctcgtcaaatggaaaaacttaatcgctcgacaagaaacgggtcatattcggacgattgaggaatttaaaaagaagcgatttcgttatcaatgcagcccatacacggtcgaaatcgaacgaatgattcgcacgcttgagcagctaggggatacgttcggtgggtcgctcgaaaaaacaaggtttgaccgcctgtatgcctcgcttgctcggatggaatcgattattcacgatgggtttagggaaaagcgagaggaaatgaatcaagtgtgggaagaaacgttcgattattttaaaaaaatcattcaaaactctgcagactacattgcctatttaaacggagaaaacatggaagaacggatgatgtccgattcgtttcttgtgtataaagaacagtttactgcctatttacgcgactttatcgtcgcattgcaaaaaacgtcaatgcaaattgaaaaactgctcgaagacttgccagaagacggcgttcgccgttttattgaggaagtggtcgcttaccaacttgccattccgcgctttgagggcgtagttttttcgcgtgaacagctaattgaagagaagctagacacgtggcgcagtttaaacgaatggtttttaggacgaaacggccacgaaagcgaactatcatttttacaaaagcagacgaacgaagcgattcggcgaatgacgcgtgtcgttcagcggttaggggagcgccatcatcattttcgcagccgaaagaaagactacttgcatttagccaaatggttttcgtcattagaaacattggaagaagcacataaactgtccgcggtggtgttcggctgtttccatacaaagcacatcgccgctgaaaacgatgcaacggaaaacatgtaccgcgacatttgggaggagcagccgacagaatggctcgtcaaaccgcgcgttcgccactatcgagaaaagaaaaagccagaagccatgattgatcggcgaaaagaaaaagaggaaacgatgaccgcctacttagcagcgaaacaacaagaagaagaagagctcgctcagctgatagacgacgggaaaattgtccttcgggaactcccggttgttgcttcgcatattcgtaaaacgttgcttgggtgggttgcgaaagcgatggggcgagaagaccggatagtacaaacggaaaacggatggaaagtaaaagtggttcaacgcgaaggaacgattatactgaatgcagaagatggtgcgttaatgatgccagattatgaaatccatttgctagattag

SEQ ID NO: 50423 - DNA, 1167 bp, Anoxybacillus flavithermus NBRC 109594
atggaaaaagagtttgatgagaaagcgaaagaggcgttaacggcgctgtttgaacatttttggattgttcgggaaaaagagccggaactttttcaaaaaatacgcgaacgcgaaaaagtgttaaaacggtatgtacaagagaaatttggttatcggctcattgtccaccgctattttgctaagcttgaaaaaataccagccgagcccgaagcatggatgggcatcgggttgtttcaagaaccgcttgattatgcgctgttttgttgtttgcttgcatatttagaagggaaagcggtcgaagaaaaatttttattgtcggacgtatgcgaagaaataaaagcaatgtacccaggcgaaactgcgcttgactggacgaactaccaacatcggcgcgctcttattcgcgtgttgaaaacagccgagcaaatcgggattgtacatcacgtcgacggggaactcgaggcgtttgccaatcaagaagacgaagaagcgttgtatgaagtccctgtattgtcccgctattttatgcggtcctatccgaaagattttattcaatatgaaacgatcgagcaactgttggaggaagagtggaaaatgtcacccgacgattaccgccgccactttatttatcggcagctctttttatcgcctgtcgtatatcgccggcaaaaagacgacccaaacttttattatttgcgcaacttccgccaccgattgcgtgacgacatcgaggcacataccgattttcgctacgagctatataaaaacgcagcactattgacgattccagaacggcaacatgtgtatacgctattcccagaccaaaaaggaacgtcggatattattcttcattttgcaacagttgtgcgcgctcatttggctaaatatccaccggacgaatatggacaaattcatgtgacgatgtccgattttcatcatttgctcaactactgtatggagcagtatggcgaaggctggagcaaaacgtatcgggaaatgacgacagcacaactcgcccctgagctacttagtgcgttaaaagagtggaagatggcggagcatgaacaggaaacgggcatggtgactctttatccgctgcttggaaggcttgtcggtcgatatccagacgattttctaatgaaaggaagagacgatgatgacgaataa

SEQ ID NO: 50424 - DNA, 4143 bp, Anoxybacillus flavithermus NBRC 109594
atgacgaataaatgggtgcttcatcgcgcgggattgataaatttttggtattacgacgagcaatatttcgaatttgctgacgggaagttgttgctgcgcgggacgaacggttctgggaagtccgtgacgatgcaaagtttgcttcctgtcttattggacgggaaaaaaacgccggaccggcttgacccgttcggttcccgggcacggcgaatggaagattacttgcttggtgaaaaagaaattgtcgatcgcgatgagcggacaggttatttgtttttagaatataaacgaaagcagacggaacaatatgtgacaacgggaatcgggttgcgggcaaagcgacaaaaaaatatggatttttgggggttcgtcatttttgataaccgccgcatcggtcgcgatttatttttatataaaacggaaaaatcggcgagcggcacagaaaaaatcccgctcacgaaacgcgagctagccaatttgcttggcagcggcggaacggtcgtggattcacaaaaagaatatatggagctcgtcaataagcacgtcttccgctttgaatcgatggaggcgtttcaagaattaattgagctattgattcaactacgcagcccgaagctatcgaaagatttcaaaccaacggtcatttacgagattttagaaagctctctccccgcgttgacagacgacgagttgcgccatttatccgaaacgattgaaaatatggatcaaacaaagcaacaactcgagcagctagagcgcgacgaacaatcgttaaagcggctttgtacgcaatatcgggcatataacgaatatatgattgcggaaaaggcgagcgaatggcttaaggcagacaagcaggtaaagcggctagcagaagaaggaaaacaatggcttacggaagaagcagaaaaacaaacgcaccttgcggatttgaacgaatatattcaaacgcttgcaaacgaacaggacgtattgcatcaacgagaagtagaattagcaagccacgaagtgttccaagcggcaaaagaatatgaacgagttcagcaagaaatacgcgacattcacgaaaagcaacaaaaactattgcggcaaatcgacgaaaaagaacaactagaacgccgctataagcgccagctagaagaagacgaagaccggcggtatcagatagaaaagcaacttgcccaacaactagacgatttacggcatgatgcggtggaaagttccttttctgcgcatgatctgaacgaagccgatttctcccgccagcgtcaaacaacatttgactttaccgtctggaaacgagaagggcaagaatatgttgaaaaactagaacaaatcattgcgctttggcgccgtcacgacgaaaggaaggcgcgctatgaagagacgagtaaagaggtaggcgacctgcagcgggaagtagacgaattatgccacgaagaggcgaaatggctcgaactgttagaaaacgaaaagtcgcggttccaacaagaagtatttcgctggctcgaacaatgtcaagatgtttccgtacaagaagcatctgtccaactatttttacagcgccttcatgaactatacgaaacgtatcatgtcgatgagatgaagcagccgtttacggaagcgtattacgaagcactcaatcaaaaaaatgaagaaaaaatggcgcaaaagcatgcgtgcacgttaatagaagagaagattgctgcaaaagaagcggaatggaaccaatggaaaacgcaaaaagatccagaactcacacgcgatgaacaaacgatggcagcgcgggcggagttagccgaaaaaggcattgcgtttgttccgttttatgcaggggtggaatttcaagaccatgtgccagaaccacttcgggagaggatcgaatcggcgttgtaccacgcagggctactggatgcgttaattacggaaaccgatgtggatgtaacgtatgaccgagtgcttgtgccacgccctgtcgaactcgcgcatacgttagcagactatttacagccggatgtagatgaaggatgcaaagtgtccacaacgcgcattaaagaagtgctccagagcatcgtgcttgccgatggaggaatggacggggcatttatgcttaacgaagagggacattatacgctcggattagtcaaagggcatgcaccgatgcgggaaaaagcattgtttatcggacgggctgcccgcaagcgttggcggctagaaaaaatcgctgcacttgaagcggaactaatggagcttcgtgctcagctgcacgagcaaaccgatagactcaatcagctcgagcagacgattgcgcacataaacagctggtttcgctcctttccaaccgaccgcgacatgcgcgcagcttttgaagagcgggaaaaaacgaagcgaatgatgacaaccaagcaacaagaatgggagcggaaaaacgagaagttagcgcagcttgctcgcgattggcaacaagcaaaacaaacgttgcgtgaacaaaccgagagaatcgatttagagttttccaaagacgggtatgaacaggcacttcttttgatgaaatcgtatatgcgtgggcttcacgaactgcaaatgaagcatcgtgaatttctccatttgctcgatatgattcgccatcgtgcagagcagctagaaacgttgcaacaagaaatcgacgaaacaaagggcgaacgacatgtgcttgcaaaagagcagcaaaaactcgaactaaaacgacaagaaatcgaacggacgctacaacgaatgggcgcagaagaaattcaagcggaaattcaacgcgttcgcgaccgattggcatttttacagcgagaaataccagcgaaaatgaatgagcgcattgcgctagaacatgagctaaaagttattcgtgaaaaatgcaaacagctgtcaaagaaagaagcgtttgctaagcggctagcgacggtatggaagcattcgttcgagcgagaacttgcccttgaacttgtcgaatttcatggtgctgatttgttagaaaaagcaaaagaggcgatgcagcgatatggggcgctagcgaaagaaacacgtacatcgcttgtgaatcgattaaatagcatattttttcaagaatcagcgaatttaacggaataccggctcagccaagagccaattgtcatagaggaagaaaatccatttgcggatattgagctagacgaggaaatggaattaaaagttgcggggtggagagaaaagcaagaccggatcgtccttttgcttgattataaagggcagcgtgtatcgccattttatgtattacatgaaatcgaacatgacattttcttgcagagcgaatatatgaaagagcaagaccgcgaattgtatgaagaaattattttaaaaacaatcggacgaattttgcgcagccgtatccaacgggcggagcgttgggtaaaagatatgaacgaactaatgcaacagctcgacacatcttctggtctggtgttatttattcaatggaagccgcgcactgcggaaacagaagaagagatggatacgaaagaacttgtcgaattgttgcggatgaactcgcggttattaaaagaggaagatttgcagcgcgtgacgaaacatttccgctcgaaaattaaccgcgcccgcgagttgttagaagagcgtggccaaggcaatacgctgcaccaaattattaaagaagtgttggactatcgcaaatggttttcgttcaccctgtattaccagaagacgaacgaaccgaagcgggagttgacgaaccaacgtttctatcaatttagcggcggggagaaagcgatggcgatgtatattccgttgtttgccgcgacgtactcacgctatcaagaagcggcagacgatgcaccgtacattatttctttggatgaagcgttcgcgggggtggacgaaaacaacatccgcaacatgttcgggcttgtcgaacagcttgggtttaactatgtgatgaactcgcaagcactctggggcgattacgatacagtaccggcgctatcaatttgtgaactcgttcgtccgaaaaacgcctcgttcgtgacggtcattcgctattattggaacggaaaagtaaagcagcttgtcgctgatgagttggtgggaaagggtgagctcattgaaccgattagatga

SEQ ID NO: 50425 - DNA, 1227 bp, Anoxybacillus flavithermus NBRC 109594
ttgaaccgattagatgaggcggtgcaattttttcgcggtgagcgttcgtttcaccgccttttttgcgaaatgaaaaagaaatacgaatcgcttggccgcattggtggcgcgatttctgttacgtctttctccacggaagaaaaggaagcgattgcgtcgttttttggcaaagaaatgagccgtgtgtcgctcgcagcgtttgaacaacagcttactaatacaaggtttgccggtatttcgctgattgaactattagagcattattttggcgaaccgtttgtgacgaaaaaagaacagcagatagaagcggagcgggaaaaagaagcatattttacacggttgatgcatacgtatcgagcacagcgcgattggctgatagcggtagagaagcagcggtttgtacaactagcttatcagcaaaatcctcaaacgctagaaacagccatttccgtcgtttgccgcgcgcttgaacagcttccatccacctatgtgcgcctgccggtatttgcacaacaagtggcaaacgacccacatgcgcttgatttgcatacgcttgcagggaagttattgctttcagcgttgcaattttacgcggaaaaagaatatgacctttcatcggttgaagaggtgaacgagctattgcagtcgtgtcaccttttgcgggaagatgtgttgaattttgttacatgtgctggtgtgctggcagagacagaaaagggacgccaccttgttttcgctgccgcatgcgaaacgaatacggcgctaaatgttccgctacgggaagtgatgccgctagtgcgggcgtatccgtccattggcaacactgtttttatcgttgaaaatgccggcgtgttttcgacgttagtagatacgaacgtgccgctcattagtacaaacggtcagcttaatttagcgacgatgtggctgctcgatctgcttgtaaaagaaggggtcactctttattattcgggcgattttgatccagaaggattaaaaatggcgcagcgccttgtcgaaaggtatggttcctctgttcggctttggcattacgaccgttccgattatttggcgacaaaaccgaccgttccgttaccagatgagcggctagcgaaattgcaatcggtgacgcttcatgatttgcagccggttaaacaagaaatgttacggcggaaaaaagcaggatatcaagaggcgattgtggaagagttgagaaaagatacgtattga

SEQ ID NO: 50426 - DNA, 1476 bp, Clostridium clostridioforme CM201; identical to SEQ ID NO: 50210

SEQ ID NO: 50427 - DNA, 1137 bp, Clostridium clostridioforme CM201
atgaatgaattcagaacactattagagaatttctggatctgtaaggatacagataaggaaacgtattacaaagtgaagagggatattccgaattttcagcgatttatcagggagcagctgggctggaagcttgttcatacggaaaatttgttaaaactagagaaaagaccggctcatgcggaagggtttatgggaatcggggaatttatggagatcagggactactgtattttgtgtgtagtgctgatgtatctggaggataaagaggaacaggagcagttccttttgtcagagctgattgattatgttgaagcgcagctgaaatcttatgtatccatagattggacttcttttacacagagaaaatccctggttcgtgttctgcaatatatggagaaactacagatgctccgggtatatgagggacgcagcgaggcctttggctcggaggcaggacaggaagttttgtatgaaaataccggatattcaaagtattttgcaaccagctttccaactggtatctctatatttgaatcctgggaggattttgaaaagacagattttgaagaatttcaggaaaacagaggcgcattgcgcatcaaccgtgtgtataggcagttggcggtgtgtccgtctatgtactgggagaacagtgaggacgcagattcgctgtatttaaaaaatcagcgtcagtgggttgcaaaatatatcaatgataacatgggaggaaatctggatctatacaaaaatatggcatgtatctcattggacggggacgattgctatggttctgttcacccaagagacgccatgcttccggagattgttcttatggtctgtgggaggatacaaaaagaggtttcagaggggaatttagaaaagcaggaaaatgaatgtatttacatgacaagggaacgcatttcagacgtgattttgtcctgccgcagagagtggagcagcgggtggagcaaagaatatcgggaaatggatgaggagctgcttgtggagcatgtgttaaaatatatgaaaacctggctgatgattcgaaatgacggaacgcagattaccatatttccgtctgtgggaaggacagcaggagtttatccggaggattttaagggaggtaccggggagtga

SEQ ID NO: 50428 - DNA, 4068 bp, Clostridium clostridioforme CM201
gtgaaagaccgctttaaaatgaaccgtatagggttcgtgaatttctggttatatgatgaagaagagtttgaatttgtggatggaaagcttctcctgcgtgggcaaaatgcgtctggtaaatccattacaacccagagcttcattccctttatattggacggtgaccgtacgccgagccggttggatccctttgggtccagcgaccggagaatggaatattatttcctgggggaagaagggaaggatgaatccacaggatatttatttttggaattcaaaaaagagaggtcggaagaatatcgcaccattgccattggacagagggcaaaaaaaggaaaacccatggacttttggggttttattattttggacgggcgaaggattggctatgatctgaagctgtacaaggagattggttcaagcaaaatcccttatgacagaagggaaatgaaaacagagcttggagatgacaatttttttacgacgagccagagtgaatataaaaaagcggtcaatcagtacatttttggattccggaaagcggagcagtatgagcagtttattaaattgcttgtgaaggtccgcgctcccaaactttccaaggaatttaaacccaccaaggtatatgagatcttgaatgattctttgcagacgctgacagatgaagatctgcgcgctatggtggatgctatggaaaaaatggatgagattcaggaaagcctggagattttgaagcgagcctttgatgatgtgaaaatcatacggaatgaatataccaggtataatcaatatatgcttgcgaaaaaggcacaggcttatattgcaatgaagcagaagatagagacagaacagtgccagcttgacatacaggagcagaagcggcaggagacagaggaggccagaaacagcaagagccggcgtctggctgacttagaggagcaaaaaaagctaaaaggaattgagcgggctggacttctggatgcggatctggagggaatcgaccgtaagttagagcaggccaggggagagaaagaagaagctgccgggaaggttgccgattgggagagtaagatccgggattatcaggaaatgatctggcggggagaacgcagagtgaaggagatcatggcctgcctggaacaaatacagcaggagattggggaagccaagttggaactgggagagcagcaggagattattcagtgggatcagcacgaggcggctcttcagatgatagacagaggcgatcatgagaaaagcggtgaaattgtaaaaagccttgattcgctgaaaaaactgctggctgaatgtaaaagggaaatacatgagtatgaggagcgatccagacagtatgatgaacttgcggcgcagctggagaaacttcatactgaaaaagcagaggctcagcagaactttaaggctgcacaggaagatgttgtccgctgtgtggatcagtggatcacagatatctatgcagcagagaaaaaatcctctcagtggagtcctgacagcgggattcttccaatactggtggagaaaattcgggagtatcagtcggcagcagatgcagaaacagtacaggcgcttttgcgcaccgattatgagcgccagcgccagggactcatggatctaaaaagcagtctggaatatcagaagaaaatccaggaggaagaactggatcaggaaaaagaaaagcttacatgcctgcggaattcaggggaattggagccggagagggacgagagtatagagcgttcaagaaaggcgcttaagagggctggtatcaaagcagtacctttttataaaactgtggaattttctaagaatctggatgagacgtactgtgcaaggctggaggctcagctccagaaaatgggaattttagatgcacttgtagtatctgcggatgattttgagaatatcagaaagcggtgtcccggttttttggatacggttttgtatgtgaaagggaatggaggttccggcttttccggtctgactgtcagcgaagagctggaacctgctctgaaagagaccgttcagaggattctcagcaatatttatgaagataaagaggatggacaaggaatttaccttgggaaagacgggactttcaaacaggggattctggctggtaaagcaggcaaaaccggcagtgctgagtttgtgggagttctggcgagaaaaagacggaaggaacagaaaatccgcgagctggaaggccggatttctgaaattacagaaataattgtaagcttggaaaaagagattacagcggtgcaggagcatttggaaaagctgcaggaagaatatcagaagctccctggcttttcagagattaacgctgccttagaccaggaaagggaatgtgaatacaagctgcaaaggacatgtgaggaatgtgggaagaaagaggcgcaggagcggcagctgatatttaaaaagaaccagcaataccagacaatgctgcaaaagtgcaagccatttccctatggcagaacagaagaagcctatgaggaagcctataatgcgctggaagaatatagccgcatctggcaggagatcaggcaggcaatgctgcagcttcggacggctcaggagaatctcagtacagagaaggacaggaacgttcaaagtgaacagctgatggatgatgcttttgcagagaaacgcagctggagtgcgaaagaaaaagagagcgagattcagattcggcagtttgaggagtacctaaaccgtccggaaattgcaaaaaaggctggccgcttaaagcagctgaagaaagagctggaagaaattggaaccgagtgtgatactttaaaaaaagatttggttattctgggggaaaggctacgggtgattctggaagatgagccaaaactaaaggaaagcctgcgccagaaaattatagcagaaacctgcctgaggaattattttgaagaggagcttgcgctaaaactggtatttgacagagaaagccagggaatctttgaatgtgctaagagagcggtgtcggtattgcgggaaagcgataagaacagagagccaacggacctgctgcaggcgctgcatcaggtatatcagcgccataacggaagtctggtcaattacggtacatctttggaggaatgttttgacacgccggtggaggcagctctggaaacagaggctgctggcgcaatacgaaagcgggtgcgggtcgtttcctcatggaatgggaaaagggtatatctggaggaattttacggcatcttgaaacagggcattgatgagacggagctgctgatccagaagaaggacagggaactgtttgaggatattttgtcccagaccatcagccggcagcttacggaccggattgcagaaagccggaaatgggtttcggatatgtcgcagctcatgcgggagatggatacctctatgggtctgatcttttcactggactggaaaccccgtaaagcagagaatgatatggagttagacaccgcggagcttgaacagattctgctcagagatcatatgcttctgaccatagaggatatagagagggttgcggcgcattttagaagccgaatccgcatggagaagctgaaactggaagaaaaaggcgacatgatcaattacatggatcttgtcagggatgcgctggattatcgcaaatggtttgaatttcacatgtatttcaggcgtggagaaggagagcggaggctgttgaccaatgcggcgtttaaccgtttcagcggtggagaaaaggctatggccatgtatgttcctctttttgcagcagtcaacgcacagtataaaaaagcggagcaggaagaccatccgcgaatcattgctttggatgaggcatttgcaggagtggatgacaaaaatatcagtagtatgtttgaacttgtgcataagctggattttgattatatcatgaattcccaggctttatggggatgttttgagacggtaaaaggacttcggattgcagaactttcaaggccccaggattcgcagattgtttcagtgatccgttatacatggaatggacgtgagaagatattagatgtgcaataa

SEQ ID NO: 50429 - DNA, 1299 bp, Clostridium clostridioforme CM201; identical to SEQ ID NO: 50213

SEQ ID NO: 50430 - DNA, 1482 bp, Clostridium innocuum 2959
atggaactatatgataagcttttaaaaccgataaccgaggtgaattatctcagagccgagaatgtggaccgttaccgcattatcattcgctatttttatcaggagcatgaaaaaatacattactggatgtttaaagaggatatttatgacatgatatccgcattaccaggatatgaagactataccatggagaactgtcagaatgatttgcaggcactgtgcgactgggggaacctcgttgctacacaggatacctccgttcccaataccttacaggaatttaaaaataagaaatttcgctatcagctaagtgaatataccgttgtaattgaacgaatgacaatagagctggagcatcttgctgtggaaggggcatccttggaaccgacgctgctggagcggattcgtaaacagattctgcagctgcttgctgtaagagataaatcccatatggaggtcgctgactggtggcgaagtctgaacgatgatttcattcgtttgaatcagaactatcaggattacataaagacattaaacagtgccaaagcagaacaaatgatgaagtcaagagaatttctggtattcaaagataagctgatcacctatcttcagacatttgtaaaaagcctgcaggagcacggtatgatcatcgaggattatttgagcggtgtaaaggatgaagatatggcgctgattttcgataaggtcgcagaatatgaactatcgattccccgcatcaattcccatatcacaaagactgccgtactggaaaattgtcagggacggtggcagagtcttttcaactggtttgtcggagaaaatgataacaatgaggtaaaccgcctgtttgaaattaccaatgaaatcatacggaaaattacacggtatgcactgcagatcggtgagctgcacaatcagggggcaaaccgtaaggaggaataccggcgtatagcggaaatattcgcaaaatgcaattctatggatgaagcgcatcgcttaagtgcactggtgtttggggcagatacctgtatgcatttgaaaaacatcgcaccaagggatacggaaagcattcacagcggggtgtatcaggaagcttctgccttccttgcactggagccgcgtacaaaggtggcaagaaaaaagcatgagcgaaagcctgcggtggattacgcgctggaccggcgaatacagcgtctggagtatgaggcacagcgcgaggctgaacagaagaagataaaggaattgagtaaaaatggagaaatcatcttttctcagctacccttacttgacaaggccaccagaaaagcccttcttagctgggtatccaaggcacttgctgcaagtgagcggcgagccaaaacagatcaggggcagtattatcacatagagaaagagcgcgaaggggattgcgtgctgcaatgtgaggatggaaatctgataatgccatgcttcaaaatcctgtttgatgaggaattatcatga

SEQ ID NO: 50431 - DNA, 1131 bp, Clostridium innocuum 2959; identical to SEQ ID NO: 50192

SEQ ID NO: 50432 - DNA, 1281 bp, Clostridium innocuum 2959; identical to SEQ ID NO: 50193

SEQ ID NO: 50433 - DNA, 1476 bp, Clostridium clostridioforme 90B1; identical to SEQ ID NO: 50210

SEQ ID NO: 50434 - DNA, 1137 bp, Clostridium clostridioforme 90B1; identical to SEQ ID NO: 50427

SEQ ID NO: 50435 - DNA, 4068 bp, Clostridium clostridioforme 90B1; identical to SEQ ID NO: 50428

SEQ ID NO: 50436 - DNA, 1299 bp, Clostridium clostridioforme 90B1; identical to SEQ ID NO: 50213

SEQ ID NO: 50437 - DNA, 1476 bp, Clostridium clostridioforme 90A8; identical to SEQ ID NO: 50210

SEQ ID NO: 50438 - DNA, 1137 bp, Clostridium clostridioforme 90A8; identical to SEQ ID NO: 50427

SEQ ID NO: 50439 - DNA, 4068 bp, Clostridium clostridioforme 90A8; identical to SEQ ID NO: 50428

SEQ ID NO: 50440 - DNA, 1299 bp, Clostridium clostridioforme 90A8
atgtgcaataataaagaatgtgcaaattactttaaaagtcagcgggcatatcacagatgctttgaagaatttagaaaaaaatggaaatcttacggaaaagctgcgggaagaattacgcttaaacagacttcggaggaagagcggcgggcagtgggcggcataatcggcaaagtattttatgagggaacaattcggttttctttcttggaatttgaacagggactgcaaaaaacacgtttcgcgccggtggatatgaaagcggtgctggaggaatatttcggggagccgctgattaccactcaggggcggcagagagaagagcaggagagaagaaaaaagtttctggacagaagctgcggatattttgaagaaaatgccggaagagaagctgcggcgcttgtatggttgcggaaaatgatctctgagaaaaaatatggatatcagctgttgatgagggagtacgcaaaagatgaaaagcaggcggaactgctggtgcggaatgtagggaacgcagtgatgaagctaaaagagctgacggataaggaagatgaatatccgttagccgtgctggctgctgagataacagataatccccattactttgaccgcagcacaacagccggattgctttttgtacatgcaatctgctgctgcgaaaatatggaattgcccgaagacgcacatcagtggcggaaaatgctgacgcaggtttcgattgttccggacaatatatcctccatggttcatggttatggactccggctgcttactaaacagggatggcatggggcctatgatacgttctgtgagcgaaaggaaccctatgttattaccatggagaatatgaaagggattatcggtgtacaggcagtgggggagaaggcgtatatagttgagaatgagatggtcttcagctatttgattcataatttgaaaaattcggactacacccttctgtgtacttccggtcagccccgttctgtggcacaggtgctgattacctatattctggccagtgggtcaaaaatctactataatggagatattgatccggatgggatctgtattgcggatagactatggaagaaattcggggatcgtattcatatatggagaatgtcgccggaggattatgataaaagcctctcaaaagaaagaataggggatattggaagagcaaagctcgaaaatataggtcatcctatattgaagaaaacggcagagtgtatgaaagaaaagcagctggccggatatcaggaaaatatgctgaaagagttgctggaggatatgcaaaactga

SEQ ID NO: 50441 - DNA, 1476 bp, Clostridium clostridioforme 90A6; identical to SEQ ID NO: 50210

SEQ ID NO: 50442 - DNA, 1137 bp, Clostridium clostridioforme 90A6; identical to SEQ ID NO: 50427

SEQ ID NO: 50443 - DNA, 4068 bp, Clostridium clostridioforme 90A6; identical to SEQ ID NO: 50428

SEQ ID NO: 50444 - DNA, 1299 bp, Clostridium clostridioforme 90A6; identical to SEQ ID NO: 50213

SEQ ID NO: 50445 - DNA, 1476 bp, Clostridium clostridioforme 90A4; identical to SEQ ID NO: 50210

SEQ ID NO: 50446 - DNA, 1137 bp, Clostridium clostridioforme 90A4; identical to SEQ ID NO: 50427

SEQ ID NO: 50447 - DNA, 4068 bp, Clostridium clostridioforme 90A4; identical to SEQ ID NO: 50428

SEQ ID NO: 50448 - DNA, 1299 bp, Clostridium clostridioforme 90A4; identical to SEQ ID NO: 50213

SEQ ID NO: 50449 - DNA, 1476 bp, Clostridium clostridioforme 90A3; identical to SEQ ID NO: 50210

SEQ ID NO: 50450 - DNA, 1137 bp, Clostridium clostridioforme 90A3; identical to SEQ ID NO: 50427

SEQ ID NO: 50451 - DNA, 4068 bp, Clostridium clostridioforme 90A3; identical to SEQ ID NO: 50428

SEQ ID NO: 50452 - DNA, 1299 bp, Clostridium clostridioforme 90A3; identical to SEQ ID NO: 50213

SEQ ID NO: 50453 - DNA, 1476 bp, Clostridium clostridioforme 90A1; identical to SEQ ID NO: 50210

SEQ ID NO: 50454 - DNA, 1137 bp, Clostridium clostridioforme 90A1; identical to SEQ ID NO: 50427

SEQ ID NO: 50455 - DNA, 4068 bp, Clostridium clostridioforme 90A1; identical to SEQ ID NO: 50428

SEQ ID NO: 50456 - DNA, 1299 bp, Clostridium clostridioforme 90A1; identical to SEQ ID NO: 50213

SEQ ID NO: 50457 - DNA, 1485 bp, Clostridium butyricum 60E.3
atgaatattgataagaatgtaacaaaacagattgatgaagtaaaatatcttgctacagagaatacatacagatatagagcaataataagaatcatgtacaaaagttatgaaaaaatgaaatatacaatttataaagaagaaatctttgaaagtcttaaaatctatgatgatttttcttcgtataccatagagaatctcaaaagtgatcttgatgttttagtatcatggaaaaacttaagtgcaactgctgatactgcaaaagttaacactattgaagagtttaaaaacagggaatttagatataacctttcaccaggtacaattgaaattgaaagaatgcttattaaacttgaacatatgacaatagaaaatacatcttcacttgaaagttcacttgtagaaaagtttctcaatcttatcgaaaaaatgttatttataaaggatgaggaaaataaaaaagtttatgaatggtttaaagaccttaattcaagctttgaaagtttatatagaaattatcaggattacatatcaaaattttattcacctaaaaatgatgagcttatgaagacaacagaatttttaatatttaaagaaggatttattaaatatttaagagaatttataagaacacttcagaataatacaaacagcatacaaaaagtatttaataatattaatgaagatacaattatgcagactgtacataaagtatatcttcatgaaaaagaaatacaaagtcttgaccttattacagatgaaaaggaatttaaagatcttaatataggaagaatcgaatcaatgaaggagtggttcgtaagttataaaggacgtgaacctcttattgaacagcttataagtaatactaatgagataataagaaaaataacaagatatgctgcaaacatagcagacaaaaaatctaataatgctaatagaaaagaagagtataaaaagattgctaaattatttagtgaatgcagcgatataaatgaatgtcacaagatttcaagtgtagttctaggatcttttaatatagaaaaaataatggcagaatttcaacgtgaaacggaaagtactaacagttcaatatatgatgagacaccatcagacattatcataaagcctaaaattagaacatacagggaaaaaatcataaaaaatcctatagttaataaagaagaacgcaaaaaggaaaaactcatgaaaatacttaaaaaaagaaaagaagaatctaaaatattacataaatttatacataataatgaaatagcgtttgacagtcttccagtaataaatacagaggaacgtgtacttttattgagacttttaagcaagggaagaagcagaaagagagaatggtctaaaaatgaaaatggtatggaatacaaggtagtactttgtgatggagataatattaaagttgcatgtgatgatggaaatttatctatgccaccttataaaataatatttaaggaggagctgtaa

SEQ ID NO: 50458 - DNA, 1140 bp, Clostridium butyricum 60E.3
atggaagaacttaagatgctgcttaaaaacaatattattttaagagaagataaaaaagaaatgtactataagattaaagatggttataaggaatttaaaaattttataacagaaaacttaggatataatcttatcataagaagtgattttataagacttgaaaagcttccaggaaaaagtgaaagctttatgggaattgaagaatttcaaaataatattgaatatactatgcttatgcttattttggtattcttagaagataaaagtaaagatgatcagtttcttttatctcatattactgaatcattgtcatcaaatgatatagatattaaatttgactggacggattattctactagaagaagtcttataaaagttttgaaattttcagtaaaaaacagtcttataagagttactgatggtgatgaagacagctttataagtgatacaaatcgtgaagttctctttgaaagcagtggtgtttcaaagtatattgtgcgtaattttaatgatgatatattaaaggcacagactccatcagatttacttagtggaaaaggtgttgattttgacacagataaagtagttgtcagaaggaacagagtttatagaaatttactattatgtccaatagtttataggcagagttctccagaagattatgaatacataaaaaattataagaagtatcttgaggagaattttgagaaatatcttggttggaatctccatgtacataagaacggtgcaatgcttgtaccgtcagaaaaagaaaatggattaaagttatttccaaacggcaaagggataagtgatgtaatactatttgttttatatgaaataatagatgaaattaataaagataaaagcagacttaatgaggaagatatattgattttaaataaagttgattttgaacagattgtacttaaagtaaaacttgagaaaagtcatggattcagtaaggaatacagagaaatgagtgatggaagatttctttatgaaataataaatgaaatgatactatttttatttatagaagaagaaaaggatgtcattaaaatatttcctttatgtgggaaaataagagggacttatccagaagattatgatggggaggtatcatgtgatgaaaaatag

SEQ ID NO: 50459 - DNA, 4047 bp, Clostridium butyricum 60E.3
atgaaaaatagattttttataaataaattaggtctagttaatttttggtattatgatgtggaagaatttaagctaagcaatggtaatctgcttttgagggggagcaatgggtgcggaaaatctgtaacaatgcagagttttataccacttcttcttgatgggaataaatctcctgaaaggttagatccatttggaacaagagctagaacaatagctaattaccttcttgatgaagatgatactgaaaagactgcatacctttatatggagtttaaaaatggagaaagtgacagctatataactcttggaatgggaatgaaggctgttaagaacaaacctgttcaaagctggtactttattgtaagtgatggccgtaggattggtaaagatcttcttctttatagaaatgctggtgaaatgatacctcttacaaaaaagcagcttcaaaatgaacttaaagaaggtaatttctatactgagagtcagaaaacatatatggaaatggttaataaatatctttttggatttgatgatattgaatcatatgaagaacttcttaatttattaataagcataagaagtccaaaattatcaaaggattttaaacctacagaaatatataagatacttacagattcattaaaagtactaagtgatgaagacttaagacctatttcagattcaatggaaaatatggatagcttaaaagattctctcgatgaaaataaaaattcattaagagctataaataacataaaatatcattatgacagatataatacttcactacttcttgaaaagagcagaaaatttgcagatacatataaaaagctgaaagataatcataaggaacaagataatttaaacaaatcttataaagaattcagaattaaagtagatgatgcattaaaagagcgtgagtttaaagatgatgaacttaagagtgcagaagaaaaatatgaaaaattaataaacaaagaggaatttaagagtaaaaaagaactagaagatattaaaaagaatattgaggaaaatataaaagaaaaatcaaagaaggaaaatgatcttaaagataaaaatggaaaagaaactgagactagatatgatataaaagagataagtgacagcgtggaaatcatagaaaaagaacttacagaaataatgaaagaacttgatgacactgctaaggagataaatatgcagcagtgtataggtattggaacacaagatatttcagttcttacagaaactgatcttgatttttgtgatgacagcataagaaagcttgaaaaaaagcttaaggaagcagaagtatattttaagaaacttgaaaatcagaaagaaaaaacagaagaagcattaaaagagcttgatgattcagaaaaagaaaatgtaataaagaaaaaagacatggaaagagcagaagaaattcttttaacagaaaaggaaaactataaagttaactttaatagtttacttaatacaaatagattatatacacttgatgacaaagaaaaattaaaagtattcacatttgttgatgttatagatgattacaataatatacaggatttaaataatgttgttcaaaactattacaatgataaagtaaatgataaaaatgcatgtataaatatcgaaaataaagtaataaaagaacatgaagataagatcaggataatagaaactgaaatagatgaacttaaaaataataaggaaattgaaccagagagaagtgaagaagttaaagctaacagaaaaaggctggaaaaacaaaaggttaaatttatgcctctttataaatcattaaactttaacaaggatatcactgaagaagtacgaaattatgtagaaagatccttagataatatgggacttcttgatgcacttgttattgatccgaaagataaagaaaaagcaatggagtttgaagaaggtatggaagataagtacatattctcaaatccaaatattatgagttataatttaagaagtatgctttgtgtagataaagccctaaaaggtgatgaattatttagtgaaatagataatgtgcttcaaagtatatttttagataataatggtactacatgtcttaatgaaaaaggatactataaaattgggattattgaaggcaggtcatcaaatgattatgagcagaaatttattggcgaagcctcaagaaagcgtcatcgagaaaagattatagaaggtaagatgcaggaaattaaagaaatagtaaagctaattgataaacataaattaagtattgaaataattttaaaggaaattgatatattaggtaatgaatacaagctgattccaaacactgacagcatatatgaaggtgtcagaatggtaaaggatcttgaaaatgaccttaaaaatcttgataataaaattataaaacttaaagaaaaagaatttgctgaaaggcagaagcttaatgatattaaaagtgagcttatggcatatgttcaaaatcttgataatgttaaatgcatcaaagatattgaagacagccttgaggctgcggattattataaggaaaatgtcacaaaagcaaaaattgctttgaataaatttataagtaaaaaatctatcttaaagttaagaagtgacttcttagatgatttattacaagatattgataaattatattatgaaataaacaatttaagtgaaaaaataaaaagtgataccttaaaaaagaatgccatagaagatattctaagcaaatgtgatatttcagaaattgaaaaagagatggaaaactgccttaatattaaaaataataatcctcagataattaaagatttaagcaccagtattggctcatatcagagtagtcttgaggtgatacaaggaaagatagatgatcttgttataaagcaagaaaatattaaaaatgaatgtgatctatatgaaaatatatttatggaagaatatgatttacagtatgtatgtgaaaaagaagacaaagaaccatatgaaatatgcagaaaaataataagtgaagctgaagaaagcaatgataaaaacagagaacactattctaataaccttacacaggctataaatactaatagtgcaatgctaagggaatttaatattaaagaaacaactctttttgagcatgatgaagaagattttaatataaagtggtttagacagagaagagattttaaaggaaaaattcaaggaaaagatgtaaatcttttaatcttaagaaatgaaataagcaaatccatagaggaacttgagcttttaataagtgaagaagaaagaaaggtatttgaagaaatactcatgaatactataagccagaaggttaaggctaaaattttcatgtcaaacaactgggtaaaaaaaatcaatgagcttatgagtagcatgaatacatcatcatcattaaaactaagcctttcatgggttcctaaaaaatctgaaagtgaaggtcagcttgatataagcaaaataatagaaatatttaatcgtggtgatagaaatagtgataaggatcttagaagtttaggaaagcattttacagaaaaagttaaggaagaacttagaaaatatgaaggaactggtgaagtcagaaattatcattctataataaaggatgtattagattatagaaagtggtatgaattcaagctttattatgtaaagaacaatgaacgtaaaaaagaacttacaaacaatgccttcttccagttctcaggtggagaaaaagcaatgtcgatgtatattcctcttttctcagcattatatgcaagatatgaaaagggacgatgtgactgtccaagaataatttcaatggatgaagcttttgctggagttgatgaaaataacatacgtgatatgtttaggctgttaaaggaattaaatcttgactacatattaaattcacaaattttatggggagattacgatactgtagataatcttgccatatgtgaacttataagagaagataatgatgatgtggtaactgtattaaaatatttatggaatggaaaagaaaaggtgcttttagatgaatag

SEQ ID NO: 50460 - DNA, 1284 bp, Clostridium butyricum 60E.3
atgaatagtctagaaaaagatgcaggacaatacttaaaggatagaaatgaatataacaaaataatgaaatctttacttgagaagtataaaaaaacaggtaaactaactggtaaagtaaaaatatctaaaatatcagaagaagaaagccttgttcttggtgctgtagattatacactttatggtgaaaaagaagtaatgctttctgttaaaaagtttatatcttatttctgttctggaaaatatgaaaaaacagattttttggaagttatgaaattttattttggagaggatgcattaattacaaaaagagaaattaatgatgaaaagaatctcttaaaagaaaaattctttatagatattgaaaacagttttaaagctgttgaaactaaaatatggtttgagtcaatgctgagtattaagaaatttggatatacaacagtattgaaattatataaggaaaatgaaaaagaacttaaggaaatattattaaatatagataagggattttgtcatattgattcaataaatgaggaatatatcccattagcaaaattttcttctctcataacaaaagattcacattattttgatattgacaatgtttcaggaaaactgtttatccatgcacttggatatttaaatgatataagagttgagagtattgaaggacgtaatgaagctcttatgaaggctaggattgtacgagatgaagtttctaattttacaataacgtatggtcttttagtttatgatgataataaggaagttgttggctatgagtggtttagaagggagaagcagccccttcttctcaacatatacaatctcaatgatataaaggaaataaaaggagttcataataaggtttatgtctttgaaaatccaactgtattttatgagctcttaaaaaagtgcaaagatatcccagtcagtctaatatgcactagtggccagcttaatgcaagcagtatcatacttcttgaaaaattaagaaaaagcaatacaatcatatactatagcggtgattttgatccagagggacttcagattgcttcaaatataaaataccgttatggagatagtgtaaagtttttaggtatgaatattgaaaattataataaaataaagggaaatatatcatttgctcatcgtgttggaaaacttgatagtataagttcaaaggagctaaaaagtcttgcatatgaaatgaaaatttcatgtatggctggctatcaggagcttcttagtgattattattttgattttatacgtaataatgtttga

SEQ ID NO: 50461 - DNA, 1467 bp, Rhodococcus sp. EsD8
gtgcagcacgaccggctccggttgttctcgttcgcgacggccgagaagcgggccgaatacctctgggtgctgcgtgctttcgacctcgcccgcgccaactacgtggtgctgctgcacgccgccgaggtcgcggcgatcctcgagcggaccggctcggcggatccggcggcggcgctgtcggcccaggacgtcgcaccgctgctcgagcagctgcacgcctggggtgtgctcgagcgcagctacgacggcacccgggcggcgtcgctggccgagtaccgcaaccggcactacgtgtatcagttcggccgggccggttatcacgccttccgggccgtggaggatgtgctgcgggcgcgcggcgaggacgcgtcgctgtcgcgtctcgcgctggcggatctgctggccgacctgaccgagctggcggccgcgaacgcggccggggacggagagctcatctatcgcaagctgtcgcggctggacacgacgttgtcggacatggccgagcgggccgcggggttctatctgatgctcggtgacctggtgcgcaccaccgaggtcacgcccgagtcgttcctggcgcacaaggatgcggtgctggcgcacatgcgcgagttcagcacggacctggcccgctacgcaccgaagctggcggccgcgctggcacgggtgcaggagacggggatcgaccgcatgctggggttcgccgccgcgcacgacgagcgggtgctgctgcccgcacccgaacggcaggcggactggcgagcccgatggcgcggcctcgagcggtggttcgtcggcgccggggacgtgccgagcgagtcggagcggttgcgggagggcacgatgagcgcgatcgcggcggtgctggcgctgctgcgccgggtgacggagacccggcgcggcggggtgagccgcgagtcgcagctgcggcacctggccggctggttcgcggccgcgccgagcgaggagtcggcgcacgcgctgttcggagcggtgttcgacctgggccgcccgcgtcacttctccgccgtgcatcccgacccggagacgatcccggtcacgacgtcgtggtgggaagcggcacccgtcccgatcgcccggacgctggccgagaccgggcgcaccccgtcggcgggggcgccggcgcgggtgcagcgcaacgaatccgggatccggcggttgcgggagcggcagctggcggcgcagcgggcgcgggccgaggcggcgcgatccctggcggcgggcggcgtggacgagcgggagttgtccgagccggagaccgaggtgctgttgagcctgctcgacgcggcactgtcggcgcgcgttccggtcagcggcaccgtgccgggggcgacgggcacgcagaacggggtgcggctgacgttgagcccggccgcggagggcacggtggtacgcacggcgcggggccggctgcatctggacgggctgcgggtgagcgtgcagtga

SEQ ID NO: 50462 - DNA, 1371 bp, Rhodococcus sp. EsD8
gtgagggcccggcggatctcgccgctcgaccgggattcgtaccagcgggcggcgcgcctgatcctgtcgcaccatctggtgaccgcgcagtacccggaccgggccgcgctgccgctgctgcgccggtgggcgacggagctgcgggaggacctgctcgagttgttcggataccggctggaggtgaccgagacgaccgcgcggttgttcaccgtcgcggaccggctcgatcccgggggcggcgcgcgcacggtcaccgaccggcccttcgaccgtcgccggtacgcctacctggcgctggcgctggcggcgctgggacgcgccggcgggcagatcacgctgtcggaactggccgagcaggtcgcgtccgaggccggccaggtgcccggggtggagctggccaccgagcgtgcgaccgaccgggacgcgttcgtcgacgcggtggcgtggctcgccgcgcggggggcgataacgctggcggacggcgacgccggcggctgggtgtcggatccggaccggggtgaggcgctctacgacatcgaccggcccgtggtggcggcgctgttccggccgccgcgcgcgctacagcacctgcgctcggtgcggggcctgctcgccgccggtgacggccgcgacggggaccggatcgcggacaccgccgaggtggcacggcgggtacggcgggcgctggtgcagcgaccggtggtgtacgccgaggaactcgacgacgacgcgcggctgcagctggcgctgccacggacgaccgcggggatcgagctgctgacggggctggtggccgagcggcgcgcggagggcgtcgcgctggtggattcgtcggggcggatgtcggatctgcggttcccgggggtgggaacggttccgcaggtggcgttgttgctggccggggagatctgcgcgcgggtgtcggatccggagtcggtgccggtgcggttgccgaggccggcggatgcggaggcggaactcgaggcgggactggacgcggcgattccggcggccggggtgttcgcgtcgctggccggtgatgccggcgccgggccggcggacacgacaccggcgcagcagccggcgccgacgcatccgctggtcgaggacagctggctggcggagacggcggcgaggctggtcgacgagttcggccgtaccttcgccgcgcagtggcaggccgacccggcgggcctgctggaggcggcggtgacgttgttgcagcggcaacggttggtggcacgggtgccgggcggggtgctggcgttgccggcgctggcccggttccggggagtggtggtgacggtgcgcgaacgcgacccgcgcctcgcgccggccggtgaggattcgaacgaagcggagatgtcgtga

SEQ ID NO: 50463 - DNA, 4152 bp, Rhodococcus sp. EsD8
gtgagcagtgcccgtttccggccgacacgtgccgggatcatcaatctgtgggactaccgggaccaggagttctcgttcgcggacggccggctggtgctgcgcgggcccaacgggtcgggcaagaccaaggcgctcgaggtgctgttcccgttcgtgttcgacgggcgtatcgagccgcggcggctgaacccgttcgccggcgaggagcgcacgatgcggtccaacctgctgtaccaggggcaggacagcgcgtattcgtatgtgtggatggagttctgccgcggccgccgggacgatccggaggcggtgaccgtgggggtcgggatgcgggcggcgcgcggcaacgacaaggtcacgcggtggtatttcgtcgtcgacggccgggtcggtgtggacttctcgctgctggatgcggccgatcgcccgctgacgcgacggcagctgatcgaggaggtcggggccgacgcggtcacggaccggccggtggactaccgggcggcgatcgatgcgcggttgttcgggctcgggatcgagcggtacgaccagctgatcaacctgatcctgacgctgcgccggccgcagctggccaagaacctggacccgaaggggttatcgcaggcgctgaccgacgggttgcggccgctggacgagcagctggtgctcgaggcggcgcggtcgttcgccgacatggaggaggtctcgcgcgcgctggagtcgctggcggcggcggacgaggcggcgcagcggttcgtcgcggtgtatgcgacctacctgggtcagcaggcccgcgccgacgtcgaccggctcggggcgcggttggcggcggtcgagagcgggagtgcggagtggacggcgtcggtgacggcgttcgaccgggccggcgcggagcgggcgcaggcccacgagcggctcgagctcgcggagcgggacctcgagcaggcccgggcgactctcgaggcgctgcagcggtcgagcgcgtacgagggcaagcagcagctcgacgatctggcgcaggtggtggcggacctcgagcgcaccacggccgggcaggcggagcaggcgcagcgcgcgagggcggagctggcgcagcgcgacgaggaggcgcggcgggccgcggccgcggcgacggacgcggcggccgcggtgggccgcgccgaggacgcactcgccgcggcggcgcgggatgcgggtgtggagtgggcgccgccggccgaggacgcgccgggcgagcagatcgcggcgacggtggcggcgtgtgcggaggagcgggccgcggatgtgcgggcggtgcgggcggcggtggcggccgcggagggcgcggcggcggcgcgggtgcgggccgagacgaccgccgagcggggccgggcgcagctcgagtcggcccgggcggcggtggccacggcggacgcggtggtggagctggcccgcgcggaggcgtcgaacctgttgcgggagtggtgggtcggtcaccgggacacgtggtcggtgctcggcctgccggaggagctggtcgaggcgctggccgcggcgatcgcggcggccggcgacgacgaggccgcgacgccggcggcggcgctggccgagcgcacggccccggtggtcgaggagttgcggttccgcggccgcggcctggaggcggagatcacgcacgcgcgggagcggatcgcggtgttgcgggccgaacgggacctggtcgaggccgagcgcgacgacgctcccccgtcgttcccgatgcggccgaccgggtcgtcggacccgtcgggggcgccgctgtggcggctggtgcggttcgcggacgacgtgagcgcggaggcggccgcgggactcgaggccgcgctggaggcggcgaacctgctgacgggctgggtgtgcggcggtgcgggggacgtgcccgcgggggcggtcgcgctgatgccggtgccgccggcgcagcgccccaccggccggacgttggccgacgtgctggtggtggagccggacaccggggtgccggccgagcgggtgcgggcggtgctggcgtccgtcgcggtgcgggatgcggtgacggacgagaccggcccggccgtcgacgagcggggcggctaccgccagggggtgcagctgggtcggcacacgaaggcggaggtcgagtacatcggggccaccgcgcgggcccgtcgccgtcgcctgcgggtgaccgagctcgacgcggagatcgccgcggcgcagaaccggatggcgggcgcggaggcggagcgggcggagctcgacggacggctcgcgcagctggagcgggccgcggcggcggtgccgcgcaccggcgcggtgctggcggcgctgcggaaggtcagcgagtgcgcgggtgcgctgcgcactgccggggaggcggcggccgcggcggaccgggacctcgatcaggtgatcgccgagtgcgccgtgaaggagcagcgggtgcgctcggtcgcggcccggcaccgggcgccgcacacggcccgcgagctcgagcatctggcggcggcgatccggttcttcgagtcgcagggccaggcggtgctgcgcgcccggcgtgagcacgtcgccgcggccgagcgggcgcgggaggcgcaggtgcggcgcgacgacgcccggctggcggcggaggagtccgccgagcgggcggtgacggccgaggagtcgctggggcagcaacagcagcggctggggacgctgcgcgaggcgttgggtgccgacgcgcagcagatcgacgcgcagctcgcgcaggcgcgcgagcggatcgaggcggcgcgggtggagcagcgcgccgcgcgccgcgcgcacgacgacgcggtcgagcggctcgggaaggcggaggcggcgcacgtcgcggcggagcaggcgctgcggtcggcgctgaccgagacgcgggccgacgccgcacagctggcgccgtatgcgcggccggacgtgctgtcgctgctgggaatctcggaggagctgcggtggccgtcggcggcggcgtggccggcgccggagcaggtggtggaccggctcgcccgggcgggcggggacgtgcctgcggtgcccgcggaggtgggggcgctgtacgcggcgctggcggcggcgacggcgacgatcaagggcggggacggtgcccgcaaggcggcccggtcggcgttgacgtcggcgttacaggagttcgacgggcagctcgcggcggccggtcaggactatcggctgcagtgggacgcgccggacgggttgacggtggtgcgggtgcaggacgagcaggggttttcgtcggtggcggagttcgcggtgcggatctcggcggcgcggcgggatcaggagctactgctgaccgacgcggagcggcgcatcctcgaggatgcgctgctggcggggctggcgcagcagatccacgagcgcaccgaggacgcgcgggatctcattgcccggatgggggcggagatgcggcagcggcgcatgtcgtcgggtacgacggtgggggtgcggtgggtgccggccgatcatctcgacgatcaggcgcgggcggtgtgccggctgctggaccgggaggtctcggcgctggggccggtggagctggcgagcgtccgggcgcatttcgcggcgcggatccgggcggagcgggcggcgcatccggagcggtcgtatccggagatcctggcgacgacgctggattaccggcggtggcgggtgttcgcgttcgggttgatcggggcggacggcgcggaggaccggctgacggtggcgcggcattcggcgttgtcggggggtgagcagtcggtgtcgctgcatctgccgttgttcgcggcggcgcatgtgatgctggattcggcggatccgcaggcgccgcggctgctggcgctggacgaggcgttcgccggggtggacgacaacggccgggcggagctgctcgggttgagcgtgcagttcgacctggatctgttcatgacgggctacgacctgtggatcacgtatgccggggtgccggcgtgtgcgcactacgatctggcgcattcggtggccgagcacacggtcggggcgacgctgctggtgtggtcggagggcgggttgctcgccgagcacgacgggtcggatctggcggcggcgctggggtcgccgggcacgcggcgggtgccggtgccggtggagggggcgctcgagttcgcgtag

SEQ ID NO: 50464 - DNA, 1539 bp, Amycolatopsis vancoresmycina DSM 44592
atggatccgatccgtgtcccgcccgagatgttccgcttcaccagcggggatcgggccgggctcgacgtctccatcctgcacgctttcggtgaggccaacgaacggctcgagaccgcgctgagcctggacgacgtccgggcgtggctgcggtcgatcggctggctcgaggcgctcgacgacgacgagctcgtccgtcgcctgaaccagctgcgcgactggaatctcctcgacgtcgtccagaaccactccgaggactaccgcaccgccggcgagtacgaacgccgcaacctgcagtattcccttactcgccagggtgaagctgccttcgccggtgtggtgcacgccatgaacgtcctcgccgcgacgggtgcactgcagaccgcggtcctcgacgcgatcgcggaccgcctcggcgatctcgtacgtgagctggaaaggggaaccaaccgacgcatcttcaccgccttgctcgagttggaggcgcacctcgaagcgttgcgtggcaacacgaaacagttcaacggcgaactgcagcggctgttgcgcgcggacggcgccgacctcaccaccttccatgaagtcaaggccagcacagtcggctacctccaggaattcctcaccaacctcgaccaccgggcgcacacgatcgcggtccggatccggcagatcgaggaccacggcgtcggcctgctgcaggtgcgggcactggccggcgcggaactcccccagttgaccgccgcggacccggggccgccttggctcgagcaccgccgcgcgaagtgggaggggctgcgcgcgtggttcctgccggccgacggctcccagccccgggtcgaacagctgcacatcgtggcccggaaggcgatcatcacgctgctccaggtactcgaccggatcacggagtcacgccggcgggccagcagtgccgttgccgacttccgggagctggcccggtggttcacggtggtcaccgcccaggacgacctccaccggttgtggtcgacggtgttcgggctcagctccgcccggcacgcccacctggctcatcccgatcccgaactcgtcagttcggtcacaccgtgggccgaagcgccgcctgtcgaggtctcaccgctgctccgggccagcggccgcaccgaacgattcagccgcacgggcaaggtgcgcgacgtcgcatccgtgcgtgcagccagagccgaacaagcgcgggccgagcgggctgagctggaggccgcctgggacatgctggacaccggcggcccggtccggctgtcctcgttcggcacgctcgaccacggtgtcttcgaacggctgctggatctgctgggccgtgcactggccgccgatcccggccgggccggccaccggcggagtaccacgtccgacggccggatcgagattgtcctccggatgccgggagacgggtcgatcgccaccctggccacaccccgcgggcagttccgtgggcccgactacgaggtcgaaatcaggacggccggccaccgggccgtccggcggaccgccggaggccacccgtga

SEQ ID NO: 50465 - DNA, 1245 bp, Amycolatopsis vancoresmycina DSM 44592
gtgagcaagctgaccaaccagctggtgaccgccgaacgcgaggagatcgcgcacggcatccgccggctgctggcgacgcctttgatcaccgaacgcggtcagccggaagcgttcgacctggtcaggcgccggcgagaaccgatccgcaagtggttcgactactactgcggctggacgttgaccgtcgaaccgcggctcggctacgcccggctggtcaaggtgcgcactgtgacggacccgactcggcccgcccggcgcctccggtccgcgcgggccgcgttcgaccgccgtcgctacgcgttgctgtgcgttgtcgcggccgagctgctcgccgtaccggtgaccacgatcgggttgctagccgaccgggtcgtccgcgccacgacagccgacgaggtggtgcctgctttcgacacttcgagccgaggcgaacgcatggcgttcgtcgacgtcttgcgtctgctcgagtcgttcggcgtcgtggaagctctggacggcacgaccgagacctatgtggactcggcggcggcgaaggtgctgtaccggatcgacgcgacgctgttgctccgccttctggccgcgccggtcggggcttctcagcttgccgtgcccatcgaggacgtggcgttgcggttcgacgagttgctcgccgccgtttcgcgggaacgccggtacgggctggcgtcgggtgcccacgacgaaaccgcgaccaggtcggaggtgcagaggaacctgtggttgcggcactcggtgttccgcaggctcgtcgacgatcccgtcctctacttcgatgacctcagcgccgacgaacacgcttatctcgcctcgccgaccggacggcagctgttgcggcgggccgcggagcaagccggcttggtactcgaggaacgcgccgagggcgtcctcttcgtcgaccccgacggcatcgccaccgacagccggttcccggacgacaccggcaatgccaaggtcgccgcgctgctgttgctcgaatccctcaccggtcctgccacgatagagcagctggagatcgaagcggcggcgttgctcagccgcttcccgcgctgggcgaagacataccaggacgagaacggcccgcgccagctcgccacggacgcggtcgccgtcctgacggcgttcgggctggcccagcaagaagccggcttggtccggccgctccctgccgcggcccgctacgccgtgggtgctgcccggaccaccgattccggagggacgacgtcatga

SEQ ID NO: 50466 - DNA, 4074 bp, Amycolatopsis vancoresmycina DSM 44592
atgacggtgtccgaacttccccaccacacgaccgaggagcccgcggcgcaccccgcgcgatggatgccgacccgcgccggaatcctcaacgtctggcgctactacgacgaagtcttcgagttccacgaaggacgcctgttgctgcgcgggcccaacggcagcgggaagtccaaggccctggagctcctgctgcccttcctgttcgatgcgaacctgcgcgcgaaccggctctcgacgttcggcacgggcgaacgcaccatgcactggaacctgatgggcgaaggggcaacaggcacgacccgggtggggtacgtctggctcgagttccgctttcccggcgatcccgtgcgctggttcacctgcggcgcccggctgcaggcaagctcgcacacgacgaccgtgcaccccgactacttcaccaccgggctgcggatcggctccggcggtctctccctcgtcaacgaagcgggccagccactgaccaagaacgcgctggaggagcgtctcggatcggacggtgtcgtccacggcaacgcgagcgactaccgcgcggaggtacgcgcgacactgttttccggactgaacgagcagcgtttcgacgcgttgatcatggcgttgctccagctgcggatgcccaagctgtcgcagcggctcgaccccagcctcctctccagcctgctttcgcgagcgctgccgccgctgggccagcaggagatcaccgaactcgctgaaggattcgaacggcttgacgcccagcgagaccggctcaagtcgctcgagaaggaggtcgcagccacccggacgctggccggccggcagcgaacttatgcgcagcgcgtcttgcgggccagggccgcgactctgatctcggcgaccaccgagctggacaacctggcgaaggccgctcgtgattccgcagaacgccatgagaccaccgcacgtcgcaaagacgaagcggaacaccgcgccgacgagctcgccgcggatctcaggaccaccgaagcgcgcaagaacggcctgatggagagtgaagagtacaagcagggccaggaactggaccggctgcgcagtcggacagccagggcgaaggccgacgcgaagcggatcggtctggacgcagcgaacaaacgagccgccgcggacgaagacgagaaggctcggctggccgctgcgcggacgctggacctgcaggtcgaagccatccgagcccaagagctcgagactcgcaacgcagccacccgggccggcctgaccagcgtgcaccaggaggtttcggctcgactggaagccgagccgggcaaggctcgcgccttgctcaccggagccgtgcggagccgcagggcccagctcgatgtggtcgcagaggcgctcaaccgccacgaacgcgccgtggaccggcgcgcacaggcggaaaccggtctcgagatggccaggacccgcctcacgggggcgcaggacaagctcacggtcgccatcaccgaacgcgagagcgccttgaccacgttgggcaacgagcttctcgcttgggcgaccggctgccgcgagctgaccatctccgatccggaattgctgctggctcagctggattccgaaccggcgctgctcgcgctcgtcgattcggccgcagcgccgaccctgcaagacatcactcgccgcgagacgacaaccggttcggcgctggacgtcgctcgccgcgaacgcactgacctggtgacggccctcgaccggctccgcaccgaacgagacctgccaccggccgctccacggacgcgcacgaccgaccgcaccaccatgaacggcgcgccactgtggcggctcgtcgacttcgccgaccggacacagtcccggacagcggcagcgatcgaggcagcgctcgaaggaagcggcctgctggatgcctgggtcggcccgcgcggccagatcgccggtcacgacgtgttcgcggatcccggcgcccttcccccggtcgacggccgctcgctcggcgatgtcctggttgccgaacgcgacgcgggcgtcgaggccgcagtcgtcgagcgactgttgcggtcgatcgccttcggtgcgcagctacccgcggacgcgcccgcggcgatcgcggccgacgggtcgtggcggctggggtcgctcgtcggcagctgggaaaaggagcacgcttcctacatcgggacgtccgcgcggcaacgagctcggcaacgccgaatcgacgagctgaccgcgtccgtcgcggagtacgacggcttgctcgcctcactcggcgaagaactgaacgcgttgcggacacgccgcgaagtcatcgcccacgaacgggcaacgcgacccgatcacggtgcggtgaccgaggcgacgaacctggcgttccgacgtgaatcggaacgtgacgccgccgagcagcacgtccgtgatcgcgtggccgaggtcgccgcaggcgatcgggaggtggcaagtgcgctccacgagctgagtcgcgtcgccgccgagcacggtgtcccgaccgatcgtgcggccctcggaaacctcgctgccgccaccacttcgtaccaggaccaggccggcgcctggctggatgcccacaccgagctcgtctccttccggcacgccgccggggccgcaaccgaacaggcccggcgttcggccgcggtcgcgtccgaacgcgaagtcgaagcagcaacggccgctgaagagcacgaaagcctcgccgcgacgctcgaagccgtggacagcacgttcggcgtcgactatcgcgaggtgctgggcgaaatcgaggtcttgcgaaacaggtccctgcagctgagcagcgatcagcgagcgaccacgcagctggtcaccgagctcgccggaaaattgggtgaactgaaaatccagcaccggaccgatgccgaagcgcacgcctcgagcgcgaaccgccgcgacggtgcggcggatcgattccggcagctcgcctcgggcattttcgcggccgacagcggaatcgacggccaggccgggttcgatgccacgctccacgcgtcggacggcgtccgtgccgcgctggacgctgcacggctggtggcggcggcctggccggccgttccgcactcgcccgccaacatcggcgacgcgttgcaccgcctttccgaatccgttcactcctgccgcgagacgttgaagtcgcgggccgacctcgacctcgagacggacgacgacgtccaggtcttcaccgcggtggtcgacggcctccgggtgggcgccgcggagctgctgaacatcctgcaggccgaggccgaacagagccggcacgagatcaccgagcgagagcggcagctcttcgaccagaccctcacgggcgatacgcgccggcatctggccgcccggatcaggcaggcgaacgagctcgtcgacgggatgaacgcgcgtctggagcgagtacgcacagcgtccaaggtggcagtcaggctggtctggcaggtcgcacccgagctgcctgccgggacgaaagcggcgcgtgaccttctgctcaaggacccggccgggctggccgacgcggagcgggaggcgctgcaccggttcttccgggaccgcatcgagcaggccaaggcggacgacaccgcaacgagctgggagcagcagctcagccaggtcttcgactacaccgcgtggcaccagttcgtcgtcaaggtcgaccgggccaacggcgaaggctggaagctgctgacccggaagctgcacggtgcgctgtcgggcggggagaaggcgatcgcgctgcacttgccgttgttcgccgccgtcgcggcgcattaccaggcggcgccgcaggcaccccgcgtcatcctcctcgacgaggtcttcgtcggggtcgacaccaccaaccgcgggcaggtgttcgcgctcctgtcggcgctcgacctcgatctcatgctgacgtcggaccacgagtggtgcgtgtactccgagctgagcggcatcggcatccaccagctgatcacgggcaccgacggcgacgatgcggtgacgacggcccgattcacctgggacgggcacgagctgcttacggccgctccgtccaccgggccccgtacaccagcccgggcgtga

SEQ ID NO: 50467 - DNA, 1041 bp, Amycolatopsis vancoresmycina DSM 44592
gtggacatcaccctcgccaagctcgacgagctgctgctggaccgcaccggcctgaccacgcgcgaagtcgtcgcgcagctggtcggcccgatcggtgaccgcgccgccgaacgtcgccgggccaccgatcggcgaacggccctgtgggactggctcgccgcgcacccggtggtcacggctcaacccgcgctcgccggctgggttggtggcatccggcgggccgggctcatcgacgggtcggtcagccggacgaaggaggaactcgagaaggtcctcaaggtgctcggtgagctacccgccgccggccggccgctgccgtcgttcgcggacgatgttctcggcgacacgcacgccctcgacgaggggaaacgctgcgccaacctcgtgctgaaagcactggtcgccatctacgacgttccacctcccgtcggtgcgccggagcgccgtgcggtgtgggagcgggccggcatcgccgacgaccagctctcctccaccgtcctcgcggccgggctccggatcggcggtgacgacctcgtcggcagcatcctcgacatctgcgccgatgccggggtggccgcaaccctcaccctgcagcagctccgcaccaaaccgcggctgaccggagccccggcggaggtctggatcttcgagaaccccagcgtgctcaccgtggccctggaacggttcggcgcgagctgcccgcctctggtgtgcacgtcggggtggccgagcagcgccggcatcctcctgctcaaccggctccacgaagccggttcaaccttgcactaccacggcgacttcgacggcgaaggactgcggatcgccgccaacgtcgtcgccaggaccggcgccgtcccgtggcggatgaccagcgccgactacctcgccgccgtggccgatgggccgtccgtcggccgggtcaccgacgttccgtgggatccgcgcctggccgggcagctcgccgaaacgggcaagaccgttcccgaagagcgcctggccgtggtgctcctggacgagatcgcccggcggacaagaacgtga

SEQ ID NO: 50468 - DNA, 1473 bp, Rhodococcus rhodnii LMG 5362
gtgacctccgacgccgacgagcggctgcgcgtcctgtcgttcgcgaccgcggaccgccgcaccgactacctccgcgtcctgcgcgcgttcgatcacgcgcaccgcgactacgcggtcgtcctccacgcgcgcgacgtcgaggcccacgtcgcacacgacaccgcagccggtgcgtccgcactcaccaccgccgagatcgctcccctgctcgaacaactccacacgtggggtgtcctcgaccgcagcttcgacggccgccgcgcgacgagcctcaccgagtaccgcaaccggcacttcgtgtaccagttcactcccgtcgggcatcaggccttcgccgccgtcgacgaactgctgcgcagccgcgacgacgacatcgcgctcgcccggctcgcgcttcccgagctgctcaccgatctcaccgaactcgccgcggcgacgcgcgacggcgacggcgaactcgtctaccgcaagctcaaccggctcgcggccacgttcgccgaactcaccgaccgcgcggcccgcttctatctcgcgatcggcacgatcgccaggacgacggacgcgagcatcgacaccttcctcgcacacaaggacgccctgctcacccacatgcgcgagttcggactcgacctcgcgcggtacgcccccacgctgcgcgccgcgatcgacgacgtcacggccgcgggagtcgagtcgatggtcgccgccgcccgccacgacggccgcgtgctgctctccctcgacgagcgcgccgaccactggcgcggccgctggctcgcgctcagtcgctggttcgtcccggacggctcgggaccgagcgaggcgcaacggctgcgggacgcgacgacgagcgcgatcgcaggcgtcctgtcgctgctgcgccgggtcaccgagggccgccgcaccggcatcagccgtcacacccagctgcggaccctcgccgaggcgttcgccgcctcgcccgacgatcacacggcgcactccctgttccggaccgtcttcgatctctcggccccgcgtcacgtcggtgtcgcccacgaggacgccgacgtcgccggcgcgcacgactcgtggtgggacgccccgccggtccccctctcgcgcacgctcgccgagacgggacgcaccgcggcgcccgccggtcccgcgaagctcgagcgcgacgacgaccgcgtccggcgactgcgcgaacgtcagctcgagacgggccgggcgcgtcgcgcggcggccgcgtcgctcgccggcggtggagtgctcggccgcacgctgtcgaccgccgagaccgacgtgctgctgcgactgctcgacaccgcgctgtcgacccgcgtgaccgtctccggccgcgtcgccgacgtcagcggcggtggcgacggcgtccgtatcgacgtgcatttcgacgacgccgccgtgacggtgatcgacaccgaccgcggcagactgcacctcgcgggattcgaggtggcggtccgatga

SEQ ID NO: 50469 - DNA, 1281 bp, Rhodococcus rhodnii LMG 5362
atgagtacgcgtccgggcagcaccgctcccgttcctggtggcgtcgacgccgagtcgtatcggcgtgcgttgcggacgctgctgctgcatcgcgtcgtcacccctgcatttcccgaccgcaccgcgctggtcgcgatccgccgatggacgagcgagcttcgcgacgacctgcacgagctgttcggctaccgcctcgaggtcaccgaaacgtgcgcgcgcgtgtggggagtgcgggaccgtcccgcccctgccgtgcccgccacgacgtcgaccgaccggccgttcgatcggcgccgctacgcgtacctcgccctcgccctcgccgctctcgggcgcggcgccgaccagatcaccctcaccgagctcgcggcgtccgtcgtcgccgacaccgcacacacctcggccgtcgcactcgacgtcgaccgcgccgccgatcgcgatgcgttcgtggacgcggcgacctggctcgtcacgcgcggcgcactgcgcctcgccgacggcgacgcctccggctgggccgcggatcccgctgcgggcgaggcactctacgacgtcgaccgcgccgtcgtcgccgcgctgttccgtcccgacaccgtgctcgattcgcccgaggccgtcgcgcggctgctgagcgccaccgcccccgcacccgacgagaacgccgcgcagcggagccgccggctgcgccgcgcgctcgtcgaacagcccgtggtgtacgcggccgaactcggcgacgccgaccggctgctgctcgcccggcccgcgacggccgcggcggtcgccgagccgctcgggctcgtcgtcgaacaccggcgcgagggcatcgcgctcgtcgatcccgctggccgcttctccgacgtccgcttccccgcgaccgggacgatcgcgcaggtgtcgctgctgctggccggggagatcgccgagtacgccgcgccgtgcgaccggggcgaggacccgccgttcgtggcgcgtccgtggctcgacgacaccgtcgccgccctcacccggcgctacggcaggacgttcgcagcacgctggcgttcggacgtccccggactggccgacgccgcgctcgacatgctcgaccgcctcggcctgatcgcgcacacggacggcggagtgctcgcgctgccgctgctcgcacgcttccgcggcgtcaccgtcgccgtccgaactctcgacggcgccgagttgttcgccggccccgaaccacccaccggccccgacagtcccaccgacccagaaccgggccccgtcgccacagaggaagagaacacgtga

SEQ ID NO: 50470 - DNA, 4248 bp, Rhodococcus rhodnii LMG 5362
gtgagcagcgatcgtttccggccgagccgcgcgggcatcgtcaatctctgggactaccgtgatcaggagttcgtcttcgccgacgggcggctcgtcctgcgcggaccgaacggctcgggcaagacgaaggcgctcgaggtgctgttcccgttcgtgttcgacggccgcatcgagccgcggcggctcaacccgttcgcgggcgaggagcgcacgatgcgctcgaacgtcctctatcgcggccaggagagcgcgcacgcctacgtgtggatggagttcacgcgcggcgacgccgaggatcccgaggccgtcacggtcgggatcgggatgcgcgcgagccgcggcaccgaccgcgtcgcgcgctggtatttcgtggcagacggccgcgtcggcatcgacttctcgctgctcggcccggacgaccgcccgctcacccgtcgtcagctcgccgacgaggtgggcgccgacgcgatcgtcgatcggccggtcgactaccgggccgcggtcgacgcccgcatgttcgggctcggtctcgaacgctacgagcagctcatcgacctcgtcctcacgctgcgccgtccgcagctcgcgaagaacctcgatccgaaggggctctcgcgcgccctgagcgacgggctccggccgctcgacgacgcgctcgtccgcgaggccgccgcgtcgttcagcgacatggaggacgtcgcgaaggtgctcgagggactcgtcaccgccgacgacgccgcccgcgccttcgtcgacgtgtacggcgagtacgtgcggcagcacgcccacgccgcggccgacgccgtctcggctcggctgcacgccgtccgcgagtgcgccgccgcgctcacggacgcgaccgcgaggacccacgaggcgcagcggacccgggacgactccgccgcgcgggtcgcgcgcgccgaacgcgatctcgaggacgcgaccgcgcgtcaggaggcgttgcgccagtcggccgcctacgagggaaagcagcagatcgacgatctcgcgcagttcgtcgcccggcgcgaacagatcgcgcagcgcgatcgtgcccgggccgacgaggccgccgcggccgccgcacagcgtgccgaggccctcggcgccgcgaccgagcgcgtcgagcagacccgtaccgcgctgacccgtgccgtcgacgccctcgccggcgccgcgcgcgacgccggaatcgactgggcgccaccgagcgagggcgaatcggcactcgcgctctcggtccgcgacgcagcactcgctcgccagggcgatgtcgccgccgtgcgcgacgccgccgccacggcggcgcgggcgagcaccgaccgcacccgggccgaggagagcgccgaacgtgccgagcgcgacgcacagggcgccgacgccgcgctcgccgacgccgagaaggccgtcgagcgcgcccgcgtcgacgtcctcgcgtcgcttcgcggctggctcgccgaccaccgcgacctgctggcgacgctcgaccccgccgcgaccggcctcgccgacgacctcgaacaggccgtccgcgatgccggggaaccggatgccccgctcccggccgacgtcgtcgaacgccgctccgcaccggccacggcgacggtgcgcgcccgcgccgccgctgccgaggcccgcagcggcgagatcgcgtccctgatcgcggacctcgagtccgagcgcacccgcatcgcgagcgagcaggaggacgcgccacccgcgtcggccacccgcaccgacgaccgcaccggacgccccggtgcgccgctgtggaccgtcgtccgattccgcgacggtgtctccgacgccgacgcggcgggcatcgaagccgcgctgaccggagcggatctgctcgacgcctgggtcctgccgcccggagttccggttcccgagatccggtcggatcgcctgctgacgaccgccgcgaccccgcccgccgcgactcccgccgccgacggcgcgcggtcgctggccgacgtcctcgaaccggatctcgacacgagcaccggatgcgacacgagcaccggactcgatgcggaggccgtcgagaccctcctgcgcggaatccgcctcgtggacctcgcctcggggagcgccggcccccacgaccggcaggacgacgggccgtacacgatcggtgtcgacggccggtaccgcttcggccccgccgtcggcaggcacacgagctcccgcgccggtttcatcggtgccacggcccgcgcgcgccgccgcgccgaacggatcgccgtcctcgacgaccggctcgcggcgtcccgcgacgacgccgaggccgccgccgccgacctcgcgcacgcgcacgatctgctcacgcgcttcgccgccgctgcggcggccgtgccccgcaccggaccgatcgtcgccgcgcgtgcgtccctgcgcgaggcggcgggcgccgccacctcggtgcaccgcgcacacgcgactgcccgagccggcgtcgaccgcgccgtcgccgaccacgcgacagcgctacggcatctgcgtgaacgcgccgcggtgcatcgcatcgccgtcgacgccgagtcgctcgacgccgtggccgcggcgatcacgtggttcgagcgatgcggcgagaccgcggcgcgcgctcgtcgcgatgccgacgacgccgcacgcgacgcccagcgtgcaggcgaatccgccgacgacaccgcacgcgtcgccgccgagcgctccgaggacgccgcggcggtcgagttcgaactcaccgccgagcgggcgcgtctcgacgcgctccgcgacaccctcggtgccgacgcctcacgcgtcgacgcagagctcgaacgactgcgcggcaccgtcgacgccgcgaaacgcgaggtccgtgacgctcgcaccgcgcacgaggccgccgtcggcgacatcggcttcgcggacggcgccgccacggccgcgcgcggcgcgctgcggtccgccgtcgacgagatcctgcgtgacagccgcgaactcgcggcgtacgcgcgcaccgacgtcctgcgtatcgtcggggccgtcgcgcccggagagcatccgccggtgtggcccgacgacgccgtgtggcccgacgctgacgcgctcgcgcatcgcctcgaggtcgaggccgcgacggccgacgtcctgcccgccggcgcgcagtggctgcacgacgcgctcgtcgccgcgaccgaggacgtgcgcagcaccgaggcgacgcgcaaggcgattcgctcgaaactcaccaccgcgctgcaggagttcgacgcgagcctcgccgcgaccggcgagcactactcgctgcgctgggacaaccccgacgggctcaccgtggtcgaggtccacggcgacggcggcgcggagtcgatcgccgacttctcggcgcacatcggtgccgcgcgcagcgagcaggagttgctgctcaccgacgccgaacggcggatcctcgaggacgccctgctcaccggcctcgcccagcagatccacgaacgcacggtggccgcgcgcgagatcatcgccgcgatggcgaccgagatgcggacccgccgcatgtcgtcgggctcgaccgtcggcctgcgctgggtgctcgccgacaccctcgacgacgaggggcgcgccgtcgcgaagctgctcgaacgcgatgcgacgatgctcggcgccgacgagctcacccgggttcgggcgtacttcgcgtcacggatccgggccgagcgcgccgtgcatcccgaacgctcgtatcccgagatcctgcgcaccgcactggattaccgcacgtggcgcagtttcgcgttctcgctgatcgacccgagcggcgaggaggagcggctcaccgtggcgcggcacagcgcgctctccggcggcgaacagtcggtctcgctgcatcttccgctgttcgccgcggcgcacgtcatgctcgcgtccgccgacccgcaggcaccgcgactgctcgcgctcgacgaggcgttcgcgggtgtcgacgagaacgggcggaccgaactcctcggtctcaccgcacaattcgacctcgacctgttcatgacgggctacgacctgtgggtcacgagccccgagatctcggcgtgcgcgcactacgatctgtcgcactcgaacgccgagcacgccgtcgacgcactgctcgtgctgtggaccggcgaggagatgcacgccgagtacaccggtgcccgggatctggcggcgaccctcggctcccccgggcgtcgccgcgtcctcgacaccgctggggcactggacatcgagcccgcggtcaccggctga

SEQ ID NO: 50471 - DNA, 1515 bp, Actinoplanes sp. N902-109
gtggggagcgaggacgccgatgcgtgggagctggccgggctgcccggtggcgtgccgcaggccgcctacctgtccgggccgctcgccgcgcaataccggctgatcgtcgacgtgctgctggcccagcaggagcacacgctgaccggggtggccgccgccgacctgcccgggctgctgcgcgccgagctgggtgcgcacgcccgggtgctcgacgacccggggttcaacctcgacgcccggatgcgccggctcaaggcgtggcaggttgtcgacatctggcaggaccgcgcgctgcgtgacgaggacttcctgcgcaacctcgaccgctatcagctcaccccggccgccgccgacctgcaccgggcggtgctccgcatgggccaggacgtcgccgacgccgccgctgccacgttcgcgccgagcgtgctgaccgcgcacctgaccgttctgcgggacaccgcggccggtgatccgggcgccgccgcggaggcctggtcggtgatccgcacgacgcaccgcgcgatggccgacgccgcggccgggtggcaggcgcgcctggccgccgcccagtccggcgcacccgacccgggcaagctgacccaggtgcaggagacgctgcgccgctacgtcgagatgtggggcgcgggcatcgacacccactccgacacgatcaccggcctgctcagcgagctgcgcgcggtcaccggctggcgccgggtcgccgtgcaccacctgggcgccgcggccgacgagcccgccgtcgaggggctcgtcgcctcctacgcccgcaccctggacaccctgcgccgctggttcgacgggccgcagtgccaggcccgccggctgcgccggcagatgcgcgacaccatctccccgctcgtacggggtcagcgcaccctcgccgcggtcggcgggcacgtgtcgcggcgggccgagctgctcgccctcgccgggcagctcgaggcgaccggcgacgacgtgcgggggtgggagctgtggtgcgccgcgaccgggttgttctccgcgcggcacctgcccggggtcgcccccgaaccggccggcaaccccgccgccacgtcgttctgggacgccgagccggtgccggtggaggcccggttgcgccggcacgggcccaaggccaccaccgggtcggccgcgcgcatcccggaccggtccgagggccggcgcgccgcaaaggcccgcgctgctgagctgcagtcggctgccgcccgtacggaggccgcggttgccgcccggtccgggcagcggctgtcgcagtggcgggaggtcgccggggccgagctcgacctgctgctcacgatgctgaccgtgctcgccggggcccgcagcgacgccaccgggacccggcacgcccgcaccggcgacgaccgctgggtgctgcgtgccgagcccgccgagccgcaggcccccgccgccgtgctgcacacgcccgacgggcggctggtgcaccccgacatccgcctgcacatcaccgctgccgggcggcccgcatga

SEQ ID NO: 50472 - DNA, 1113 bp, Actinoplanes sp. N902-109
atgagcaccgcgacccgcgaggcccagcgggcgttcaccgggctgctcgagcgtcccctggtcaccccggccaccgaccccgagctgctccggctggtgctgcgccatctgcaggccgtcaccgacaccgcgcgccgcctcggctaccgggtgcagcgcgtcggtcgcgccgtacgcttggtcagggtgcccgtcgcgggccgggtgacggccccgccgcgcccggccgacgcccccggccggcgggtcctggccctggcctgctgcctggccgcgtgctgcgaggagatcgccggcgcggtgaccctgcagcggctgtccgacctggtccgcgatctgctggcggcgcccggggccgcggtgaccggctacgacccggacgagcgggcccagcgcaaggcgttgcgcgacgcggcgaaactgctcgagggctggggtgtgctgcgccggcgcaccagcgacgacgccctgctcgaggagtggaccgagcgcgggtcggggccgggtgcgggctacgacgtcgaccgggacgcggtgctgctgatgaccagcccggacgtgctcgaccaggcgttgcacccgggcggcgacgacgagccggtgcggcagctgcgagcattggtcgagacccccgtggtgctgcacgccgacctgagcgacgaggaggcggcagcgctgcggtcggcgcggtccggggccgcgcggttgaccggcgggcacgtcgaggtccgcaccgagggcatgctgctggtcctgaccgacgacgagcagcaggccaccgtggcggattggccgcgggcccgggccgccgactgggtggcgttgctgatggccgatctcgccgggcaggccggcacccgcgccgccgacggcagcgtgcggctgaccgcggccgaggtcgacgaggtggtcgccgacctggtcgactggcgcggcgactacctgaacaaggcgcagaagaccgtgcccggcaccgtccgcgccgacgccgaggcccggctcaccgagctgggcctgctgcgcgtgcacctggacgcctcgtggcagctgctgcccgtggccggccgttaccgcgcgcccggcatcaccatcacctcggaaggccgcccgtga

SEQ ID NO: 50473 - DNA, 4446 bp, Actinoplanes sp. N902-109
gtgacgctcccagctcttggcccggctgccgacgaccggcagctgaccgcgtggcgcgacgcgctgaccgggggtgagctgcccgcgccgacccgcgagcgatggcagatcctgcgcgccggcgtggtcaacctgtgggagttcgacgtcgccgaatactggttcgccgacgggcgcgcccagttcgtcggggccaaccagtccggcaagtccacgctgatggcgctgaccacgctgatcatgctggccggcgatctcgaccggcagaacatcgacacgttcggccagtccgacaaggcgttccgctactacgtcgagcccaccgacgacgcccgcgaccggcgcgacgccaccgccaccaccaaccgcggctgggcctgggtggagtatgcccggctcggccccggcggccccgagttctacaccacgctgctgtacgcgcaggccaagcgcggggtgacggcgatgcccccggcgtggctggtgtgccgcggccgggcccgggtgcgcgacggcctgcagctggccaccgggcaggcggtcgtggagccgcgggagctggccggcaccgagggcctgacggtgttcgacagcgggcgccgctacgccgagcggctggccaccgagctgttcggcttcgccgacaccgaccgctacaccaccgtgctcgagatgctcaaggtgctccgcaccccgcacctgggccagcggctcaacccggactggttcacccggcagatccgttccgcgctgcccccggtggcccgcaccgaggtggccgagctggccgagggctggcagcagctcgaacaactgcgccgcgaccgcgactcggcccgcgaggcccgcgacgccatcaccgcgtacgtcaccagggcctggcgcccgtgggccgactcggtgctgcgcctgcacgccgacgagctgctcgacgccgacacggccgtcacccgcgccgcccacgacgtcaccgccgccaccagccgcctcgagcaggcccgcggcgagctgagcaccgaggccacccgcaccgacgagctgctgcgggcagcccgtgccgcccagacccgctacgaggagctgctgcgctccaaggcctacctggacgcggccggtcgcgcggatcacgccggcaccctgcgcaaggaagccgagaccgcgcgccgccacgccggcacagccgccgccgacgccgcccgcgcccggtccgagagcgagcgccgcgccgcccaccgcgaccaggcccgggccgccgctcggaccacccgcgaccgggccaccgcagcgaccgagcacgccgccgccgcagccaccacggccggcctcggcgaccacgccccgcaatgggcagccaccggcgacctcgaccgcctcaccgccgccatcgccacccgccgcagcgccgtcgccgtgctgcgcaaactcctgcgcgaggcggccacggcggtcacccgctgggaagccgccgacgaccgggccaccaccgcccgccacgaccacgagacccgcagccgcaccgccgacaccgccaccgaggcactggccgaagccctgcaacacctctccgacgacctcgaacgctggtcggtggccacccccggcgcacccccggtcccggtacgcgaacagtggctggcccacgtcaccacagcagccgcccacccccgcccccgggccgccctccgcaccctggtcaccaccgactggctcgaccccgccatcacccccctgaccgagcagatcggcaccctgcgcacccgggccaccaccgccgaccagcaggccgccgaagccgagaccgaggccacccacctcaccaccaccgccgaccccacccccgccaccaccccggcccgctggacccgccgcccccgcccacccatgtcggcccgggcaggcggccccctctggcggctggtcgacccgcaccccggcaccggccaggccaccatcgacgccctcgaagcagccctcgacgccgccggcctcctcgacgcctggctcacccccgaccacacctggtcccccacccgcgacacccacgacaccgtcctcacaaccgccaccgcgaacccgccctcccacgaggccgccgcggcaggagcggcgcggacgttggctgatgtgctgcggccggcggaggatgccggggagctcgccggtgcggtgacggccgtgctggccaccatcggttacgcgccggccggggtggagctggccggggccgtggccgtgtcggcggacgggcggtggcggacgccggtggcagccgggcaggccggcgcggcgccggcgggtgcggagctgctgggcgtcgcggcccgggttgccgcacgccggcggcggatcgccgagctgcgcgagcgagccggtgaagcgcgccgggcggccgaggatttccgggccggggccgccgccctcaccgaacgcatcgccatggtccgggccgacgccgcagccgcgcctgatgacgccgatgtggtgtccgcgggcagtgcggtggccgccgcgaacgccgagcgggaacgcgccgaggaggccctcgcccgggccgagcgggaggccgcccgggccaagcggcacgccgatgacaccgcggccgaggttgcggcacatgccggggcgcatgagctgccgctgaccgaggaacggctcgatgcgctcgccaccgacctcgatcaggccgcccaggcggttgccgacctggggctggcactggcgggccgggctgccgccgaccgcgatctggccgccggcatcgaggccgctgccgaggccgctgatgcggctgcccaggctgaccagcgggctcaggacgccgccgtcgaggccgaggaggctgtgctgcgcgccgaggaggcctcggtggctcgcgacgaccaggagcagctcgactacgcccgtacgttggagaaggagcgggcggagctggacggcctggtcgatgccagccgcaccaggggtaaccggctggccgaggcggctgccaaggccgccggcctggtcgagcagcgcgaacgtgagctcgccgcggcccaccggcgccgcgacgccgccctgaccgcctggtggatcccggtcgacgcgggcctcgccgccgcccgcgacctgctcacccgagcagactcaggccggccccccggctcggggcatggcaccgacgccgagcagagcggcgaggaaggcgcagggcgaagcggcgaggaaggcgcagggcgaagcggcgaggaaggcgcagggcgaacgcggctcatcggtggggccggggcggagcggagcctggcggcggcgctgcggcaggcgctcgcggcggcgaccacgttgcgaccgccgacctggccggatgccgcggtggacaaggcgaagcgggcgcagacggcgatggccaaggccgtgggcagtgccgtcgcggagctgcggacggtgctggaggccgccggcgggcgttcggtgaccattgtggacgccgacgacaacgcggggctgcccggcgtgctcatcctggtcgacgcctccggggcgcacctggcgccggccgaggcgatccggcatctggacgagctggtggccgagctgtcggcggcgcacagcgggaagctcgaccagatctacaccgagctgctggcgtccacgttcatcgaccatctcggtgaccgggtcaagaaggtcagcgatctgctgagcctggtcaacaaggtgctcgaacggcaccctaccggcgccaaccggaccaccctgcggctgcggcggcacccggcggaggggcagcgggcgggctgggcggtgctgcgggcactggaggacggcaccatcgcctcgccggcggcgcaggagcagatccgcgagttcctgggcgaccgggtacgggaggcgcaggaggccggccagggcagcacgctcgactggaccgagcatctcgcggcgctgctcgactatcgcagctggttcgacgtggtggcggagttccgggtcgagggcagcgacttcaagccgctgaccaagcaggtgcacggcgtggactccggcggcggcaaggtggtgacgctgttgcagccgctgctggcaaccttggtggcgctctacacggagtccccggcggcaccgcggccgttgtggctggacgaggcgttcgagggcgtcgacccgggcaaccgggcgacgatgctgcgcctgctggtcgacttcgacctggacttcctgctggccgggccggcgccgctggtggccgcggcgcaggtgccggcggctgcggtctggatcatctcgcgggcacccgccccggcgccgggggtcgacctgtcgctcatgctgtgggccggccgcaccctcgaacagatcgctgtcccggaccacgcggtgcgcatcctcgcgccgcgccgcccgctggaggagggcccggacctcttcaccacggtggacgccggcgaccccggtgatcaggggtga

SEQ ID NO: 50474 - DNA, 1494 bp, Amycolatopsis orientalis HCCB10007
atggatccgttccgtgtaccgcccgagctgttccgtttcaccgacggcagcagatcagggctccccctggcgatcctgcacgccttcggtgaggcgaacgagcggctcgagacggcgctcgggatcgacgacgtccgcactcggctgcgcgaagtcggctggctggagacgctcgacgacgatgacctcgtcaaaacgctggaccagctcaaggaccagggccatctggaaaccgttcagagccacgcgggcgactaccggaccgcgtccgagtacgagcgccgcaatctccagtacgcgctgaccaggcagggcgaagcggcgtacgcgggtgtggtccgcgcgaacgaggtgctcaacgcgacgggcgcgcttcagaccgcgacgctcgaagcgctcggtgagcggctcggtgagctcgcgaagcagctcgaagacggcaccgacaggcgcgtgttcagcacgctcaccgaagtcgagggccacctcgaagcgttccgcgacaacacgaagcgcttcaacggcgacctccagcgcctcctgcacgcggaggccgacatggcgacgttccacgaggtcaaggcggccacggtcgcgtatctgcaagagttcttgaacgacctcgagcatcacacccacaccatcgccacccgcatcaaggagatcgacgaccacggcatcgagcgcgtgcaccggcgggcgctcaacggggcggccctcctcaatccggatcagcgctggctcgacgtccgcaaggcgcgctgggacgggctccgcgcgtggttcctgcccgaggacggggcgacgccgcgggtcgaggatctccacaacctcgcgcggcgggcgatcatcacgcttctccaggtcctggaccggatcaccgagtcgcggcggcgcgcgagcagcgcggtcgccgatttccgtgagctggcgcggtggttcaccgtcgtcccggcgcaggaggacttgcatcgcctgtggtccacgatgttcgggctgagctccgcgcggcacgcgcatctcgcgcacgccgacccggaagtggtcagcacgacggcctcgtggctcgacgcgccgccggtcgaggtgtcggagctgctgcgctccgcgggccgcaccgagcggttcacccggaccggacgggtccgcgacgtcagcgcgatcagagccgcgagagccgaaaaagccctgcaggaacgcgccgaactcgaagcggcgtggaacatgctcgacaccggcggcgtcgtgcggctttcggcgttcgagaagctggatcacaccgttttcgagcggctgctggacctgctgggtcaggcgctgggcaggccgcccggcgcggagggcaccaggcggagcacgacgtccgacggccagatcgagatcgtcctgcggccaccgaggaacggcgcggtcgcccgcttgaccaccacgagcggcgtcttccgcggccccgattacgagatcgagatcagcacggccggaggcggtgcgtga

SEQ ID NO: 50475 - DNA, 1221 bp, Amycolatopsis orientalis HCCB10007
gtgagcctcacgaaccaactggtcatcgcggaacgcgaagaggtcgcgcgcgggatccgggccctgctggccaccccattgatcggcgaacgcggctcccccgagaccttcgacctcatccggcgccgccgcgagcccatccggcagtggttcgactactactgcggctggacgctcacggtcgaaccgcggctcggctacgcccggctggtcaaggtccgcgcggccgccgaccccacccgcccggcgcgacggctgcgctcggggcgcgcggcgttcgaccgccgccgctacgtcctgctgtgcgtggtggcggccgaactgctgaccgtgccggtgacgaccatcggcctgctcgccggccgcgtcgcgcaggcgagcgccgccgacgacctcgtcaccacgttcgacgtcgccaccagggcggagcggctggcgttcgtggacgtcctcaagctcctggagtcctacggcgtgctcgaagccgccgacggcgatccggagtcctttgtggacgatccggcggcgaaggtgctgttccgggtcgacgcgacgctgctgctgcggctgctcgccgcgccggtcggcccttcccagctcgccgtgcccgccgacgacgtcgcgctgcggttcgaggaactgctggaggcggtgtcgcacgagcagcgctacggcctttcctccggccgccacgaggacacgccgagcgcgtcggacgtccagcgcaacctttggctgcggcacacggtgttccgccgtctcgtcgacgatccggtgctgtacttcgccgagctgaccgcggaggaacgcgcgtacctcggcacgccgaccggacgccagttgctgcggcgtgccgccgagcagggcggtttcgtcctcgaagaacgcgcggagggtgtgctactcgtcgacgtcgacgggctggccaccgacgagcggttcccggacgacggcagcaacgccaaggtcgccgcgctcctcctgctcgacgcgctcgacgagccgcggaccatcgattatctgcagaaggccacggccaaactgctgaaacgcttcccgcgctgggccaagacctaccggggcaaggacggcgtgcgacggctgaccgtcgacgcgctcgccgtgctgaccggcttcgggctggtccgcaccgaagccgaactcgtccggccgctcccggccgccgcgaggtacaccgaccgcaccgaggaggcgccgtga

SEQ ID NO: 50476 - DNA, 3984 bp, Amycolatopsis orientalis HCCB10007
gtgaccgtgacgaggtggatcccctcccgtgcgggcatcctcaacatctggcgctactacgacgagatcttcgagttccacgacgggcgcctgctgctgcgcggccccaacgggagcgggaagtcgaaggcgctggagctgctgctgccgttcctgttcgacgcgagcctgcgcgccaaccggttgtcgaccttcggcaccagcgagcgcagcatgcactggaacctgatgggcgaaggcgcttccggcgccacgcgggtcgggtacgtctggctcgaattcggcatggcgggcgagaagtggttcacctgcggcgcgcggctccaggccagcacgcacaccagcacggtgcacgccgacttcttcaccaccgatcagcgcgtgggcgacggcttgccgctggtcaacgaggccggtcagccgctgaccaagggcgcgctggaggaggcgctcggcgagcacgggacggtgcacgacggcgcggccgagtaccgcgcggagatccgcgcgaaactgttccccaccttgagcgaacagcggtacgacgcgctgatcaccgcgctgctccagctgcggatgcccaaactctcgcagcggctcgacccgagcctgctgtccaacctgctctcccgcgcgcttccgccgttgggacagcaggagatcgcggatctcgccgagggtttcgagcggctcgacgcgcaacgcgaacggctgggctcactggagaccgaggtcgacgcgacccgcgcgctcgccgcgcggcagaagacctacgcacagcgtgtgctgcgcgcgggcgccgcgaacctcatcaacgccacaacggaactcgacgaactcgccgcggccgcccgccgttcggccgaggagcacgacgaggtcgccgcgaagaaggaggccgccgaggaacgggcggcgaagctggaaaaggacgtcgaagagaccgaagcgcgtctgtcggggctgaccgaatccgagtcgtaccgcaagggccaggagctcgacaagctgcggcaacggaccttgtccacgcgcgagaaagcggaggcactgcgcgcggacgcggaccggctccgtgccgaggcggacgccgacgaggagcgctcgcgggtggcgaagcaggccgcgaaacgacaggccgacctcgtgcgctcactggagaccgaggtccgcgccgccgcgacccgcgcgaacctggccggggtgcacgacgaactcgtcgccggactggacgaaccggcccggctccgcccgttgctgcaggccgccgtgcgcggcaaacgcgaccaggtcgagacgatcggccgggcgctggacaaacacgaacgcgccgtcgggcggcgccaccaggccgaggcggacctggaccgcgcgcgagcggatttctccgtcgcgcaggagcgggtggaactcaccacggcgacgcgggaactcgcgctgagcgatctgcgcacccggctcgccgaatgggcgatcggctgccgcgagctgcggttccccgacgtggaagcggtcgtccgggacgccgaggcggaggtctcactgctgggcaggctcggcgccgtcgccgagaccgtgctcgaagacatcatccggcgggaggcggcgaccggtgccgcgctggccaccgcgcgcaccgagcacgacgaactcctcgtcgaggcgggcgtgctcgaaaccgaggacgtcctcgcgcccgagccgccccgcacccgcacgacggaccgggccgagatgagcggcgcgccgttgtggcggctggtcgatttcgccggctcggtcccggaaagcacgcatgcggggatcgaggccgcgctcgaaggcgccgggctgctcgacgcctgggtgaactcccacggtgtcgtcgacgggcacgacgtgctcgcggagtccggcacgctgccggtggcctccggtcgttcgctcgccgacgtcctcgtgccggaacccgacgcggaggtttcccctacgaagatccgccggatcctggaagtgatcgccttcgacgacacgctccccgccggtcccgcggcgatcggcgcggacggcgcctggcggatgggcggcctgtcgggcagctggacgaaggacgccccggcgtacatcggcggttccgcccggctgcgcgcccgcgaacgccgcatcgccgcgctgcgggacaagatctccctccgtgagaagaccatcgccgagctggagggcgagctggccgcgctgcgcggcaggcgcgagctgatcaagatcgaacgcgcggcccgtcccggtcacgacgatctccttgtcgcgaccgggaacctgaccacggccgaggcggagctgaccgcggccgacgccgccgtccggcatctggaggccaccgtctccacgctggagaccgaggccaagacggcgctgcacgagctgaccgcccgggcttcggaatccgggttgccgaccgaacgcgcgccgctggccgcgctcgccacggccctgcgcacgtactccgaccagggcgagaactggctgtacgagcacgggaacctgctcaccgcgacccagcgggccgagctgtgcgccgaacaggcggaccggtcggaggggaacgcggcccggcgcgaggaggaggccgccgacgcggaagccgaacgcaccaagctcaccgcgatgctcgacgcgatcgacggcacggtcggcaccggccagcgcgaggtgctcgccgaaatcgacggcctgcgcacgaaactgcgcgagctttcgggtgaactccgcgcggcgaacgccgacgccaaggaactcgcggtgtcgctgggcgcgctcggcgtccgccggacgaccgacgcgcgggcacgcgaagaggcggccaagaaacaggacgcggcagcgctccggttccggaagctcgccaccggcatcttccccgcggacggcgggatcgaggatctgccgaagttccaggccaccctgtccgcgtccgagagtgtccgtgccgcgctcgacaccgcccggctggtggccgcggcgtggccgtccgtgccgcacgcgccgagcaacctcggcgaggcactgcaccggctgtcggaagccgtgcacacgtgccggaacacgctcagctcgcgcgcggaactcgatctggagaccgacgaggacgtccagatcttcaccgccgtcgtcgacgggctgcgggtcggcgcggccgaactgctcaagatcctttacgcggaagcggaacagagcaggcacgagatcaccgaccgcgagagcgacctgttcgacaagaccctcaccggcgacacccgccgtcatctcgcggcccgcatccggcaggccaacgacctcgtcgacggcatgaacgcgcggctggaacgcgtgcggaccgcgtcgcgggtcgccgtccggctggtctggcaggtctccccggatctgccgccgggcaccaagaccgcgcgggatctgctgctgaaggatccggatcagctgaccgccgaagatcgcgtgtcactgcacaagttcttccgtgaacgcgtcgagcaggcgaaggcggacgacacggcgaccagctgggaacagcagctcgcgcaggtcttcgactacacgtcgtggcaccggttcgtggtcaaggtggaccgcgcgaacggggcgggctggcagctgctgaccaagaagctgcacggcgcgctttccggtggggagaaggcgatcgcgctgcatctgccgctgttcgccgccgtcgccgcgcactaccaggccgcgcccgaggcgccgagggtgatcctgctcgacgaggtgttcgtcggcgtcgacaccaccaaccgggggcaggtgttcggcctgctgtccgcactcgacctcgacctgatgctgacctcggaccacgaatggtgcacctacgccgaactcggcggcgtcgggatccatcagctcatcaccggcggcgacggcgacgacgcggtcaccacggcccggttcacctggaacggccacgacctccagcccgcggggcattag

SEQ ID NO: 50477 - DNA, 720 bp, Thermobifida fusca TM51
gtgggtgactcagtgatccgggagccagcagaccgacgcgtgaaaccgccgtacgggcgcgccgccgtgctcagattggcttcctggtttgaccaggccgacgcggccacggcccaccgcctcttcaccgccgcgttctccctctaccccgcgcggcacctcagcggcagcaccgaggagaccatcgcagtggccgccagttggtgggatgttccccccgcggacacgtcagcggtccgccccgcccgaggcggggctcttgccccggcagaagaccacagcgcccaacaggtgcgcctccgcgacaccgcagaagccgcggcccactggcggcgctccgctgctgaggaagtgcggtcccgtctcgccgaactgacgccccgcaccggccgtatcaccctgtcccaggcggcgctcggagtgctcgtggagctcctcacccgtgccctcggctccggcgacgccacggccgccccagtcagtgccggcgacctcgaactcgacatccggctccatgtgcgccacgatgccgatgccgtcctcgtgctcagtgaggacggcggcgacctcaccctcaccgggctgcggctgtgcgccaccccttacgcccgcaccgaacccgagcacggcagcgacgccgtagcggacaccgacacggagccccacacccccgtcccggcaatgagtgggtcggacgacgccgacaacctcgcggtgtaa

SEQ ID NO: 50478 - DNA, 1209 bp, Thermobifida fusca TM51
gtggccgcgaaggaggacatcgcgctcaccattgagcgtcaggctgcggcccgccgactactggcggaccccctcatcaccgtgcacagccatcccgaggatttcgcgctcgtccaagcccactccgactggctcgtccgccagttccggcgcgtgctcggctacgagctgctcatcgccgacgaccacgccaggctggtgaagaccgggctggtccacacggtgaccaccccactgctccgcgacagcggcgcgccgttcaccccgcgcgcctacacctatatggcgttgactctcgcggccctgcccgatgcaggtccgcgcaccaccgtcgccgagctggctgcgggggtgcgggccgctgccgaggaggccgggctcgccctcgaccccgaagcgaggctgggggagcgccgcgctttcgtcgccgggctcaccagactcgtcggatggggggtgctcaccgagaccgggggacggctcgccgactacgccagggacggcacctgcgaagtcgccctggccgtcaaccacgggatcgccgcgcacctgctcgcccacatcccgcacacggccaccccggaggagttcgtcaacctggtccaacgcgactcggtctcctccgacgagaaagccgccgaactcaccctgcgccgcctgctcgcggaaaccccggtcgtctaccgggaagagctcagcacggtccaccgggtccagctcgcccgccaccagtggcgggccgcagcggaactcgcggatctcctcggctgcgacctggagatccgcgccgaaggcgtggccctgatcatgcctgcagaggccatggatgacccccgggaagccgtccatcccacgaccttccccggaaaaggactggtgagctactccgccctggtcctgctgtcccgcctcgtcaccatgctcgccccgccgccgttcagccacgggattccgatccccgcggagctgctcgacacggaactcgccgcggtcgttgacaacgtccaccagtggtcacacactgcccacagtcacgtccccgaccctgacgatctcgccgaacgcatcctgaccctgctccacgacagtcgactgctcgaccgtgtcaccaccgacgacgcgcctcaacgcctgaccgaagggtggcgactgctcgccgccgccgcacgctaccgcgacgccgctttcgcccggagcgatgccgaatga

SEQ ID NO: 50479 - DNA, 3344 bp, Thermobifida fusca TM51
atgagacaggacaccaccctccccaagcgctaccggctcgaacgtgccgggatccacaacgtctggcagtacgacaaccacatcttcgaattcggggacgggcgcctgctcctgcgcggacgtaacggggcagggaaatccaaagccctggaaatgctgctgcccttcctccttgacggagacgcccgccgtctcgacaccaccggcaccagccggaccagcctgcgctggctcatgctggaagggcgcaccgccaccgagaccggggacaccaccgccacccagaccgacaccaccacgctgggctacctgtgggtcgaattcgcccgccgcggcgacgacggccaaccgcagcggcgcaccctcggcgccgcagtcctcgccgtacccgaccagcctgacgcccgcccgatcttcttcgtcaccgaccgccgcgtcggcgacgatctcaccctcatcgagggcggccgcccgctgcccatcgaacgcctccgcgccgcggtcggccccgacaactgctacgacaccgccctcggctaccgcaccagggtcatgcgcgacctgttcggcctcgacgaccccatgcggtaccgcaacctcatccacctgctctaccggctccgccgccccaccgtcggcgaacgcctcgaagccggcgaactcgtctccgtactgtccgaagccctccccccgatggacgacgccgtcctcgacgaggtcgcccgcaacatcgccgacctggaaagcgcccgcgcccgcctcaccgcgctgcgcaccgcccacgagcacgccaccgccttcctcaccgactaccgcggctacctgcacggcgtcctacgccagcaggccgcggcggtacgcgagcagatcaccgcattcgaggaacgcgacgcggaactcgcccggctcgaagccgaactcgacaccctcgtctccgcggagagcaaggcacaagaggaacgcgaccgcctgcgccgcacccgggacaccgcacactcggacgcggcgaccctcaccgcaagcgccgcgcacccgcggcaggccttgagccggggagaacgcgaagcccgctacgccgcggtagccgcctacatccgcgccgccgaagccgcctgggtcgccagcgaacacgcccgttccgcggaatcccaggcccaccaccgcatcgaccgcgactgcgccgccatcgaacgcggcatcgggggactgcgccgccttcacttcggtctccgcgacgccgcgcgcgcctccggcatcgaccctgcccgcctcggcgaagtcccccagccggtccgggtcaccctcgccccccgggaaagcgtcacccaggtcaaccttgaagggctcgagcaggccgtggaacgccccccggtgcagggactcgagatagacgcgctgcggcgacggctcgccgacctccacgaccggctcacccacaccgacgctgccgccgccgagcgcgaaaccctcgtcgacgacctctaccagcgcgccctggaactggaagcggccgaacgccgggaagccgacctcaccagcgaagcggaatgggcggacagccacgtcgaacaagcccgggaacgggaacgctccgccatcgaccaggtccgcgaagccagcgacgactacgctgccgccgtccgtgaatggtgcaacgccctgcgcgccgctgccccggacgacgtcgacatcgaaggggcgttggacgctttggaacagcgcgtcgagcctccgctcgacgaagacttgcgcgtcctgtccgcggatctgccggaaaccgtgctccacgaggcccacgcggtcgttgaaccgctcctcgcccaggtgcgccacacccgggacgcagccctcagcgaggagcacgacctcgccgcggaactcgcggaactcgcggagcgccgcgcagacgagaccgcccccgtcaccgcgcctcgtccggcctgggccaccgccccacgggacgctgacgccggcgttcccctctaccgcgcggtcgacttcgccgaccatctctcccctgaggagcgggccgggctcgaagccgctctggaagcctccggcctgcttgtcggacttatcacccccgaagggacagtcgtcgaccacgacactagggacctgctgctcagccccaccgcggcgctcagcggccgtaccctggccgacgctctggttccggtcgaggacgagtccgtgaaagtcgaccgtgccgcggtcaccgcactgctctcctccatccgcctgctcggcgacgaagaatcccccgcgccatccggagacggatcgtcctggttccagcccgctgacgcgtcttccggagcagagaactacgtctccctcgacgggcgctggcggctcggcgtcgcctggggacgccaccacaaggccaccgccgaatacatcggggaggaggcccgcgcccaggcgctcgaacgccaccgggccaaagctgaacggcgcatcgaaatggcggaggcgctgctcgccgaagcccaggagcgccgcgccgagatcgacaaccgctacgagagcctggtgcggatcaaccggtccgtcccctccggcgccgaccttgccgcggcctgggccgtgctggacgaggcccgcacctggctcgccgcgaccgtccgcgcccacgccgcggcccgcgcagccgctgacgcagcccgcagcgccgccctcgaacagcgggcgtcgctggccgagctcgccctgaaacaccagctccccgcccactacgaggagctcgcccggatccgcggggccctgggggcgctgcgcgtgcagatctccgcggcccaccgggacttggagatcctcgccggacgactcgaggactaccggcgccacgtcgccgactggaaacgggcccgggaagcccgcatcgtcgccgaggacgcggccagcgccgccatcaacgacatgatcaccgttcggcgcgagaccgagctcaccgaccgggccagcgccgccgacccggcgcagatcgagaacgcgatcgaacaggtgcgctcccgcgcccacaccgcggacgaggccctgcccgcagttgaacgggacgcccaacgcatccgggacgagcgggtcgcggtcgagacccgccacagcgctgccacggtggaacgcgccgaacaggcccaccgtgccttggccgccggagcgcggctccgagccatgctcgccacccccaccggggaagtcgaccagggactgctggccgcggcaggactccgtgaactcgctgaacctgagggagcgctggccgcctacgatgcagcggaatccgacccggagcgcagcgacgacctcaccaagcgcatccgcgtcctcgacacgctgatcag

SEQ ID NO: 50480 - DNA, 1473 bp, Lachnospiraceae bacterium 28-4
ttgaaatatttggaatcaattcaggaaactatatatttatctgctggtaatgcgccgcaatacaggcgtattatgcggattttttttatagagtacgaaaaaatgcatttccaattatataaggaagatgtgctggagctgcttagagagtatccggagttttcagattatgctatggagcagttgaaaacagatttagaggcgttagttggatggaaaaatcttacccctatccaggatccgaaaagagtttatacgattgcggaatataaaaataagcagtaccgttatacaatgtcggagtacgcagtagagatagagagaatgactgtgaaacttgagaatcttttcatggacagtgggaatctgtccatgaattattttgtgcggattgaaaatgccttgcatgaaatagagcagattgaccgtcaggaactgaaagccgtgaatgaatggtggagcaatttgcaggaagattttaagaggttaaatcggaattatcaggattatttgagagaattctattcaggcaaatcagataaagttctcaagtctattgaatttgtcatacataaagacagatttatttcttatctacaggagtttgtgcagcagcttcagaataaatccatacgtattgaaaatatcattaagaaattatcacagaagatggtagacggggtattggagagagtaattgaaagtgagctggcaattccacatccgaattcggaaatccaggatttaagggagaatgcgataagagaaaatatttacggaaaatggaagagcctgtcagattggtttatttcgaccgataagcacccaagcgaaagccagaaagtgatggatattacagacgaagtgatacggaaaatcatacaaaatgcagcactgatcgtacagatacaaaattggggaatcagccgtaaagaagattataagaaatttatccagatgtttgcgcggtgcgaaaacgtggaagcggcacataaactttcggcacatatattcggaatacagcatgtgcggcattttaaagtaaattgtccgcgttccacggatagcataaacagcagtgtttttgatgaactgccgtcggaatatgaattaaagccccataccagaacttataaaccaagaatacataaatccgggtttgaaagtaaagcgctggagaaacttgcacagcgtaaccaatatttgaaaaaactggaggaagacagaaagctggttatgaaatatattcaggacggccaactggatatcagccggattgacgactgcatttcagtggatacaagggagacttttctgcgctggatcgcacaggcgaatctgacggtttccaaaaacggacgtaccgagtatggacaggcttttcgcttaataaaacaggaagggagccacactctgaaatgtgaagacgggaaactggtgatgcctaaatatatatttcagtttgaggattag

SEQ ID NO: 50481 - DNA, 1140 bp, Lachnospiraceae bacterium 28-4
atggaagcggcaagggcattaatagagaattgttggattgacaaaaagaaaaataaagaattatatgtgaaggtccgcagagagctgacgaaatgccagaaatttttccgggaacagttgggctggacggtaatcaataacgaacagatattgaaggtggagaaaatacctgcccgcgcggaaggctatatgggcattacagactttacggagagcagggattactgtcttttttgcgctgtcttaatattcctggaagataaggaagaacaggagcaatttttgttatctgaattggtagatatgctggaactgcagctaaaagatgtgatggatgtagactggacgtcttttacacagaggaagtccctcgtaagagtactgcagttttgtgagaacatgaggttgttagaagcatatgaaggcagcagcgataatgtgggcagcagcattggacaggaaatcttatatgagaacacagggctttccagatatatggcggtaaattttgcatatagcatagctggtttccagtcatgggaagactttgaaaagcaacagaatcaggaaggcgaagcggacagggggcactacaggattaatcgtgtatacaggcagatcgctgcggccccggccctttactggaaccagtctgataacccggacagtatctatttaaaaaaccagaggcagtggatacagaaaaatttcagtgaatatttgggaggacagcttcatatccacaaaaacgctgcctttctggtgatggatgaaggggaatcttttggagaaatgcatccaagagaggctatgctcccggaacttgttttacttttgtgcggacggatcagggaaaaagcagacgagggtgtttggaaagagcggtatgatgggtgcattgtggtttcaacaaaagagtttcagaaagaaatttaccattgccgcgataagtacagactggcatggagcaaggaatacagagagatggaggacgtaaagctgttgacagcggttatctcttatatgaaatcatggatgatgattggcgagtgtggcgaagaacttgtcatctatccggcggcaggaaaaatgatcgggagttatccggcagagtttgatgcaaaggagaagaacagatga

SEQ ID NO: 50482 - DNA, 4038 bp, Lachnospiraceae bacterium 28-4
atgagcgagcgttggcatatgaaccgaataggatttgtgaatttctggctgtacgatgatgaagtattttcttttgcagacggtaaattgcttctgcgcgggcagaatggttcaggaaaatcgatcacaacacagagttttattccttttatactggatggtgacaggactcccagccggctggacccttttggctccaatgacagaagaatggaatactattttctgaatgacggggagaaggaggaagccaccggctatctgtacttggagtttaagaaggggaaccgttatcggacaattggaatcggccaacaggctcaaaaggggaaagctatgggcttctgggggtttgtggtattggatgggaggagaatcggatatgattttaatctgtaccgggaagtgggaaatacaaagatcgcgtatacgaagcaggagatgaaaaaggtactgggagaaaataatctgtttacggaaacgcagaaagattatatgcgttttgtaaataaacatatattcgggttcccgaggctggagcagtacgaacagtttatacggctgctcataaaggtccgggctcccaagctttccaaggaatttacgccgaaaaaagtatatgagatactgaacgattctttgcagactttgtccgatgaggatttgcgcgctatggtggacgccatggaaaaaatggatgatatacaggataagctggagggattaaaaagggcttataaagatctgcagattatacgaaatgagtatgtaagatataatcagtatatgctgggacagaaagctgcggcgtatctggaagaaaagaacatggtggacgctgccaggggaaaactggaagcagaaatggaggaattaaaggagactaaggaaaagctggagaaatcttacaaaagagcaggggagctcaaagcggaaaaaagtctcctggaacgggagaaagaagctgtcggaacaatagatttagaagaggcggatgaaaaattaagacaatgccgaaacagacaggaagatgctgggaaggaatttgccatgtattgccaaagcattgagagccacagaaatgcaatacgggagtacgatgctgcggtacgtgggatccagaaaaatattgacgcttatcagatggagatagagcagcttgtgcatgagatggatgaactccaggagcttatctgcttttccgggcatggacaaattttaagcttgtggaagaattccgatggttatgacgaatgtaagaaaatcagaagtgaaattgaaaaactaagcaaaaatgtggaagcggcattggaggaactgaaaaaattcaaagaaatacagatacaatgggacaggttgtcagaagagtgcagcagcttggaggaaaagaaagcgcaggcatggcagcaggtaaacgatgcggagacaatggaagaggcgctacgggatgacctgattgaggcatactatggtctggagcagcataaccaggaattttatctgtccaaaaaggaactggaacagatggcagtctatatccagaaataccagggaatgccggattatgggaatatacgcaatctcatcggaaacatatgggagatgaaaaaccagaagctgggaagcgggctttccgctctggaagcacagaaagaaaaactggcggagtctttgagagtctgcagggaagaattgaaggaattagaaaaagtaccggagataacgcctgtgcgcagggaaatcctgtgcaggacgagggagaagctgacagagaatcatatttcctttctgcctttttatgaggccgtggattttacagagtatgcttctatgcaggatcgggatttgctggaatgccagttggaagatgcggggcttttagatgccctggtggtggtgcagaaggattatacgcgggcaatgaaggttttaggagcatggtcagataagattctctgcttagaagattccgggaaaatgagatgccgtaaactgacagcggcgaccgaagatatggagctgcggaagatgactgagaggatcttgtccaatatcggggaggaagacgattgccggattgtgttaaggcccgatggttatttcaggcatggtgccttggaagggtacagcaggcctgaaacggaagcttgttatattggagaatccatacgaagggagaagaagaaggaacaaattagaaaaaaaacggaagaattgcagcttttgcagcaggaattggaaacatcggagcaggaaatcagcggagtgaagaaaagaattgggatcttgcaggaagaatttcacggattgcccgtatttgacgagctggacgaggcaatcgcgatgaagaaggatctaaactggacatttgaaaagtgcagtgaggaatgcgggaagaaacagaaagaaaaagaaagctgtgaaatcctaaaaaagcagtccgcacagcgaattataaccagatgccgggagctgccctacgaaagaaacatggagagttatgaggaaatactgggagcgatccatgagtatgcgcgtcagttagaatcctttcagatggctggaatgcgctttttggccgaggaagccagtaaagatatgcacaaacagttgatcgagaaagaggaggatgcaatcgatatagaagatctccataaaaaaagggcagagcaggaaatacaggagcagaagctacagatagagaaactggaagaattcctgaatgcacctgagaataaagagagggcggagcggttgaaactgatccgggatgaactggattcaaaaggtaaggaagaaacggaattaggtaaaaaacaggcagtatgggaagaaggtgtgaaaagactggagccgggtattgaggcacagaaaaatagtgtgacggaaaaagtggagaaggaagcccggctcaggaaatattttgatgaagaattatccctggggcttgtatttgacagagaaagcaaaacaataccggaagcggcggaacaggcaaaaacgataatcagggaaactgacagaaataagtccgtagcagagatcgtgtcgaatatggacaggatttttcatgcccatattggaaacctggtaatttacgggacatttatggaagattgttttgcagaagagacaacagatgcgatggtgctgcgcaaacgtcataggattgtttcttatatgcaggggcggaagctatattttgaagaattctatcaggtgatcaaagagaggattgatgaaaccgaactgttgatccgccagaaggacagagagttgtttgaaaatatcctgtcggatacgctgagcagaaagttgaatgtccgtattgcagaaagcaggaaatggattcaggatatgtcctcccttatgcgaaagatggatacctccatgtcactgaccttttcactggactggcgagcgaagactgcagatggagagggggaactggataccgcagagctggagaagatgcttaaccgtgacagggaattgatgactgcggaagatatcgaaaaaatttccgcacatttcaggaataaaatttatacggtaaagcagatagcggaggaaaacggcgaagtcttaagctattcggatttggtgcgagaagcgctggactaccggaagtggtttgagtttaaaatgttttactatcggaataacgataacaaaaaagaactgaccaacggagcctttaaccgcttcagcggcggggaaaaggcaatggccatgtatgttccgctgtttgctgcagtgaatgcgcaatataaaaaagcagagcaggatgatttgccgagaatgattgcgttggacgaagcatttgcgggggtggatgacaaaaatatcagcagcatgtttgacctggtaagaaaatttgattttgactatattatgaattcgcaggtattgtggggatgctatgcgtccgtacccttcctgcggatcgcagaattgcttaggccggctaattcacaggtggttacggttatttattatttgtggaacggaaaacagagaatcattgaggaacagtga

SEQ ID NO: 50483 - DNA, 1338 bp, Lachnospiraceae bacterium 28-4
gtggaagaaaaaaatctggaggaatgcgctctttatttcaggaatcataaagcatatacccgtatgtttatggagatgaagaaaaagtacataaaatatgggaagctttcagggagaatttttcttaataatttatctgaggcggaatgcatcgctttgggtaaagtttttgggagaagtctgctgcctggtgattttgaattttccattgcccagctacaggcggcactggatgagacgaagtattgtggtgttgaagtggctgctcttgtagaaaaatattttaatgaaaaaatattgtcaaacagccagaggagagaagaaaagacggagttaaacaaacggttttgggaagaagtgctgcatgaggcgggaagccggtttggaaaggacgccgggggaactctatggctcaatgaagtgagggaacagcggaaatacggttatcagttgattatgagggaaagagaaaaatcaagggacggtataaaagaagtgcttatggaagtgtgcagtgcattgacatacctgtccccaggggatgggaatggaaaggaatatgtcaggctggctgtgctgggggcagaaatcacaaagaatccccatttttttgacaggcagaatgcagcaggacgtttgctgatcagcgctttaagctttacctataagacagaggaaccaaaagcacaggaggatgttttagccctgtattatgcggcagggattatgcctgacgatatctccagctataccacgtgttatggaatccatttctacgaaggcgaaagggaacatgaagcttaccggtcttttatcagaaagggcgaaaaatatgttctgacgctttccaatctgagcaggctgacaagggcggacagcaacaggaagaaagtatttattatcgaaaaccagatggtcttttcccaagtgtgtgaagaaatgggaggggaagaatatccgattgtgtgtacttccggacagttaagaacagcttctttatttttaattgatttactgctaaagtctggatgcaaattatattactgcggtgatatagacccggaagggattgagatagcggacagagtgattgaaagaggctccgggcagatttttccatggagaatgacgacggaggactattacaggtcaatatcgaatgagatgcttacagaaaaacgtttgaaccggctggataagattacgaatgtccaattgcgggaacttgcacagcttttgaaaacagaaagaagagcagggtatcaagagcatttaattgattggatggtggaagatattaagacagaaaagcttgccctttttggctttacaaattaa

SEQ ID NO: 50484 - DNA, 1536 bp, Streptomyces albulus CCRC 11814
atgttccggttcaccatcggagagaaggccgacctgaacggagccgtcctcgaggccttcggcgtggctggcgagcacctggaaaccgccctcgggctcgacggcgtacgcgagcaactgcgggcggtgggctgggtcgcggacctcgccgacgaggagctgtacgacgcgctgaaacggcttgtcgggtgggggctcctcgacgtggtccacaaccacgccgagcactaccgcacggctgaggagtacgagcggcgcaacctccactactcgctgacccgccggggcgaggccgcgctggccggcgtgcggcacgccctggaggtcctcgcctcgacaggtgccctgcagaccgcggtgcttgaggcgatcaccgaccggctcgacgaactgaccgtgctgtccggtgaacccgccacggctgaccggcgcatcctcagcacgctgcgggagctggagggccatctggaggcactggtggagaacaccaaggcgttcaacggccagttgcaacgactcctccgagccgagggtgcggatctggacgtcttccgcgaggtcaaggccgccaccgtcacctatctccaggagttcctggtcaacctcgaccggcgcggcgaggcggtcgccgaggccgtgggacgcgtcgaggagcggggcatcgccgtcctgcgcgagcgggccctgcgcggcgccgagctgccaccggtgccgggggaggatcccgcagccgggtggctggagagccgtcgggcgcgctgggcgggactacgggcctggttcttgccggacgacgggacacacccccggatcgagcagctgcacgacattgcccggcgcgccatcgtctccctcctgcaggtactggagcggatcaacgagtcccggcgccgctcctccagcgccgtgcaggacttccgggagctggcccgctggttcgcggcggcttccgaggaggacgatctgcaccgcctgtggtccgccgccttcggtctgggctcggcacgccacgcccatctcgcccacccggacccggagctgatcccctcgtcccggtcctggtccgaggcgccgccggtggaggtgtcggcgctgctgcggaccagcggacggacggagcgcttcacccggaccggcaaagtgagggacgtggaggccgtgcgggccgagcgcgctgagcgggcccgtgcgcagcgggccgaactcgcccgagcctggcaggcgctggagctggacggccccgtgcggctctcctccttcggcaccctggatcccgccgtcttcgaccgcctcctcgacctgctgggccgggctctcgccaccgccccggacgcgagcggtctgtggcgtgcgacgagcggcgacggccgggtagagatcgtgctggcgccgccccccgacacccggaccgccgtactgcacaccgagaaggggacgctcgcagggcccgactacgtcgtccacgtcgtcgccgcgggcggaacggccgcgttcccggcaccccacaccgccacgcgtcaggaggccgccggatga

SEQ ID NO: 50485 - DNA, 1314 bp, Streptomyces albulus CCRC 11814
atgagcacgctcgccaaccagctggcctccgcggaacgggaggaggtcgcccgcgccatccgcctcctcctggcccgtcccttgctcaccaaggccgccgacccggccggattcgacctggtaaggcgccggcgcgacccgttggcgcggtggttcgactacacctgcggatggagcctggtcgtggagccccgccggggctacgcccgcctgaccaagatccgcgcgaaccccgacggctcccgtccggcgcgcagagcgcggtccggccgcaaccccttcgaccgtcggcgctacgtcctgctctgcgtcaccgcggccgagttgctgtcgatgcccatgacgaccatcggcatgctcgccgaccgcgtcgtccaggcgaccgcggtcgaccgggcgcttccgacgttcgacccggtccacaagccggagcggacggccttcgtcgacgtcatgaagctgctggagtcgtacgacgtgctgcgcacggtggacgggacgaccgaggcgtacgtcgactccgccgaggcgaaggtgctctaccgggtggacaccaccctgctgatgcggctgccggccgctcccgtcggcgcctcccggctcgccgtacctccggatgaggtgcccgcacgattcgaggacctccttgccggtctggtccgggagcgccgctacggcggcgcggccgccgacgggacggccgacgaaccgcacggcgaggcggccgccacggacgcccagcgcaacctgagactgcgccactcggtactccgccgccttttcgacgaccccgtcctccaccgggccgacctcaccgaggacgaactcgcctacgtcgcctcgctcaccggacgccagatcctgcgccggtcggtcgaacaggccggcttcctcctggaggagcggtccgagggtttcctcctcgtcgacccggatggcatcgccaccgacgtccggttccctgacgacagttccaccgcacgggtcgccgcgctgctcctccttgagccgctctgcgccgctccggcggggctgctgcccgagcagctggccgaagccggcgccacacagctgcggcgattcccgagctgggccaaggcctaccagtccgaggacggtccggcacgtctcgccgacgacgccgtgcgcgtcctgctcgacatgggcctggcccgcagggcaggggaccgcgtcgtcgtccggcccgcggcgtaccgctaccggctgacggagactacgagcccggccggcaacaacgacccgaacgacaccaccacttccagcggcgtgcccgcggaaggagacgagcagtga

SEQ ID NO: 50486 - DNA, 4158 bp, Streptomyces albulus CCRC 11814
gtgagcgtgacggagcttccccagcagcgagggccggaggaatctgccgaggcgccgtccgtccggccgccggatgccgcccgcaaccgctggcagcctcaccgcgcgggcattctcaacgtgtggcgctactacgacgagaccttcatcttccatcaagggcgcctgctgctacgcggccagaacggatccggcaagtccaaggcgctggagctgttgctcccgttcctcttcgacgccagtctccgccccaaccgcctctccaccttcggcggttcggaacgcaccatgcactggaacatgctcggtgcgggagcctccggcaagacgcgtgtgggatacgtctggatggagttccgtcgcgtcggtgacgacggcgccgaacggtggttcggctgtggtgcgcgcctgcacgccagcgtgcacaccagcacggcacacgccgagtacttcaccaccgactgccgcatcgcccaccccgacggcgtacagctcgtcaacgagacggggcagccgctgaccaaggccgcgctcaccaacgtcctgcgcgaccggggcgaggtgcacctatcggccaccgactaccgcaccgccgtccggcgcgaactgttcgcgggaatgggcgaacagcgctacgagtcgctgctctccgcactgctccagctgcgccagcccaagctgtccgaacggctcgacccgtccctgctgtccaccctcctgtcacgcgccctgcccccgctcggcgacggagagatcaccgagctcgccgagggcttcgaacgcctggaccggcagcgtgaccacctcgaccggctcgacgccgaggtggcggcggccgagaccgtcgcctcccggcagcgcgcctacgcccgccgggtcctgcgtgccgccgccgccggactcatctccgcgacgaccgacatggacgacctcacccgcgccgcccgccagagcggggacgagctggacaaggcgctcgcggaacgcgcctccacccagaccctgcgcgacgaccaggagcggcgggcacacgccctggacgagaccgtcgaggcattgcgcgagagcgacacctaccgacagggagccgagctcgaccggctgcgccgcgacaccgcggacctggtcgcggccgccgggaaacggcgcgccgccgcccggtccgcgaaggccgcggcggaacgggaccgggagcgcgccgacgagagcgcgggacacgcccgcaccctcgacgagcacgcgcgtgccaccgggaacgaggcgaaccgtgcggcccgggccgcgggcatggagtccgtccaccgggaggtgagcaccctacttgaacaggaaccgcccgcgtcccccgccgacggccgcaggaacggtacggacggcccgcggcccgacggatccggcaccgtcgcccgcacggccgatgacgaggccgcccgcagggcccgccgactggtccggggcgcgatcaccgcccgacgcgagcaggtcgctcgcgtcaccgaggccgtcgaggagcacgaccgcggagtacgcgaccggggcgccgccgaggaccggctggacacggtgcgtacccggctgggcgaggcgatcacccagcgggacacggccgccggagcctgggacgacgccgtcgccacgcaggcggaccggctgctggcctgggccgcaggctgtacggagctgatcgtcgccgaccccggtgaactggcggccagggcggcggtggaagcggacgtgcggggctgggtggacgccgccgcccgaccgcgggggcaggagatcgccacggcgcgcgccctggtcctggccgcgcggaagaagatgtgggaagagcgggacactctcgacgaggaggtacgccggctccgcggcgagacggaactgtcgccgcccgctccccgcacgcgcaccaccgtccgcacggcggcggccggagcgccgctgtggcggcttgtggccttccgcgagggcgtcccggtcgccgtccaggccggggtggaagccgcactggaggccgcaggtctcctcgacgcctgggtcagcgcctccgaggggatcacgctgccggggcacgacacccgggccgaggccgccctggccgcgaccgttacgggccccagcctgctcgacgtgctgcgacccgaggacgatatccccgtacctgcggtcacggtgacccgcctcctcaccggcatcgcgtacggcaccacgctgcccagcggccaccccgcggcgatctctgcggaaggagcctggcgcctcgcccccgccaccggcacctggagcaagccggaacccgctttcatcggtgtcctcgcccagcagcgcgctcgacaacgaagaatcgccgaactgaccggtctcctcgaggagaaggacacggcgctcgccggcctcgaggaccagctgcacgaactcggcgcccgcgccgcccggctggaggcagacctctcggcccggcccgaccatcgagaactcgatgaacgccgacgggacctggaccgggccgaggagaaggtggctgccaacgacgaggtcgtacgcgacgcgaccggccacctcggccggtgtgaacgccgcgtcgcggacgcgctgcgcacgctcagcagcagggcggccgaacacgggctgcccaccgaccgggaccggctgcgggacctcgccgccgccgtcgacaggttccgcgaccatgccgacagctgggtcgacgcctgtctcacggcagccggcgccgctgagcgggaccggcggaccgccgccgacgcggaccggtcccgacgcaccgcggacgagagcgcgggggaggcggccgccgcggagacgaaggccgccggggcggcggcccgcctggaggcggtggagtcgaccgtcggcgaggactaccggatggtccttgcgcgcgtcgacgagacgcgcgccgaactggtccgttgccgggccgaggtgcggcgggcgggcgagctcctcgtggagctggaaggccgcatcggagaactgaacgccacgagcgcccaggacgtcgagcgacgggaacaggccgtcgcggcgcgcgacagcgcggcacaccggttccggcacctgtgccaggccggcttggccgaggacgccggagtcgcaccggaagccgatgccggggacggcaccaaggccacgctggaggccgcccgtggcatcgcggcccagtggcccggcctcccgcacgccccacgcaacctcggtgacgccgccacccgcctctcggaggccgtccacgaagcccgcggacacctcggcgtccgtgccgacctggacctggagcccgacgacgacgtgcagctgttcactgccaccctcgacggtgtacgcgtcggggcggccggcctgctcaccacgctcacccgggagcgcgaccgcagccgcgacgacatcagcatcgccgagcggcggctcttcgaccagatcctcaccggcgacatccgccgccacctcgccgcccgcattcggcgggcaggcacgctcgtcgaggacatgaacgctcacctggagcgggtccgtaccgcctccgacgtcgcggtccagcttgtgtgggacgttcgtccggacctccccgacagcacccgcaccgcccgccagctgctgctcaaggatcccggtcggatcaccgaggccgaccgcgaggcactgcacacgttcttccgtggccgcatcgaggaggccaagggcaacgacacggctgggagctgggaggaacacctcgccgaagtactcgactacaccgcctggcaccgtttcaccgttcgcctcgaccgggcggacggaaacggcccgcagcctttgaccaagagactgcacggcgcgctctccggaggggagaaggccatcgccctgcacctcccgctgttcgccgccgtggccgcccactacgaggacgtccccctggcaccccgccccatcctgctcgacgaggtcttcgtcggcgtcgacaccgtcaatcgcgggcaggttttcgccctgctcaccgccctcgacctggacctcgtgatcacctccgaccacgagtggggcacctaccgcgagctgcccggcatcgctgtccaccagctgctcaccgatggcgacgacgacgccgtcaccagcgtgcgcttcgtctggaacggcacaggcatggaggcgggatga

SEQ ID NO: 50487 - DNA, 1362 bp, Streptomyces albulus CCRC 11814
atgacgactgaggacgcggccaccgccacggcgccggtcccgggcgaaaccaccctacgccgccccgaactcctccccgtctggcagacgctccacgaccgtctctcctccggccgcccgatcacacgcgtacgcctaggaccgctggacgagacccaacgggaagccctcgccgacctcctgggcctggaccgcctgccggatgctcgaccctccgtcgccctggcccgccttgaggaggcggtcaccgagctttccggctgcaccgtacgagaagtcgtagccgccctcgtcggccccctcggcgacagagccggtgaacgccgccgccaggaggacgaacgcgccggtctgtggacgtggctggctggtcacgacacggtacgggcgcagccggcgctcgccgactgggcagcctcatgccgtgcttcgggcctggtcggcggctcggtggaacgtacccgcacgctgctcaccgacgcgcttacggtgatcgccgaattccccggccaggcagaacccttgcccgttttcgccgctcgggtcctgaacggtcacgcgcacgccctcgacgacggcgtacccctctccacgctcgtcctgcgcgccctggcgatcctgtacgacaccgctccgccgcagtccgcagcggaacggcgcgccctctggtcgcgcgcgggcgtcgccgacgacgagctgtcctccacagttctcctcggcggacttcgccccgcaggcgacggcctgctcgctcgcgttgcccgcctttgcaccgaggccggccaggccgccagcctgaccctcgcccacgtcaggagcccgggcgagctcaccctgcccgccacccctgccccactcgtcgtccacgtagtggagaaccccagtatcttggccctggccctccgtcacttcggctccaactgcccgccgcttgtctgcacgtccggctggcccaacagcgcggctatccagctcctgcgcctactcgcgcaccaaggcgctgttctccgttaccacggtgacttcgatggcgaaggcatccgcattgccgcatacgtcctggagaagacaggggcgcacccgtggcgtatgacggcagcagactaccgatctgcggtcgtctgccatacgcacggtcctcaacctgggcgcatcaccggagcgccgtgggacccggagttggccgaagccatggcggagcacgacatcgccgtggtcgaggagctggtagcagatgtgctgttggaggatctcgctgctgcggctcgccaggagcatccctctggctgtgctgtgcgtgacgctcatttgacgctccaagcgaccgaagaggcgctcagaggagccgtggaccggtgctga

SEQ ID NO: 50488 - DNA, 1470 bp, Enterococcus durans ATCC 6056
atgaatgacgaggccatgagtctatttaaatttcttaacacaacaaattcaaaaagataccggatgattctacattttttttatatggagcatcaacaaaccagttacctattaaaaaaaagagacatatgggaatatatgctaaaaaattatcctgaaccttatacagaagatgagcttctgactgatttgaaacgattatgggattatggaaatttaaatgtgattgaagaacaagcaaaaaaacgtacactcgaggagttcaacactaacgactatacttattctattgaatctcgtacagtggacatcgttgaattatctgaagaaattgaacaacggatggacgagctagtgggggaattgaatggaaataaacttcgagatatctatactattttagaacgtatgcctagattgactgaccaagaaaaaatctataagaattatgaggatttaaagcgcgtttttcaagaaaataatgacaatacagtgagctattttggttatttgaacaaagaaatcacaaaaggtgtcttacaatctaaggaatttattgatgtaaagataaattttttactctatctaaaagattatgttttagaattggaaaaacaacgtccaaaaatatggagtacacttaaaaatattagtgaagaaactaagatgaatatagcaaatacccatataaaacatcgtaaagaaattgcttcattctccccagaaaaaataaatgaaaccgacttgaaaaatcaagtatttgaccagtttaacaatattaaagtttggtttagcaataatgaacatagcatgtatagcaaaatatacaaccaagcagaacagatgattcaaatattttcaaatgcggatgtgcaatacttcaacagacataagatgcaacgaaatagacaagcagattttcgaaaagttgcagaatggatgtatcaagaaggtaatgtagatgaagtggccaaaatgtttgtttctatttttggaatgatgaacatgaaacatgtaaaaactagtgaacagtatatttacgatggagataaatttagtagtatctgggagatttccccagaacttattgaattaaaaccgcgaaacaaagtaggaactgttcctcagaacgtccaagcaacaaaagcatattcttctgatcggagaaaactcagaaaattattactagacaatgaaataaaacaaaaagagcgtgtattagactactttgacaacggagttttaaacctcagtgaagatatatttatggatgaggaaactagaaaaattattcgtcagtggatcagtaatggaattactcgtaaagatcatatcacgaatacagtatttggattaaaaatacttgtagaactggacgaagaagctgaagctagaatttattcagaaaatggtgctttaacaatgtctggtgtaacattatctattctagattttgggaaggatgagtga

SEQ ID NO: 50489 - DNA, 1146 bp, Enterococcus durans ATCC 6056; identical to SEQ ID NO: 50407

SEQ ID NO: 50490 - DNA, 4158 bp, Enterococcus durans ATCC 6056; identical to SEQ ID NO: 50408

SEQ ID NO: 50491 - DNA, 1281 bp, Enterococcus durans ATCC 6056
ttgaataaaggtacaattgaatttttttcaaaaaataaaaaaacttgggagagttggttttccttattagccaaacgatatttttcgtatggaacatttggagggtatgtcaactatgaagagttgggagctgttgatttaacaccaataaaagagtttttagggctttctcaagtcgaatttgaggctaaaaataaattttctataaaaaaatttataatgcggtataatcggagcgctcttgctgaaaaggatagtttagaaaatgtaattgagtactttattgaacaaagtttgataacaaaggaaaaattatgtgaacaagagactatcaaacgaaaagaatttgatacactcgttgatatattattgagcgacaaatcacccttactagtagaaagtacacgtaaaaacttatttgaaaaatggaaggatgatcagacagtcattgaatctttagaaaaggctcaatttgcgttgaatcatctaccaaattcatttttacaattaccttatttttcgaatcaactattccacaatgcccacgagttagacacaaatagtttaactggagaaatattcaacagtatgttaagaaaatcatttgaactttcaaaaactacacgaagaaaatactattcaaaagttgaattgagtgaagatgtgtatactcacgtcaaattattacgaggggatcatacaatatatgcttttgttcaaggcatatattcaaacgaccttactatttggaatgcacatgccaaggaaagagacagttggattgtccgtaaagggcatgttttaaacgccaaagatttatatactaaaaataacaaagtctttgtagtagaaaatgatggtgtattccaaatgcttacagaaatgtttccaaatttaccttttttatccacaagtggtcaacctaattacactgttttaaaaatagtagaaaagttagtgattagcgacactatgatttattattctggtgatttagacccaaatgggctctcaatggctcaaaatattttgaaattatatcctctgaatgtgaagttggtaggaatggatgcagaaatatacagtagtaaattaaaaacgaaagaattaactaaaaaccaaataaaattgctggatagtattctggtaccagacttgcaagacttgaagcatagaatatatcttgaacaaaaagctgttgaacaggaagcattaactgaaagctatatacctttgttagaagagtgggattcaaaaataagcacaaccgaaaatgaataa

SEQ ID NO: 50492 - DNA, 1473 bp, Enterococcus saccharolyticus subsp. saccharolyticus ATCC 43076
atggaaaaagtattaactgcgagttatttagttgttggcaatgtagaacggtatcgtcaaattatgcgctttttttataagcgtcatcgacaaatgcaaggaattttatatcgtccagaaattctacaaatgatgcaggaagaattttcttcaaattatggacaattagaattagatcaagatttagagcaattggtaatatgggggaatttacaaaaacaacaagagatgctccgtccaaaaacaattgaggaatatcgtaacaaaaattttcgctatcaaattacggagaatggtatcttaattgaagagatggtctatcaattaattcatcagaaacatacagcaagaggtgcattggatgaaaaggggattcgaacactgttgcgattattagaaaaattaataaatgaacccgaagatattgtggaattatggcaaaaaattcgcgaggaatttcgcaaagtcggggaagatacagcaaactatattggttatattactagtccagaagtagatagtcgaatgaaaacagaacaatttcttgtatacaaagataaatttgtttcttatttgcgtgatttcattagtactctacaaaatttgtatcaccaatttattgttgtagttaaacaatttgatacaattgaacaaggaaaattaattgcaggtatttaccaaaaagagcaagaagtacccatgatggatcagattacttatgaagaggtacaggagcaggttttaggagagattcaagcattaaaaaattggtttattggtactgcagatcgaccgagtgaatacgaaaatttaatgcaacaaacggatcaaatgatcactaaaattacgggtttaatttattactttggtcaagaaattcatcaataccaaagtcgtaacaaagattatttacatttggctagatggttctatcaagcagaaacgcttgaagacgcacaaaaaatgtatgcaggtattttcgggctagaacacagtcgtcattactatgtaaatgaaggaagtaatacaacaagtaatcgtgccgatagttgggcgttacttccaggaaaattgctttttcatggacgaggacgtggcgtaggtcaggaacgacgtgcaaaaagttttaccttaaataaagtggaacaacaaaaacaattagcagaatttaaaaaacaacaaatccaatttcgccaaaaaattgatagctattttcaagaagattatttagatttttctacgattcaatcactcgacaaacaaactcgaacggtatttttaaaatggataagtttggctatttcttcttatatgcctacagcaatacaaaaacaaacagtaattacacaaaaaattacgacagaattagattttgcagttatggtaacagttgatttaacacaagatattacggttagttgtgaagacggtcaattagagatgcctaaagtagagatgaggagagttgtatga

SEQ ID NO: 50493 - DNA, 1113 bp, Enterococcus saccharolyticus subsp. saccharolyticus ATCC 43076
atgaaaccagaagaatggcgaagagcattcaaactactttttgaaaatttttggattgttcgtacagtagattttgatagttataattttttaaggagacatcaaaatgaattacaaaaggaattacggcgacgttttggcatgagtttagtgattcgtcagcagtatattcaattgcttaaacgaccacataaacttgcctcttggatgggtgatattggttttcaatcttcttttgattatgccttattttgttgcgctatggcgtatattgaaggattagaaaacgagacgccttttatgttagatgaattgattcgtgatttagagttattggcgcctgaagaaatttttcttgactggaccaattacaatcaacggaaaagtttggtacgggtaatcaaaaaattacaagaactacatctcattgaaaaaattcaaggagaagaagaaaattttgagcaatcagaaatgaaccaagaagtgttgtttacaacaacgacacaagcacgggcatttttatcgcgggcgccacaatcgtatatagcgtatgaaagttttgagcactactggcaagacttacaaacaagccgcaatctggaaggaaaccaattgttatatcaacgtttaatgatggagccagtcatttatcgcaccgcagaaaatgaagagatttttgtccgcttacgtaattattacttccatacacaagagtatattgaagactacacagatttttattttgaactctatcgtgactatgctgcgtttactctcgaaaaaagggaaggttggtcagaagtattccctagtcgacgggtggttgatgaaatactgattcaattagcaacaattctcagagcagatggagcagattactctgtgtatggagtgatagaattgaccgtagaagattgggaagtattggtcagaaaactgcaacaaagctattcttcttattggtcaaaagaatttaaagagatgtcgttagaacaactatcagtgactttactgaatcgagcaaaatcttggcaattaatagaagagaacgaaacaatttcaattttgccagtctttggtcgtttaattgcggaaatggaggcgaaaatatga

SEQ ID NO: 50494 - DNA, 4080 bp, Enterococcus saccharolyticus subsp. saccharolyticus ATCC 43076
atgagtaaatggctaattaatcgggtaggattgttgaatttttggtattatcaaaatcaaatttttgaatttgccaatgggaaaatgctattgcgtggaacgaatggttcgggaaaatcattgaccatgcaaagtttatttccagtcttatttgatggggatacaagtgcataccgtttggattcgtttggttcacgtgatcgcaaaatggatgaatatttgttaggtgaaaaaaatgtatctgaagaggatgagcgtacaggctatctttttttagaagtcaaaaaagaaaatcgtgaggagtatttaacggtaggaattggcttacacgcacgtcgtggagggaaattaagtaagtggttttttgttgtagaaaataatcaacgaattgggattgatttggaactttatgaagagatacgtaaagatgaattggtgccgtttacaagaataaaattgaaaaatcgtttagaaggaaaaggacgtttgtttgagacgcaacacgcatacaaaaaatttgtgaatgagcgaatttttggttttagtactatggaacaatttgatgaattgattgcgttattaattaatttacgaagccctaaattatctaaagactttcgaccaactgtgatttatggtattttacgagactctttacctaaattaaaagaagaagaagtgctcaccttatcgaaaacgattgaacaattagaaggacaccaagaacgtttagggagtgtcactactgaaatccgtgatttggatcgttttgctaaagtgtatattcgctggcaggaagagtttatcggacaaattgccgaaaagtggttagagattcgtaatacgaaaaatagacgaaccagagacgtacaaacattaagtgaagaaaataagcaagtcatgttggaattgaatcaagaagaagttttgaaaatagaaaataataatcagttaaaagcattagagcagattattgaagaattacaccaacatgatggaattaacttagtcagacggggagaagaattaaaagaaacattagatagtattgcacaagatattcacaaccaaacacaaaataaacaactaaagcaacaacaattaacagattatcaacagacagtggatgcacaacagcaacaacgagaaaaatatgtgaaagagatggaagaatatctagaggataacgagtgtgaaggatatgcgacattacttcatttagaattattggatagcgactataccaaaaaatttcaagcgactctttccgaaaaagagtatgtgtactggcaatcagaaattaccaaacgaaaaaaacattttcaagaattgtctcaacgtattcaaaaatttgaatatttagaaagacaattacgaacagaagagcgagcattaggtgaaatccaacaaaaattggatgaattacaacgtgatatgcgccattggcaacaaacaagacaagatgaaattgaacattggaaacaagctttggagagctggagacaacacgcagcttttccgttatctgagaagcagtctgctacaattagttatcaaatgaatctgttattggaagaagaaatacgtgaagaacaagtgttagcgttagtgacagagagctatcaacaagctttaactgataatcaaacacaactggtggcattagaaagccattgtcaagaagtcgaacaaaaaaaacaaagacttcaacaagaaatcagagaatgggaagcacaaaagatgcctgtcgttccccaatctaaagaccgacaaaaaaatcgtgaccaattgacaggaaaaaactatgtaccattttatcaaagtgtcgattttctaccatctgtttctcaaaatacgaaagatggcttagaaggggcgttgtttgcttcaggattattggacagtttaatttccacagaaggcttgttattggcagatgatagccaaattttgcctaaaccaaaattttttacgacgacactttctgattttttaacagttaatcaagaaattgaccctattttacaaccattggtagccgatattttgcaaagtgttgtggttgacgaagtggatagtgaattgccgagtattttccaagagggtcattattatttagcgaatatcaaagggcaaatgccaatcgactatcaggcttcttatattggtgcgacgagtcaagctcgttaccgacaaacgatgattgcgaacttacaacaagaattagctgtatggagcgaagagagtcatcaattagcaatgcgtgtggaagagaataaaacaatacgtcaggcaattcaacaatcatatcaacaacgtccaaaaggcaccgaagtttatgaagcaattgatcaaaaaaacaaagtattaaatgaatggcagtcagaacaaggcgtatttgagcgtaaacagcaagaagtcaatcgttatatccagcaaatgaggcaagaaaccattgtgctccatgacttagctgcaggagatggactcgctttaaaatcaactgtgtaccaggagatggtcacttatgcagaaaattatagtgcaaatattaaagatgcctatacacaataccaattgttaagtagcaattatcaacatatggattctttgcaaaaaacagtccgtttatatcaaagagaagtagaagaattaattcaaatgattgatgagctaaatgctgcctaccaccgacatgaacgttttgttaaagaaaatttaaaacaacaagaaattgctaatgttgaagctttacaacaacagcttcatactgcgcgtcaagaaaagcatagtcgtgatgaactgcgtaatcgtacagaagataacatcattcttttgagtcaaaaagtagctgaaaatcaagtaaagctaacggcgaatcaagaagaattggcactgattacgtaccaagaacgtctttggcaacaactatttgaaaaagaagtctatcaaatgacaaatgatagcaactatcaaaatcaattggttactttagcgagagaaaaacgtcgaacagtcgatgtgaaacgtttgaaatcaagaagtgataatgtgattaaacaattcagttttattcgtgagcaattaccagattatcaaccgagcttgaacacagtcacttgtgtagatatcccatcagaaaaccaacaattgggagaatttttatattataaccaataccagaaacctgcctttttatctgaaggacaaacacagactgtttttgatttattagaacaattaaaggcacaaaagttaaccttgcaagacttattacaaaaagacgatgaaaaattatttaaacgagtgattttggaatccgttggcaatattttgcgtgttcggatcaatcagtccatggaatggattgaaaaaatgaatcgtttgttgcaagaacaaaaaaattcttcaggattatcattatctattcattggaaaggtcttgcaagtacgtcagaaaaagacttaggaactaaaaaactagtgtcgctattacaaaaaccagtaacacttttatctgaaacggatcgtctggcaatttcacgccatttccaagaaaaagtacaacttgcacaagacatcgcgcaacaaaatgaggaaaatcgtagtacgttattccaagcgattacacaagtcttggattatagagattggtttgagtttgagttgacatataaacgggcaaatgaaggctatcaatcacaaactctttcagacaagaaattcaatcaatttagtgggggagaaaaagctatttcgatgtatttaccactttttgcggcagttcattcacgctattcagatgccaaagagttttgtccaaaaatgattactttggatgaagcatttgctggtattgatgatcgtaatattgcggaattattcaaagcatgtgaacaattaggattcaattatgtgatgaattcgcaagcgctatttggagactatccgactgtttctcaactgatgatttatgaattgttacgtccacaaaatatcaatttagtaacggcaattcgttattattgggatggcaatcagaagcatcttttattagaggagttgataatggatgaataa

SEQ ID NO: 50495 - DNA, 1236 bp, Enterococcus saccharolyticus subsp. saccharolyticus ATCC 43076
atgaataacggagactttttcaataagcccatttttttcttattagctaaagagtgtcatcgaagatattatttaaatggcgatttcggtaaatccattcaaataaagtcattgggcaaagttgatacgctaccgctggcacaatttttgggttatacacctcttgaatggcgtaaaaaaaaacaattatcgattccagagttcgagcaagctctgactgaaagtatcttatcatggacgattgtagattttattacttttttaatcaaagaagaacttattttaaaggcagatgtaaacaaacaaaacgaagataggtacatgcaatttttaaataaattagagactattgatccgcttttttgtagacagcttaccgataaacaacttcagagttggtttaaaaaagaggaaatgtcatgggacagttttaaaatagtcgcggatgcgttgaaaaatcttcccaaaaaatacacacgaatgcctgtgtttgcttttcagcaaacaggaaatcctcacgcttttgatgaaggaacagagacgggtaatttattcttgcaagtattaactacttattcaactgcggatgactctactgagatagcagaaacagaacacaagcatcagttgttaggagagttttatttattaagagacgacatcaaaaattatgttgcagcaagtggtttattgggatacaaggaagataggaacgaaatgtggtatcaagcttgtttgacacagtgctcttggaatattccgttgaaagaaattttacagacaactactattcaaccgtttgtgggtaataaagttttagttgttgaaaattcaggtgtgtactctattttgatagatagatttcccgatgttcctattatttgttctagtggacaatttacctatgctgtttggtgtatgttacgaaaattagtagcaagtaagacacagttatattatgtgggagatatggatccagaaggcctaatcatggcgcaaaagttgttaaagttatttcctgatcatgctcagacaataggcatgtcacttgtaaattttaccgaggcgtgtaccgaggtaaagttgaacgaaagacgctataaaaaattacgtgctattgaagatgtacaactaaaggaaattgcccaatacatgcaacaaacacaaacaattgcaatgcaagaagggtttattgaattgctaatagaagaaatcacagaagtttttgtatcatag

SEQ ID NO: 50496 - DNA, 1470 bp, Enterococcus durans ATCC 6056; identical to SEQ ID NO: 50488

SEQ ID NO: 50497 - DNA, 1146 bp, Enterococcus durans ATCC 6056; identical to SEQ ID NO: 50407

SEQ ID NO: 50498 - DNA, 4158 bp, Enterococcus durans ATCC 6056; identical to SEQ ID NO: 50408

SEQ ID NO: 50499 - DNA, 1281 bp, Enterococcus durans ATCC 6056; identical to SEQ ID NO: 50491

SEQ ID NO: 50500 - DNA, 1473 bp, Enterococcus saccharolyticus subsp. saccharolyticus ATCC 43076; identical to SEQ ID NO: 50492

SEQ ID NO: 50501 - DNA, 1113 bp, Enterococcus saccharolyticus subsp. saccharolyticus ATCC 43076; identical to SEQ ID NO: 50493

SEQ ID NO: 50502 - DNA, 4080 bp, Enterococcus saccharolyticus subsp. saccharolyticus ATCC 43076; identical to SEQ ID NO: 50494

SEQ ID NO: 50503 - DNA, 1236 bp, Enterococcus saccharolyticus subsp. saccharolyticus ATCC 43076; identical to SEQ ID NO: 50495

SEQ ID NO: 50504 - DNA, 1473 bp, Enterococcus cecorum DSM 20682 = ATCC 43198
ttggaaaataaaatattacaagcaagctatttaacagcagagaacgtcgaacgctaccgagcgatgatgcgaattttttatgtgcgccaaaaagagttacgtgggattctttttcgtccagacgtcttagagctgatgcaacaatactatcagccagattattcgatgaaggaattagaacaagatattgagcaattagtatcttgggggaatttaacgaaacaacaaattatggttcaaccgaaaagtattgaagaatatctaaatagcaatttccaatatcacatttctccagagggacagttatttgaggaattagctgaaaaacttatcaatatccaaaatgaagttcgaggtgaattgaatcaaaatgatttcatggaattatatcataagattcaagaattcaatgcgctgagtgatgaaagtcaactacttccatcatggcaaaaagtcattgaatcttttgaaaaaataagtagcaatacaacaaattacatttcttatatcaataataatgcgataaatactcatttgcggctagaaagttttatcatctacaaagatcaatttgtaagatatttacaagattttatcattattgttcaaaacctatattataaattgcttcatgaaattgaaaggatatctcaagaaaaatttgtatcagttgccaaagcgtcctatgaaaagaatcagctacgttcctttggtcaaaatgaagaaacagaagaagaaatgctacaacgaattaaaggacaatatcaggcattgctttactggtttaaagatacggaggaaaaagcgagtacttatcaaaatatgatggaacaaacccagattatgattggtaagattactgattttgcacgatattatggttcggagttaaagcaatatcgttcacgtaaaaaagattatttaaaaatcgctcaatggttcatgcaagaaagtgatttaaatcaagcgcataaaatgtttgctggaatttttggattgcaacatacccgccatttttacgttcctgaaagtttacagtcaacgagtaaccgcgatgatttgcgcgatttagcacctgcagttttatctttagggacaagaggacgcggtgctcgctcagaaagaaaatctaaaccagtaaaatttgatttagagctacaaaaacaacagcaaaaagaataccttgaaaaacaagaagcgcaaaaacaacaagttctacaatattttgatggaaataaactagatttaaaagcggtaaaagttatggataaaaagacccgaggaattattttaaaatggattagtcgtggttattacagttcaaatcatttattacaaacagagtatggttttatggttcgtttgcatattcaaaaagaggattcaattgtattaaaaggcgaagatggtgatttacagatgcctcatattgtcattgaaaggatggaaagaaatgaatcaggaaacttttag

SEQ ID NO: 50505 - DNA, 1122 bp, Enterococcus cecorum DSM 20682 = ATCC 43198
atgaatcaggaaacttttagtacttgcttaaatttactctttgaaaatttttggattataaagactactcaacctgaggaatatcgtctcattaaacgttatcgtaaagagttagatattgaattaagaaaaagatttgggttgagcttgctagtgaggcctcagtttattcaattgtttagacgtccttttcatctacaagaatggatgggcatagaagattttaaagatgtaatggattatgttttgctgatgcatgcgatggcttatattgaagagcaagaaacgaatacctattttttacttaatgagttgattgaatccatagaaagagatttgccagaagattatcatttagaatggactaattatcttcatcgaaaaagtttggttcgcgtgctaaaaaaattaattgatttggcgatattagaagtgattcaaggcgaaatagaattatttgaacaaaacgaagaccgtaacattttgtatacaattactactcagagtcgctatttacttggaaaaacaccaaatgcatttgttaagtatgagggctttgatgatttttggcaagagattcaaaataatcagttagaagattcaaatcaggcactatttactcagctaatgtgcgaacctgttttgtatcgtaatgcagaaaatgagcaagattttatcagattgcgcaattatcagtcggtgtttgcgcgttttgtagaagaaaaaacggattatcaattcgaattaacgaaagatgtagcgatgtttactttggataaaagagatagcagtcgagatatttttccaagccgtaaagtgctagatgaaattttagtccagctacaaactgtattatttgatcaagaacagcaagtggatacttatggggtaggtttatttacaatgagtcaatggcaacttgctgtggaaaagttaaaacaggatttccaatcattttggtctaaggaatataaggaattaaagatttcggaattagctaatcgcttgttagaaagagcgcaagagtttcaaatggtcaaagtaatagatgaggtcatttatttacagccagttttaactagaatggtagcaaaaatggaggataaaagagatgaaaaataa

SEQ ID NO: 50506 - DNA, 4059 bp, Enterococcus cecorum DSM 20682 = ATCC 43198
atgaaaaataaatggcagattaatcgtgtaggattacaaaatttttggtattaccaagatcaagtttttgagttcgctcaaggaaagcttttattgagaggttcaaatggttctggaaaatcagtgactactcaaagtttgttgccaccattattagacggaataaccagagcaaaccgcttagattcatttggcagtacctctagaaaaattgaagactatctattaggggaagaagaagtttcaggaaaagacgaagctactggatatttgtttattgaatacaaaaaaacaaatagcgaagaatattttactagtggcatgggcctcaattttaaacgtggagggcaattgcgaaaatggttcttcgccatagatgatcatagccgcataggtatggatttcaatttatatcaatcttcagttgatggacggatctacttatcacgactgcaactaaagaatttaatcgtggatggtaaacacggtaaattgtttgatgatgcaaaaagttatcaacgttatatcaatgaccgtatctttggctttcaatcgatggaacagtataatgatttgatacaattacttattcgactaagagcacccaaactttctcgagattttaaaccgtctgttatttatgagattttacagtcatcattaccggttttagatagtgataccttattaccgttgacccaaacgattcaaaacatcgatgataatcacgatcaattagatactttgctagatgaaacaaaacaattatcgcgttttttacgttattatcagcagtatcaagaagaattaactgctcaaattgctgaaaattggttagaaaaagatgctattgttcaagacatatctgctaaattaacacaattaaagcaaagtatagatagtctcaatcaagaactcagccaaaaagaaaatcagcttaaagaattaaaaataagacaaccggttctcgaaaatacagtaagtgagctaaaaaatcatgaaggtttccaattgattcaacgcgctaaagatttacaagatagctttaataaggttcgtaaaagattagaagaaatagaaaatcaattacatcaaaagcttgaaaagaagcaagaaactagcaaaaaaattgatgaattgcagacaactatgtatcaaacagaaaaagagttaaatgattatctagaaagcgccagtcaatatattgaagatctatcattagagtatatccatcaaaatatttgtgctaaactctttgaaaaattaactcgagaagatgaacaatacttaatgaaagaagttactaaaaaagaacaattcattcaaaaaatcattcaacaaatgagaaatttaagtaagttagcgattgaagaaaaggaaaaaagtaacgaattagctgaactacaaaaaatattggatgaattaaaacgtgatcaaagtcaatggcagcaaggatttgttgatgaagtacagaagtggaaagaacaaataaatgcgtggcgtgctaaaagtccagttatgattgcagatgaagttatccaacaagtgtattatcaattagatcaaattcaagtaacggatgaattcgtttctgaagtatttctcttgcctctaaaaactgtatttgaacaagctaatgaacaaatattgcatcatattcaatcaaccaatgtaataatcgagcaaaaggagagtaagttacgaggactacaagtagaaatcgaaacttggaaaaatgaacgtgatccaattcctgctcgttcattgatccgccaagagaatagaaatcatctaaatgaaagtcaaaagcaatatgccttctttgaattaatcgactttaaatcagacattactgatgagcaaaaaaatatcttagagggcacgttgtatagttcagggctgttagatgcactggttgcaaaagaaaaattagatttagcagatgatattcagattgtggcaaatccgcagttactgtgttcgacattagcggattattgtgaagttgccgcagatacacctggagaattagttgaacttgtagcagaatttttacaaaccattttagttgacgagggtaaagagggatgtccgtcgatatatttagatggtcattttgagttagcaggtatttatgggaagatggttcctaattatcaagcgagttttattggaaaattgagtcgcgaaagatatcgacaacaaaaaattgcagaattaacagaagaggttaatcaattagcaaaagaaatatcgcttcttcaacagcaattagagacatatcgtcttgagcaatcacgtcaaagagaatatttatccctgattcccgatacagaacaaattagagaagcaatgaaacaatatcgatcagttagcgaaaaaatcaacgtacgtatagaagaaattcaacggaaaaatcagatttatcttgcattaaaacagaaaatagctgatgtcaatcgagaaatcatgctacagacgcaaaaagaaagaatcacgccaaagctagaaagttacgaagaagccttggtatttttgaaaaactatcaggcagatatgcaagcaagctttagacaatatgatcaactatatgtccaaaagaagcatgaaaaggaactatctcagcaattagcggatattcatcaagatatcgctattatcgagcaaagtaatcaacagtatctacaggaagaaaataccttacagcaacagataactgaaaatacagcccaacaagaattacaaaacatttcagaaataaaacaacgaattaatgaaaaagaagaggaattaactgaagtaaaagataaaattgaagaaacacgaaatcaaaaagaacaattaaatatgcaattggctttagaaaaatctcagtatttattacagcaagaaaattatgaaaaaaatgcaccagtaaatattctatggaaaaagttaattcaaacacatttacaaattgaagatacagaaagattgcaacgtgaggcgcaaaaaatagctcgtccaaaagattttgatttactttttaaaaatgaaagaaagttagaagatgaatttagatacttagctgataatgtgcgcgaatatcagccaaaaatgagtcgtgaagtggatgtttctactgatttaacacaagaagatgattcgatacaaacttttaaaaactattctcagagattaatcgccactttcagattggaccaacaaagtctaggaccaaacgagcttttatcgtttttggaaaatcagatagctattgtcaaaaatactttaaaggctgatgatgaaaaactatttaaacaaattatatttgactctgttggtaaagtcctccgcgcattaattgagcgggcatttatttgggttgaagagattgatcaattgctaaagagccgtaaaaattctcaaggactaaagctttctttacgtttgaaaaatataggtgctcaaaacgaacacgaattgggtactaaagatttaattgctttattaagaaaagatccaattacattaaatgaatcagatagtagacttttagttgaacactttcaatcaaaaattcaagatgctaaagaattgattgcagatgagagcacagagggtaatttatcgagtgctatcgctgaagtattggattatcgaaaatggtttacttttgaattgcaatttagacgtgcaaatgaaaattatccttggcgtccattatccgataaccaatttaatatttttagtggtggagagaaggctatttccatgtatttaccactgtttgcggccgtatatgctcggtacgaagaggctagtgattacgctccgtatattattacgttggatgaagcatttgctggtgtggatgagctaaatattgaagatttatttgctacttgcgaggagttaggcttcaattatatctttaactctcaagctttatatggagaatatgcaagtgttagtgctttagcgacttatgaattaattcgtccgcaaaatgcgcctgtcgtatcaaccattaaatatttatggaatgggcatcaaaagcaggtgagtccaattgagtaa

SEQ ID NO: 50507 - DNA, 1242 bp, Enterococcus cecorum DSM 20682 = ATCC 43198
ttgagtaaattgcaagctaaaaaatattttcaagaacctatctttgtgtggcttgctcaacgattacgaaaaaattattatcataaaaaggcatttggttcgcgagttaaactaccgaatgatgtggatttattaccgctatatcgttttttaggactaggcagtgttcaaagtcgtagttatcagcagctttctattaagcaatttgaagctgcattacaacaaagtaaatttgagctttccttatctgaatatgtgtatctttttgatgacactgaattaatagataaggaaactgaaaaacaaaattatgaagcaagctttcaggaattcttacaaaaactaaaaccattttcgttggattttgaacatcttttaagtaaaaagcagttacaagaatggtttgaaaaagaaaatttatcagcatttcaacaagtggatattgcttttagtcaattaccacaagattttacgagactgcctttttttgcttatcaaattactggcaatccacatgcttttgataaatcacaaccagtgggagagttattcttacaaattttaagcactaaatatttagaaaatatccgtcaagattctgattttttagcccaagcagagattgaacaattactttaccaacaagtgtatttgttgaaagatgatattttaaactttgttgcgctacatcggatttcaggatatgttaatcatcaagaagtgcctgtttggcggtcaattgcgaactcagatatgtcttggaatgcatcagttagagaattgttgaaagttgatgaattaagaccagtaaattatccttttgtgattctagttgagaattcaggcgtgtattctctattacttgagcgtttccctgatttaccgcttttatgtaccagtggacagatgaaatttgccgtttgggttgcattgcgaaaattgacgcaacagcaaaaggttcagctgtattatgcaggagatatggatccagaaggtttgttaatggcagataagttatcgaaagcatttttaaaacgaatctcttttttggcgatggataaggaagcctttgaacagggaaaagagagaaagatatacgagatgaatcgtctaaaaaagatgaatcaaattgaaaatgaaggattaaagcaactgattccattgattcagcaaaatcaggtttgctatcaagaaggatgcatcgattatttgattcagcaaattgaacaaatactatcttaa

SEQ ID NO: 50508 - DNA, 1473 bp, Enterococcus faecalis 06-MB-DW-09
atgccgcaattttttgatgatccatctgattacaaaaaaatgaccgaggtaacgtatttgtcagcagatacaaatcacatacgctatcgaatgattatgcgttatttctttgtgcaacatgaacgaatgcgtgattttatttatccagaagatatttttgcttttatgcacaagcaatcaattctgaattatacagaagaacaccttacccaagacttgaaacagctagtcaagtggaaaaatatcgctgagagttatgaagtgaaaaatccacgtacgatcgaagaatttaatcgacgaaattcacgctaccaaattttacctatcagtgtggaaattgagcggatgatgatgagactggaaaatcaaggggaacggtttaaaggctcgctggatgtccgttcttttgaaaagctccaccatgtcttagcagaattcatcgaagctgagcttgatgaacagcagttgatggatacctggcaagaattagtcagtcgttttacaacggtcaaagaagcaacttctgactatatggcctatcttagttcagaagatgccgattttacttcagaaagaggcaagctgttagaattcaaagaaaagtttatccgctatttgcgagattttattcttggctcacatcaaatggctgccaaaatccgtgaattgcttactcagaaaaatcaggttcataaacggttgattcagttaagtacattaccagaatttagtcctcgtcttgaagcggacatacaaacgccagaacaaaagctatttgaaacgcaggaactctttcagagcattcatgattggttcatagatcgccccatccaattatcggaatattctctattaaatcaacggaccgatgagatgattcgaaaaatcactcgtgcgattcgtgatttgggggaagagcgggcgcagcgctctagtcggaaaaaagattacttgcatatggcgaaatggttccatgagtgctcaaccctctcagaggcgcatcaactatcagcaaccgtttttggcgttgaaaacagtcgacattattggacacaagaagttgacagcagtgatatttatagtgatatttggcaattagaacctagtgtttattacctcaaagggcgtgtgcgggaatacaaagaatcgaccaaaagtacgtcatttaccatgaaacaatcagaaaaagacgcattgacccaggaatatcaggcacagcaagaaaaaatgcgagcgctcttaaagacgtacttgattgatggagaaattcagccaagcaagcattccctcattccccaagagatacggcgaacgtttttgaagtggtttgcccaagggatcctgagcaacggtgggttatttacgaatgaatttggcgaacgtttagaattgaaacgtttagatggttctttcgatttgatttcgaatgatggcagattgagaatagaagatttcaaatttgttatgaagtaa

SEQ ID NO: 50509 - DNA, 1149 bp, Enterococcus faecalis 06-MB-DW-09
atggaaaaaaaagaacaaatcaaagaagcgttgaaattacttttcaatcactactggatcattcgtgaccaacagatggaagagtttgctttgttgaagggagtagaatcggagctccttcaactagtcaaggaaagatttggctacgccctacggttcacacctgactatattaaactagagaagattcctgtagaaccaaaggattggatgggaatccaagcgtttcaatctccggaagactatgctttgttttgctgtctattagcttttttggaggaacaaagccgctcacctttctttttattaagtcatatttgtgaggaattactacggctttatccgatcaaagatgcgatcaactggcaaaactttactcatcggaaatcgttggttcgcgtgttaaaaaaagccaaagaattccatctgatcgaggaacgagatggtatgatcgagcaatttggacaagacgaatctgccgaggttttgtaccacgcaacgggttatggcagaacatttatgcgtccttatcctgaagatatcgccagctttgctgatagcacccaactcaaagctatcgatcagcaaatctttcaacaagaaaatgcccagcggtatttagcatatcgccgattatttttagagccaacggtgttgcgatccgacattgacgagtcgttagtgtattatttacggaatcaaagaaaggcaattaatgatttcgcagaaaattatacggatatgacctttgaagtttacaaagatgtatttcaagtaacagctgataatagtaatcagcctcatgtttttcctggtacaaaagcattagatgatattttattgcaacttggtacaatagtaagaacaaaatactatgttccagaaagtagtgggatcatttctctcagttattctcagtggctgcaactagtggaagaactttttcaagcctaccacaatggttggtctaaagaataccgagagacaaagccgatcgacgtgttagctcaagagctcctttcttacggtagtcagtggatgctcttacgggagcaggcagatgaagtatggctgttgcctcagttggcgcgcttttcaggagagtataacgatgattttaacaaaaaggagcagttagatgaaaaatga

SEQ ID NO: 50510 - DNA, 4092 bp, Enterococcus faecalis 06-MB-DW-09
atgaaaaatgagcgttggcatctacaccgtgcctacataagtaattattggtatttcgatgaagcaagttttgagttttctaaagggaaactgcttttacggggagccaacggttcggggaaatcaatcactaccgctagtttattgccactactactggatggaaaaattgccccttcacgtttagatccatttggctctgcttcacgaaaaatagaggagtatcttttaggtgaaaaagatctttctacccacaatgatcgaacaggttatttagcgatggaatatcgttatggcgatcaagaggtttattttacaagtggcatgggcattcgtgccagaagaggtaagtcattggatcgctggtattttatactgacagataatagccgtattgggcttgattttcctttatggcatgaattaggtagcaaccagcggcggccattttcagaaagagaactgattggacgactaaataatagaggtcgaatcacaaagaagcaaaaggaatatgcggagtggatcaataaatatttgtttgcttttgacagtatggaaaccttcaatcaaatgattcaactacagttggatattcgtaaaccaaaactatcgaaagactttgcgccaacagaaatttatcgaatcttagaagaagcattaccacaactaaaagatgatgatttgcatgaagtgtcggatagtttagaaaacattgaaacgtcaaagaatcagctgcaacaaaatgaaaaagacctggttgatttagaggcattgaaacatgcttttgatgactaccatttgcaggtgcaagggaaatatgcgacacataccttgcgtacgaagaaaaaaaccgctgagtttcaacaattactgcatgaaaaaatggaaatgtttgagcaagcacaaaagctattagaacagtctatcgacaagcgcgtaaccctagacagtgagcaagatcttctaaaagagaaaattactgctcttgagcaccatgatctttttcgactggaaaaagaacaattacaagcgaagcagcaagaaaagcagctaaacgttcgcttagagaaagtaacgagcaacatgctgaaaacgagaaacagccagcaacaataccaacaagattgtaacgagttggaacgccagttggatcagaagaatcaagagcaacaaggcttcttgctagagatggaagaccatgttgaaggtactggatttaagcaacatacgttacttgtagaagatttcaaccgattaggctatgagatgaacctgcagtattggagaagtgcattaggcaactatcaaaaagcagtgggtcagctgcttgatgaagtctatcgtctccagcaaacgaagcagcaaaaagccgctaccaaagagtcgatcgatcaattggcaaaagagcatgagcggctttcttttgagttgcatcattatgaagaaatgtttcagtctgaattgaccaaaacagaagttgccttagcccagtggcaaaagatactacctttttctttttccaatcaagaatggcagcagatgctgcaacgactaaacaccttgttttcccaaacggcttcatacgagcaagtcaaagagccattgatccacgcttatcaacaatatcaattagggcaaaaagagattattcaggaaaaacgcttggaattaaaccaattagacaaaatcgggaagcaattatacgatgacttgagcacttggcgtcaaaagaaattaccagaaccgcaacgtcgtgtggaacagacggctgatcgcctgcgactgcatgcagatgacaaaaaagttgtttctttttatgaagtcatcgactttacagaagatatcacacaagaccaacgaaaccggctagaagcagcattgtataatagtgggatcttagacgcattagtctgtgagaagccattgcctttagaagatgaacagcaactggtccccaatccccaattgatggcacatacattagcagactacctagagccagcagttggtgaaagtggtatctcagaaggatacgttcttgatttactgcaatcgattgtcgtggagtcggaggatccgacagtggcagccgttgatctgacagggacatatcatttagggatctatcgaggaaaagccagcaataggcagaaaagccagtttatcggcaaagaaagccaaaaacaatttctagaagccaaaattgccgagattgaaggtcagatcctgcgaaacgaagcagcaaaagaagaaaagcaaaagaaaatcgatgccgttcaaaaaaagattacaaacacccaacggctctttgagcaaatgcctgattgcaaagaattagaagcaattcagcaagaaataaataatcgacaaaaaatggtcatagaaaatcaacaacgacagctcttccaagaacaacagtatcttcaattccaagaacaacaaaaagtactgcaaattcagatccgtcaattgcaagaaacacatgacttgatcgttagtgaggacataaccgcattagaaaaagtcaaaaaacaactggctgactatcaaggggcctttgaagatttttacgatgcatttaccggtggcaagtctttgccaaatcaaattaggcaatacaaagagtttttagcaacgacccgtgagcgttacgagcaagaggcagaagaacagcaagcgttggatcgacaagttgctcacttacaaaagaaaattgtaagtatagaagagcaacttgctcttgaaggctttgaagagatccgccagcaaataaaagccgccgtgaaaaagcaagaagagaatcagcaacaattgcatgaactaaatacaacaatcatcccacaaacaacgtcacgaaaagatgctctggagaaagaagttagagaaaataaagagcgaagtgaattctatgagctgttgtatcaaacgtggttgaacgttgcagaaagagaacttttacgctatcaacaagaacatctcccgttgaatgaggtggcagaacattatcaaggagaagaaacgttgaagaaggctgccacgatgctaaagcgagtgcaaagagaaaagatggttccgttaggacaatatagtccagaacttgttgaaagtgcaatgacgtctattgaaacccttgaaacgcgagaatggtccgacacattgataagtgaagtgcagctgctgcaagcagatagccagaacgaggtcttatacttactggatgaacaaaaccatcgaacgtcagtgatggatatctgccaacaagttcaagcaaagatcgaggaattgaaattcttcatcgatgcagaagatcacaagctttttgaggaaatcttactgaattccattggcaatagcatcaaggggttgatttctaagaccgaacaatgggtaaagaaaatgaatgccgtcttgaaaaataccaaggatgagaaccgtttgcgcctttctattcgctgggtaccgaaaacttctgatcgtgaaggcgaaatgcatacaactgatttggtccgaattttacgtcagccagcagcgatgttaacaacggaagacttggagcgaatgattcgccattttcgagaaaaaatcaattatgccaagacaatccaaggaaatagagaagaaggtgaaatccaaacccttcatgaggtgatgaaagaggttttagattatcgtcattggttcaaatttattttgaggtatcaaaaagacaacgaacctgaacgagagttaacgaatccacggttttataaactaagcggaggagaaaaagcagttgcgatgtatttgccattattcactgcgatgtatgctcgctttgaagatgccaaagcggatgcaccacgaatggtttgtttggatgaagcctttgctggcgttgatgaactaaatatcgctgatctatttggttcattagaagatctaggctttgattatctactgaactcccaagctttatggggcgattacgatacggtatcttctctaaatatctatcagttattgagaaaagcgaacagtaccactgttggcttgattcaaagtcattggaaaggcaagaaagagccgcttggtgagaaaaatgaagactga

SEQ ID NO: 50511 - DNA, 1248 bp, Enterococcus faecalis 06-MB-DW-09
atgaagactgaattacgtaaattttttgccgcttatgaaagttatcataaggtgatggaaatggcagcagcgaaatattatcgctatggacacttcactgggacaatccccttaaccacttttacagaaaaggaacaggtagaaatcgctgactttttaggtgttgcctcttctgagttgctacagaaaaagaaattaactttaaaagcttggcaaaaggcgtatgaagaaagtcgatttcaccaaattgcctttgaagaagctgtggaactggtgaccggccaaaaactgagaacaaaaggttttgagcaagcgcaaaaagaagctgaaagaaagcagtatgttgactatttttcagaatgtgaagggcttgaatttgtcagccccaaaaggcagctggattttcttcgtcaacaggtcacacgaacggaacttgatttattggggcggttgatacaagcattgcccaaagaattaacttatttacccgtctacgcacaacaacagctgggaaatccccatggattagatcggcaaatgcggattggcaaacttttctttacattactaatagatttatgtcaattgaccagagaaacaaatgaatcagcgacagaataccgtagccgtatttatcagcagcagaacctcgttgtcgatgacctaatgaattttgtgacgatcagtaatcttgtggcgaaaacgcaggaaggaaccgaccatcctatgtggcaaggagcatgtgagtatcaagtgatttggaatgtaccgatcaaagccttgctagatattgaaaccgtgaggccaaggcaggggaatacggtgtttatttttgaaaattcctctctctattccgcattgctgacagcctttcctgtgttgccatctatctgtcatcaagggcaatttcgcttagcgatgtggcgtatactagcgctttttccagaaacgactcactttttttatgccagtgatatggacccagaaggactccaaatggcggataaaatcaagcaacgttaccaagaaagagtgcagtttttatttatggatcaacaatcctatctgtcatatccatcggaaaaagatatttccaacagcttacctaagttgacgtcattgatcgatcctaatttaaaggcaatcgctgaatcaatgaaggaaaagaaagtagcgagttatcaagaaagtttatatgagaaatatgtagactttctaagcaaatgggaaaaatcagagaatatctga

SEQ ID NO: 50512 - DNA, 1491 bp, Geobacillus kaustophilus GBlys; identical to SEQ ID NO: 50217

SEQ ID NO: 50513 - DNA, 1197 bp, Geobacillus kaustophilus GBlys
atggaaacggcgtttgacgacaaggcgaaagaggcgctcgccgcgctgttcgaacaattttggatcattcgcgacaaagagccggatttgtatcagctcgtccgtgagcgcgaacatgtgttgaaaaagtatgtggaagagaagtttggctatcggctcatcgttcaccgctattttgccaagctcgagaaaattcccgccgaaccggagccgtggatgggcatcgagtcgtttcaagagccgcttgactatgcgttgttttgctgtttgatggcgtatttggaaggaaaagcagtggaagaaaagtttttgctttctgacgtatgtgaagaaatccgcgccatgtacccgggtgatctaccggtcgattggacgaactattcgcatcggcgcgcgctcatccgcgtgttgaaaacggcggaacaaatcggactcgtccgccggatggatggggagattgaggcgttcgcccagcatgtggaggaagaggcgttgtacgaagtgccagtgttggctcgttattttatgcgcacgtatccgaaagatttgttgcaatatgaatcgatcgacgaattgctcgccgaggagtggaaagcatcaccgcaagattatcggcgccatcgcctgtatcgaaagctgtttttatccccggcggtgcaccggacggaaggggacgagcaagacttttactacttgcgcaacttccgccatcggctgcgggatgatatcgaagcgcatacgccgtttcggtatgaattgtacaaaaacgccgccatgttgacgcttcccgaacggcaggcgccgtacaccgtatttcctgatcagaaaggaacgtcggaggtcatccttcattttgccgccttggtgcgcgagcggcttggggaatatccgccggatgaatacggccgcatacgattgacgcctgaacaattttccgcctggcttgccgattgccggcgccgctacggggctgggtgggggaaaacgtaccgcgacatgtcggctgccgagcttgtccgcgaagtgcttgcggcgctcaacgaatggcgcatggccgatgtggagcacgacaccggaatgatcgtcctttatcccctcctcgggcggatgtcgggacggtatccggatgattttgacgcgaaagagggaggagaacatggcgaatccatgggtgcttcatcgtgcggggctgattaa

SEQ ID NO: 50514 - DNA, 4122 bp, Geobacillus kaustophilus GBlys
atggcgaatccatgggtgcttcatcgtgcggggctgattaatttttggtattacgacgagcagtattttcatttcgctgacggtaagctgctcttgcggggaagcaacggggcgggcaagtcggtgacgatgcaaagcttgatcccggtgcttttagacggcaagaagacgcccgatcgcctcgatccgttcggttcacgggcgcggcgcatggaagactacttgcttggggaaaaagatgtcgtcaatcgcgatgagcggaccgggtatttgtttttggaatataaacggaaagaatccgaccaatacgtcacaacgggcatcggcctgcgcgcgaagcggcaaaaaagcctcgatttctgggggtttgtcctctttgacaaccgccgcatcggctatgaccttcagttgtataaacaagaaaaaacaggtgaaaaaatcccgctgaccaagcgggagctggccacagcgctcggcgcgggcgggacggtcgtcgagacgcaaaaagactatatggagctcgtcaataagcatgtgtttcgctttgaatcgcttgaggcgtttcaagaattgatcgagctgctcattcaactgcgcagcccgaagctgtccaaagactttaagccgaccgtgatttatgaaattttggaaagctcgctgcctccgttgaccgacgacgagctccgccatttatcggacacgatcgaaaacatggaccaggcgaagcagcagcttgagcagctcgaacgcgacgagcgggcgttgaagcgtctttgcgatcaataccgcctttacaacgaatatatgatcgccgaaaaggcgacagaatacgtaaaagcggtcaagcaagctgaacagctcgctgctgcacaacaccgccttcacgatgaagaagagcaggcgcgaaagacgcttgatgagcttgatgagtccatcacccgcctccgccgtgaagaagacgtgctgcgttcacgtgaaatcgacttggctggccacgaagtgttccagcaagcggagaagtatgaacagttgaaatcggagagggagcgtctgcaggagcggtgggagcggcacgagcagacgatcgcggaaaaagaacggctggaacgccaacatcgccgccgcctcgatgaatcggaagcgcggctggatgaccttgaacggaaacttgaagacgagttggcgcagctgcgagcggatgcggaagaaggagccttttctttgcatgaaacgaacgaagacgattttcaccgccatcgccaaaagcaacaagagttttcgtttgccgcttggaaacaggaagctgaccgccatatcgagcagctcgaggagttggcgcgcctttggcgcaggcatgacgatgtgaaacgacgctatgaagaagcgagcaccgaagcgggcgagcggcggcgggaaatggacgaatggcgtcatcagcaacagaaatgggaagagctgctcgagcaggagaaagagcggtttgaacaagccgtgcttgcctgggtcgagcaaggaggaatcgacgtttccgaagcggacattcaggcgtttttgcgacaaatgggcgccctctatgagctgtattcgctcgatgatctgaagcgcccgttcgttcaagcgtattacgatgccgtcggtaagaaaaaggatgagaaatggcggctcgaacatgacatccgtctgttggaagagaaacgggcagaacgtgaggccgaactgcgtcaatggcgggaacaacgcgaccctgaacccgaacgggatgaacaaacgacagccgcccgcttggcattggaacgggaagggattccgtttgtcccgttttatgccgcggtcgaatttgtcgacgatgtgcctgacgatgtgcgcgagcggatcgaatcggcgctttcgcacgctgggttgcttgacgccctcattgcggcccgcgatgtcgacgtcgactgcgaccgtgtgctcatcccgaaaccggttcatatggtgcatacgttggccgattatttgcgcccagatgcggatgcccctgtgtcggcggagcggattgacgaagtgctccgaagcatcgtgatcaccgatgcggaacaagaaggcggcatgacgatcgacgaaacaggacgctattcgctcggccttgtccgtggccatgcgccgcggagagcgcgggcgatgttcatcggccgtgcggcgcgggagcggtggcggcttgagaacatcgcggcgctggaagccgagatcgccgctgtgggacaagagatcgaccgtctacgtcgtgagcatcaggcggtgggagcggccatccaagcgcttgccgactggtttgcgtccttcccatcggaccgcgatgtgcgcaccgcgtttgaggaagggcaagaagcccgccgccaagccgaaagcaaagaacgggaatggaagcggcaagaagaaaaagccgccctcctcgcgcgcgaatggaaacaaatcaaacaacagctccatgacgagtcggccgagcttgatttggcttttaccttggacggctgcgaacaagcccagctcgccatgaaatcgtacgtccgccatttgcacgaactcgaagtgctttaccgcgaaacgcgccataccgaggccatgatcgcccaacagcgcgagcggctcgcggcgctggaaacggagatcgacgaagcgaaaggcgaacgaaatcggattcgggatgaaaaagagcggatctccttggagatcgttgagatggaacggacgctcgcccaaatgggagcggatgacattcgcgcggaaatcgcccgcatccaagaacgattggcgtttttgcgccaagaaattccgcgccttgtcaacgaacgggcgcgcacggaacagcgcctcatgcgcttagtcgaagagcgggaaaaaggagcgcagcgggaagagttcgcctgccagctggccgccatgtgggagcggtcgtttgccgatgaagcggcgcttgggctcgtggatcttgatcgttcacgttcgcttttggagcaggccagagaagcgaaacaacggtatgaagcagtgttaaaagagacgcgttcctcgcttttggcgcggctgaacaccgtcttcttccaagagtcgtccaacttgaccgaataccgggcgacgttcgagcggctggcggaacaaaaggagtccgaatggatcgccgccgccccagacgacgagatggcgatgaaagcggccgattggcgggaaaaacaagaacggcacgtcatttatctcgactacaaaggccagcgtgccacgccgtttgccgtgctcgccgaggtggagcgcgacatcgccttgcagcacgagtatatgaaagaacaagaccgcgagctgtatgaggacgtcatcttaaaatcagtcggccgcattttgcgcagccgcattcagcgcgccgaacggtgggtgaatgatatgaataaactgatgggcggcctcgacacatcatcagggcttgtgctgtccattcaatggaagccgaaaacggcggagacggaagcggagctcgatacgaaagaattggtgcgcctgttgcggctcgatccgcggctgcttagagaggaagatttacagcgagtgacgaaccatttccgctcgaaaatcgcccgcgcccgcgaattgcttgaagagcgcggccaaggcagcacgctccatcaaatcattaaagaagtgctcgactatcggaaatggttttccttcactttgtactatgaaaaaacaaacgagccgaaacgcgagctgacgaaccaccgcttttaccaattcagcggtggggaaaaggcgatggcgatgtacattccgcttttcgccgcggcgtattcgcgctaccaagaagcgggcgatgatgccccgtacatcatttcgctcgacgaggcgttcgccggcgtcgatgaaaacaacatccgcaatctgttcggccttgtcgaacagcttggctttaactatatcatgaactcgcaggcgctttggggcgactacgacaccgtgcccgcgttgtccatttgcgaactcgtccgcccgcgcaatgcgtcgtttgtgaccgtcattcattaccgttggaacggccgcgtcaaacagctcatggtcaatgataaagaatgggagacgatcgagacgtga

SEQ ID NO: 50515 - DNA, 1221 bp, Geobacillus kaustophilus GBlys
gtgagcacggccaaggaggcggctgcctttttccgctctgaaccgggcttccgccgtctgtttatcgagatgaagcacaagtacgagtcgctcggccgcgtcggcggcgcggtgtctttagaggcgttcaccgatgaagagcgggaggcggtggccgcctttttcggcaaagacgtctcccgcgtctcccttatcgcgtttgaaaaacagctcggacagacgaggtttgcgggcgttgggcttgtcgagctgcttgaacagtacttcggcgccccgcttgtctcaaacaaagaacggcgccaggcggaggaagaggaacgggatcgtttttttgcgcgtctgaccgaggagcatcattgggttgagtcggtccgccctcagcgcttcgtccaaacggcgtacgaaaccgaccgccgcagcctggaggaggccatccgccttgtcagcgcggctctcggccgcctcccgctcccgtcatacatgcgcctcccgctctttgcccagcaagtggcgggcgacccgcatgcgttcgatttgtccacgctaccggggagattgttgctttcggcgttgcaagcgaccgtgcccggggattgggacatggcatctgtagagagcgtcaacgagttgctccagtccgtcggcttgctccgtgaggatatcctgaactttgtcacatgcgccaacattcttgctgaaaccaaggacggaccgcatcctgttttctccgctgcctgggaggcgaacacggcgctgaacatgccgcttagagatgtgctgtcgcttgtccgcgcccgccctgcccatggggggacggtgtacattgtcgaaaacgcgggcgtcttttcgacgctgcttgacacccgcgccccgcttgtcagcacgaacgggcaaatgaacttggcgacgatgaagctgctcgatcttctcgcctcttcaggcgccaagctgtattattccggcgacttcgatccggaaggattggccatggcagagcggctgcttgaacggtatggacaggccgtcacgctctggcgcttttccttggacgattatgcggccgccaacccagtcgttgaactcacacccgagcgcctcgccaaactcgcatccgtcacatcggaaccattgcggccggtgaaagaagccatcgggcgaaagaaaaaagccgggtatcaagaggcgatcattgggaggttgacaggggatatcaacgggtag

SEQ ID NO: 50516 - DNA, 1491 bp, Geobacillus sp. WSUCF1
atggacgccacatggctcaagcccattgtcgaaaccaaatatttatcgacggaaaacgcgcaccgctaccgggcgattttgcgctatttctacatccagcacgagcggatgcgccaatttttgtttccggaagaagtgtacgcctttttaaagcagcacgaggagtttgcggattacacggaagatgacttgcagcaagacctcgaccagctcgtcaaatggaacaacttgatcgcccgccaagagacgtcccatgtccggacgattgaagagtttaagaaaaagcggtttcgctaccaatgcagcccgtacacggtggagatcgagcggatgatccgcacccttgagcagctcggagattcgttcggaggatccctcgagaaaacacggttcgaccgtttgtatgcatctctttcccgcatggaggcgatcatcgcttctgattttcaagaacaagcggatgaaatgcatcaagtatgggaagagacgttcgattattttaagaaaatcatccaaaattccgccgactatatcgcttatttgcacagtgaaaacttggaagagcggatgacgtccgagtcgtttctcgtctataaagagcagtttacggcgtacttgcgcgattttatcgtcgccttgcaaaaaacgtcgatgcagattgaacaattgcttgaagatctgccggaagaaggggttcggcagttcatcgagcgtgtcgtcgactatgagcggtcgatcccgcgctttgccgatgcgctgccgccgcgcgctgtgcagattgaagaaaaatgggagacgtggcgcagcctgtgcgaatggtttttaggccgcaacgggcgcgagagcgagctttcgtttttgcaataccagacgaatgaggcgattcgccgcctgacgcgcgtcgtgcagcggcttggcgagcggcatcatcattttcgcagccgcaaaggcgactacttgcatttggcccgttggttttcccgccttgaatcgattgaagaggcgcactgcctgtcagcggtcgtattcggctgcttccatacgaaacatctcgtcgctgacacggaagcaaccgacaacatataccgcgacgtatgggacgagccgccagccgagtgggtgacgaagccgcgcgtccgccattacggggaaaagaaaaaaccgcaggcaatagaagacaaagaacgggagaaagaagaagcccgccttcgctatttggaagaaaaagcgcgcgaggaagcggcgctcagacagcttgtgaccgacgggaaaatcgtgcttgccgaccttcccgaggtgaccccatacgtacggaaaacgctgctcggctggatcgccaaagcgatggggcgcgaggggcaagcaatgaagacggaaaacgggtgggtggtcaaagtggtgaacaaagaggggacgatttgccttcgcgcagaagatggggaactcgtgatgccgaactacgaaattcatgtgctttcgggaggtgagtga

SEQ ID NO: 50517 - DNA, 1203 bp, Geobacillus sp. WSUCF1
gtgaggatggaaacggcgtttgacgacaaggcgaaagaagcgctcgccgcgctgtttgagcagttttggatcattcgcgaccaagagccggatttgtaccagctcgtccgtgagcgcgaacatgtgttgaaacggtatgtggaggagaagtttgggtatcgactcatcgtccaccgctatttcgccaagctcgagaaaattcccgccgatcccgagccgtggatgggcatcgagtcgtttcaagagccgcttgactatgcgctgttttgctgcttgatggcgtatttggaaggaaaaacggtggaagaaaagtttttgctttctgacgtatgcgaagaaattcgcgccatgtacccgggggatctaccggtcgattggacgaactactcgcatcggcgctcgctcatccgcgtgttgaagacagcggaacaaatcggactcgtccgccggatggatggggagattgaggcgttcgcccagcatgtggaggaagaggcgctgtacgaagtgccggtgctcgcccgttattttatgcgcacgtatccgaaagatttgttgcaatatgaatcgatcgacgaattgctcgccgaggagtggaaagcctcgccgcaagattatcggcgccatcgcctgtatcggaagctgtttttatccccggcggtgcatcggacggaaggggacgagcaagacttttactacttgcgcaacttccgccatcggctgcgtgacgatatcgaagcgcatacgccgtttcggtatgaattgtacaaaaatgctgccatgttgacgcttcccgaacggcaggcgccgtacacgacatttcccgaccagaaaggaacgtcggagatcatccttcatttttctgccttggtgcgcgagcggcttggggaatatccgccggatgaatacggccgcatccggttgacgtttgaacaattttccgcctggcttgccgattgccgccgccgttacggggcggggtgggggaaaacgtaccgcgacatgtcggctgtcgagcttgtccgcgaaatgcttgcggcgctcaacgaatggcgcatggccgatgtggagcacggcaccggaatgatcgtcctttacccgctgctcgggcgggtgtcgggacggtatccagatgattttgacgcgaaagagggggaggaacatggcgaatccatgggtgcttcatcgcgcggggctgattaa

SEQ ID NO: 50518 - DNA, 1083 bp, Geobacillus sp. WSUCF1
atgattttgacgcgaaagagggggaggaacatggcgaatccatgggtgcttcatcgcgcggggctgattaatttttggtattacgacgagcaatactttcacttcgctgacggcaagctgctgttgcggggaagcaacggggcgggcaagtcggtgacgatgcaaagcttgatcccggtgcttttagacggcaagaagacgcccgatcgcctcgatccgttcggttcacgggcgcggcgcatggaagactacttgcttggggaaaaagacgtcgtcaatcgcgatgagcggacggggtatttgtttttagaatataaacggaaagaatccgaccaatacgtcacaacgggcatcggcctgcgcgcgaagcggcaaaaaagcctcgacttttgggggtttgtcatgttcgacaaccgccgcatcggctatgaccttcagttgtataaacaagaaaaaacaggtgaaaaaatcccgctgacgaaacgcgagctcgccgcattgctcggtgcgggcgggacggtcgtcgagacgcaaaaagagtatatggagctcgtgaacaaacatgtgtttcgttttgagacgatcgacgcgtttcaagaattgatcgaactgctcattcaactgcgcagcccgaagctgtcgaaagactttaagccgacggtgatttatgagattttggaaagctcgctgcctccgttgaccgatgacgagctccgccatttatccgaaacgattgaaaacatggaccaagccaagcagcaacttgagcagctcgaacgcgacgaacgggcgttgaagcgtctttgcgatcagtaccgcctgtacaacgaatatatgatcgccgaaaaggcggcagaatacgtaaaagcggtcaaacaagcggaacagctcgctgctgaacaacaccgccttcacgatgaagaagaaaagacgcgaaaggcgcttgatgagcttgaggagtccatcacccgcctcggccgcgaggaagacgtgctgcgagcgcgcgaaatcgacttggctggccatgaagtgtttcagcaggcggaaaagtatgaacagctgaaagccgaacggcagcgctag

SEQ ID NO: 50519 - DNA, 774 bp, Ralstonia solanacearum SD54
gtggcacgcggctggcaagcgtggcgcgaacgctggaaagggctgcgcggctggttcgtgacgaccggccatgaacctccgcaagccgaactgctacgctcgaaggcacgcgcagcaatcccgcagctgttgacggccgtgtcggcgctcaacgagcggcgcagcggccgtagcgaccgctcggccgacttccgcatgctggcgggctggtttgccgcctgcgaagacgattcgcaagcccaccgcctggcacgcgccgccttcgcgctcaacccggcgcgccacttttcgctcaaccccgcgctggcgcccggtgtgcaggatctgcccgccagcacgccctgggccgaagcaccaccgctgcgcatccacccacgcctgcgcgaatacggtgaagccgcgccgcgcggcgctctgccccgtgtgcaagcccgcgacgaacagcgacgcctgttggccgcgcaactggaacaagagcacgcagagatcgaagccgcccgcttgcgcctggccaccggccgcgccacgctgctgtccgaacttggcgcccttggcacgcatgacttcgcgctgttcctgaaactgctgggagaagcactgaccgcgcagatgtcgcccgacgcaccggtggaaacgcaaagcggcgacggtctcctgcacatccggttgcagccgctggccagtggcacccaggccatgatcacgacgcccacgggcgtgttccgcggacgcgaccacactgtcaccatcacgcgaatggaagacctgccatga

SEQ ID NO: 50520 - DNA, 1251 bp, Ralstonia solanacearum SD54
atgagcaatgacagccacgacatcggccgccagcaagcgcgacaccgtgatgacgaacgcactcaggccctgcgcgcgctgctgatgactccactgatgaccccggcccacgagagcttcgccgccgtgcgccgccacgccgatgaactgcgcgcctggttcgcgcgcgaaaccggctggacactgcacatcgagcgtgactgcgcgcgtctgtacaagcgtcccgccgacctgcaggacgccagccgcggcctgcccggctacgaacgccggcgctacgtgctgctgtgcctggcctgcgcggtactggaacgcgccgacccgcaaatcacgcttcgcgtgctgggcgatcggctgctggcgctggcagcagatccggcgctggcctcgcgcaacttccacttcacgctcggcgccgcgcatgagaggcgtgaactggttgccgtctgccgcagcctggtggaactgggtgtactgcagcgcatcgcaggcgatgaagaaagcttcgtgcgcagcacgggcgacgctgcggatagcggcgatgcactgtacgacgtgcgccgccgcgtactcgccggcttgctggcggcggtgcgcggcccgtccacgtggcctgcggaacagacccctgtgagcctggacgaacgcctggcatcgttggtggccgagcacatgcccgacagcgacgacgggctacgtactgccctgcgccatgatctcgcacgccggctgctggacaacccggtggtctacctgaacacgctggacgccgagttgcgcgcctactttgtcaatcagcgcggcgccatggcgacccgcctgtgcgatgccaccggtctcgtggccgagcagcgcgccgaaggtctggccctggtggacgaagacggcgagttgaccgatgtcgcgatgcctgctgagggtacggaagcccacgccacgctgctggtggccgaattcctggccggccgcagccgtgccgatgcgcaggcgcccaccacgctggacgagatcaccgcctttctggccgacgccagaacgcgttatggcagctactggcgcaaatcggcgcgcgagcccggagccgagcgcgagttgacgactgttgcgctggaacgcctgctcaagctgcaactcgtggcacgcatggccgaccggattcagccgctaccggcactggcccgcttcgcgctcggcgagaccgacatccgcgcgccgatccgctcggcaacccaatccaacttgttcgaatga

SEQ ID NO: 50521 - DNA, 4140 bp, Ralstonia solanacearum SD54
atgaccgatacgcgatcccctgcactgcccatcccgaccctcacccgttggcagccgctgcgactggggctggtcgagcttttccactatgacagcgaagaattctggttccgcgacggccgcctgctgctgcggggcaacaacggcaccggcaagtcgaaagtgctgtcgctgaccttgccttttcttttcgatgcgtacctcaagccgtcgcgcatcgagcccgacggcgatgccagcaaaaagatggcctggaatctgctgctgggtcgccacgagcggcgcataggctacgcttgggtggaattcggccgcgtggacgaggatggaaggcatcactatctcacgctgggcagcgggctctctgccgtggccgcgcgtgggcaggtggacacctggtttttcatgctggacgagcggcgtatcaatcaggacttttggctcatgagcccaacccgggtggtgctcacacgcgaccgcttgcgcgaagctctacaggattgcggacaatttttcgacaccgccgccccctatcgccgcgccgtggatgaacggctgttccgcctgggttcgactcgatacgctgccctgatcgatacgctaatccagctacgccagccacaattgtccaaaaagcccgacgaggccagcctgtcgaacgcgctcaccgaggccctgcccccgatctccaacgacctgttggccgatgttgccgatgcactgaaccagttggaggaataccgtcgagagttggaggagtacgaggcgctggagcgtgccgtcggccagttcaaccaacgctaccaacgctatgccgccacgcaggcccggcgtcaggcccgcaatttgcgcaccgctcaaaccggattcgacaacgccagccgcgaattgaacgccgcgcgcgaggcgctggagacgacccaagccgacgagcagcacgccgatcaggcatggcgacaggccgacactgtgctgaccaccaaccgcacccgcctcgaggaactgcagaacgaccctgcgatggccgatgccaagacgctggagaaggccgacgccgattcccggcagcgccgcaaggaagccaataccgcgcggcagacgtgctatgacatgcaaacccgcctggagcgcgagcggcaagccacgcgcacgcgcgcccagcgcgcccagcgcgccgagcacgccggccgcgcgctcgccgagtcgcgcgaagatgcggtgcaggccgccgagcgcgcaggccttgcgcctgcctactcagccaacccattggcctgtgccgacgcccatacgctgcagccgctggcgctggacaccgcacgccaagacctgcgccgcgccagtatcgagcgacgcgagcaggtggcactgctgctgcgccgctgcgacgaaaccgaccacgcggaacaaacccacgcgcgcgcgcagacccagcacgacgaacgtgccgacgaggcggaaaccgctgccgcacagcgcgaagaggccgatactgccgtcgatcggcagggccatacactgctcgacgcgtggcagcgctatctcgacggtctgcggcagctacattgccccgatggcgccgacgcactggaagcgctggcaccctggaccgtcagcctgcagggcgataacccggcccgcaccgcgctgcaccgcgcccagcaggccgcaagcctgcgtctggcgcgacgccaggccgcactgcaaaacgatcgccatgcgctggaacaggaacgcgacaccctgcgcgacgaacgcgcgcgtcttgaacagggtgaagacaccatgccgcagcccccgcactggcgcgcgcccgacatacgtgccgtccgcgcaggcgcaccgctgtggcaattggtggacttccgccccggcacgcccgcagccgactgcgccggcctcgaagccgcgctgcaagcctcgggcctgctcgacgcttgggtgacgcccaacggcatgctgcaggatagcgacggaggtcatgcgcaactgccgcacgacgcgcaatggctcacccgcgaacgccagccgcagtcgctggccgcctggctacgccccgcggaagcggcgagcgacgccccgccccgggtcgatcccaccgtggtgcagcgactgctcgagggcgtggcgtgcggcgcagaggacaatcccgccgccgaggcctggatcgcgcctaccgggcgcttccggctcggcgcgttggccggcgtatggcataagcccggcgccgagttcatcggctacgcggcacgctgtgcggcccgcgagcgccggcagcacgaaatcgacgcacgcctggaagcaatcgacgccgccctcacgttgctggcacaagattttgcccaactcgatgccgatcagcgcgaagccgccgacgaatggcaatgcgccccatctgacgacagcctgcgcgccgcacacgtcgaagctgtatcgcgtgcacgcgaattcgacatggcccggcagcgcctggagcacacggatcggctactgcgcgctgcggccgagcaatgggagcaggctcgcacaatcctggaacgcgatgccgaggatctgacgttgccgcccgcgcgcgatgccttgcgggccatcgaccaagcgctgcagatgtttggagactgcctgcacacgctagccgtcgtcgtgcgggagctgcgcgacgcccagaccgaacacgccgagcagttgcagcgtgagcaacaggcggagtccgatgcccggcatgccctcgagcaatccgccgagcgcgaggccctgaccgacgaagctggcatccgcttggaaacgctgcgcgcatccgtcggcgccagggtggaagagctgcaacggcgcctcagcgacgctcggggcgccgtcacgagcggcgagaccgagctcaggcaacggaacgacgcccggcgcttggccggcgaagcgcgcgcccgggccgagcaaaaggccgaggcagccgacgccacgcttgtcgaacgcacagccgcacgccagcacgccgtgggacagttgcagggcttttccgccaccggtctgctggtcacggccctgcccgatgccgagctgccgtccatgcacgcgccctggaccatcgagccggcactggcgctggcgcgacgtaccgaacaggcactgctccacgtcaaggacgacgatgaagcctggaaccgcgtgcaaaaccaagtctcgcaggattacaccgaactcggtcgcgcactcgccgcgctgagccaccaggcccaggccgaaacaaacgacttcggcctagtcgtcagcatcatctaccaaaaccgcccggaacgtcctgaccagttgagtgcgcgcctggccggagaaatttcccagcgccgagaactcctcacggccggcgaacgtcaggtgctcgagaaccatctgcaggcagagatcgccagcgcagtgcaaaagctgctgcgcgatgccgaacgtcaagtcaaggccatcaacgatgaattggacaagcgccccacctccaccggcgtgcgcttccgtctgcaatgggaaaccctgcccgaaggtgctgatggcgcaccggtgggcctcgaggccgcacgccgccgcttgctcaacaccagcacggatctctggagcgccgaagaccgtcgggtggtcggcgaaatgctgcagcagcgcgtcgccgcggaacgcagccgcgccgatgcagaccagggcggcagcctgctggatcagttggcccgcgcgctggactaccggcgttggcatcgcttccgcgtgcaacgctgggacggccaatggcgcccgctgtccggtcctgcctccagcggcgaacgcgcgttgggcctgacggtgccgctattcgccgccgtctccagctactacacgcaggaaagctacgcccatgcaccacgtctcgtattgctggacgaggtttttgccggcatcgacgacgcggcgcgcgcgcactgctgggcgctgatccgcgaattcgatctggacttcgtggtaaccagcgagcgcgaatgggcctgttccgccgaactgcccggcgtagccatcgcgcaactgcagcgccacgaaggcatcgacgccgtacatgtctcgcgctggacctgggacgggcgaaaccggcggcgcgaagacgacccgaaccggaggttccccaacgcatga

SEQ ID NO: 50522 - DNA, 1305 bp, Ralstonia solanacearum SD54; identical to SEQ ID NO: 50397

SEQ ID NO: 50523 - DNA, 843 bp, Blautia hydrogenotrophica CAG:147
gtgctcaaggaaatatccggggaacaggcagctgaaatcttagaacgggtggtattgtgtgagagggatatcctatttccaggttcaaaggacaaagaggccgtcaaagaatctgtgagggaaaatgtatttggaggatgggcagctttgcggcaatggtttttgagtgagacagggccaagtgagtgtagccgcgttctggagattacagatgagatcatcagaaaaatcatacagaacgcggctctcattgttcaggcccagagttggagtgtcagccgaaaaaatgattatcagaaatttatccggctgtttagggagtgtgaggatttggaagaggcacactgcctggctgctcacctctttggaattcaacaagtcagacattttagagtttgcaaagataggtcgacagaaagcatctatagcagtacttatgaggaagaggctatggagttttggctgaggccgcgcaggagaaggcacggttctagattggagagaactggctttgaggataaaggagagagaaagaaaagtcaaaggagagagtatcttaaaagaagcgaggaagaattgtatacagtaacacagtatatccagggaggttgtctagagctgtccaagatcgagggaaaaatctcaaaagagacgagagcattgttgctgcggtggattgagacggcgatgctgtccggttctggtagaggagtgacggagagcgggaagttctatcagctacaacgtacggacagcaggtgtactttgcactgtgaggatggcgatttcagtatgccgaactatattctgatgtttggggcaagagaagatggagacatttag

SEQ ID NO: 50524 - DNA, 1137 bp, Blautia hydrogenotrophica CAG:147
atggagacatttagagcgttgatagaaagattttggattgaaaagaaaaaagacagagaactgtacagaaaaattcaaagggaagcagaaaaaatccgcggatttgtcacagaacagctaggatggaagctgattgccaatgagaagatcataaagctggaaaaaatccctacccatgcgaaaggctttatgggagttactcagtttactcgaattcaagattatattattttttgtgcactgctgatttatttggaggagcgggaggaaggagagcaatttcttctgtcagagatgctggaagtactggaaacacagcttcaggaatatatggaagtggattggacgatgtatgctcagcgcagatcgctggtgagggttttgcaggttgcagaaaacaggggcctgttgaaagtgaacgatgggaacagtgagcgggtggccgatgggacggagcgagaagtgctctatgagaatacgggtttatcccgatattttgcagtgaattttgggcgcagtatcgaaacattttcgtcgtgtcgggattttgaggctgctgcttgtttcgagacggatacggaacagagcaagacccagagggtatatagacaattggtgactgcaccggcgttttactggatatctacagaaaacaaggatgcgtcgtatttgaaggcggagagaatgcggatacaaagagtgttgggagaaaagttgggaggtagccttcatctccatcgaaatgcggccttttacgtgtatgaagaagagcgtatgggagagctgcaccctgaggagagtatgctcagtgaggtcgtcctgactgtctgtaaagaaatacgcaaagaggtggagaatcggcatctggaaagagacgccggagactgtgtcagtatttttagaagagagtttcaagggctggtacgaaggtgtcaggaaagagaaaaagcggtctggaacaaagagtttggggagatggaaatctcaaaattggagcgaggcattttggaatatatgaaatcctggatgttggcggaacttcaaggggagagagtgattttctatccggcctgcggaaaatttataggctcctatctcaccgatttcgttggagaggaggataaaacggatgagtaa

SEQ ID NO: 50525 - DNA, 2580 bp, Blautia hydrogenotrophica CAG:147
ttgacggcggctgaagacaatcaggagctggaaatcggaaagaaggatttgaaaaagatactgggaaaaatagagcagtatcaggggcctggtgactatgaagacatacgaagcgtgctgagggcaatctggtggaaaaagaaagaagtcttggaacgggaacgacgaagcctcaaagaacagcagatagagggccgcataaagattcaaggtttgaaagaagagcgagacaggagggtctctgacagacaagaacaggctagggagtttttggagaagaaggggatttcctgtctgcttttttatgagacagtggagtttgcggaaaatttggactcggagacgagaaagagggtggagggacaactggcggcgtcaggactgctggatgcattggtgatagctgaggaagattataaaagggcagtccgggagcttcggggaattgctgttgtattgttaaatccaggaggattcaaagaagaaagctctctaaaagaagagagattcccctatttgattcccgctgatgtgggaagccagacgctaagacaggcggtaggacgcctgttaagctgtctgtcccggcagaaggtaaaattggatgagaaaggcttcgacggtcgtctggttctgtatgacaatggctattttgaacaggggattttggagggctatggtacctggaagaaggcgcggtatataggagagaagaccagagaagaggaaaagcaaaaaattctgagagagagaaaatgcgagctggccgaggcagaaaaagagctggaaaattgggatgcccggttaaaatacgtggaacaaagactttttaggttggatgaagaatataaagcggttccgacatttgcagaattggagaaggcgattggaagggcacaggtgcgtcgagaagctttggaatggtgggaggcagaggcacagccccaggagagggcagccgctcaggccaaaagaatctatgatgagtgcgaaaaggtagcgacaaagctgtgcagacttctgccttatgggagaaagctggaagattatattagagtcaaagaagaaatttccttgtatattgcgcagttaggcgaatgggagcgcgcgaagctccggcaggagatggaagaaaatcggtgttttcatgttcaggagcttttggagcgagaggaacaggagataaggaaaaattctgattgtctaagaagaagcgagtgtatacttcaagagctggacgttttggccttgggaatggaagaacatttgaaaaaaactggggctcgagaaaaagttaggcgattgaaacagatcaaggaggagctgttcgaccaggaggagcagaggcaggatactttgatcagtctggcggttctcgaaagtgagggggcagctttggaaaaagaaaaggggcagctttggctggaagctaaggagtgggcagagacggaaaagagagagaaggaatgttttgaggcagagctggctttggggctggtaaaggagatggatgaggttccaaagtgtgagagaattcaaaaggcagttcaatggatgcggagtgccgatgagaatcggtcagctgcggagatgctggccgctctgatgaagagttttcacgagcatctcggtacgctttgtggatatggaatttgcatggaggagtcctcacagagacgtgtagacggtttttggggcaaaagacaggtgcttatggccacatggaagggaaagaaggtatccttagaagtattttacaggcttttgaaagagactgtggagagtacagagctgttgatacggcagagggacagggagctttttgaggaaattctatcggattctctgggaagaaaattgagcaggcgtattcaggagagccaaagatgggtgagagcgatgtcgtctttgatgagggaaatggatacttctatgggactgactttttccttggagtggaaacctagaccggcggaaggtgcttatgaattagaagttcaacagttgaatgaactgctgctaaaagaaaaaggacggttgatggcggaagatatggaaaaaatcaccaggcacttcagagcaaaaatttatgcagaaaagcagaagcttcaggacagtggacaggtggtcaactatatggatttaatcaggggagccctggattaccgccagtggtttgaatttcacatgtattattacaggggtcaagagcgcagaaaagaacttacgaacagcgcgtttcaccgttttagcggaggggagaaggcgatggcaatgtatgtgccattgtttgccgctgtcaatgcgcagtatcagaaggcgcagaatgtagaccatcccagaattcttgcgctggacgaggcttttgccggagtggacgacaagaatatcgagagtatctttcaattaatgcagaaaatgggatttgattacatcatgaattctcaaattctctggggctgctacagatcggtgaaaaatttaaatatttcagaactgtatcggccaggaaattcagggacggtgactgtgatttcctatcactggaacggatgcgagaggcttttagaggaacagtaa

SEQ ID NO: 50526 - DNA, 1485 bp, Ruminococcus torques CAG:61; identical to SEQ ID NO: 50133

SEQ ID NO: 50527 - DNA, 3711 bp, Ruminococcus torques CAG:61; identical to SEQ ID NO: 50134

SEQ ID NO: 50528 - DNA, 1296 bp, Ruminococcus torques CAG:61; identical to SEQ ID NO: 50135

SEQ ID NO: 50529 - DNA, 1494 bp, Firmicutes bacterium CAG:424
atggaaattcaggataagatgagaaagccgatgttggaggcgaaatatctgaatgtggaaaatacagacagatatcgccctatcatccggcttttttatttaaaatatgaaaaactgaaatactggctttatcaagaagaggtttttgaggagttaaaagaggatccgtattttgcggattataccatggaacaatgccagcaggatcttgcagccctggtctcatggggaaatctggttaccattcaggataccagaaaggtgactaccattgaagagttcaggaacaaaaagtttcggtaccagttgtcggagacagctgtggaaatcgagcgcatggttataagaatcgaaaatctgtttattgagggctcttcactggagcctacgctgttggagcggattcggatcaatctgggaaaactggaagaaatgtctgtgaaagaggatgaaaaacttcatgcctggtggaatgatttgaataatgatttcattcggttaaatcagaattatcaggattatatgcgggagctgaacagtgtaaaagcagaagagatgatgaaaaccagagagtttcttttattcaaagatcgcctaatggagtatctgcgttcctttgtgaaaagcctgcaagtgaatgtgacggctattgaacaggaactgcggaaggtgcaggaagagactgtgaagaatgttttgaagaaagtcaccgcgtatgagctttctattcctcgtatggatgtggaaattgatgaacagatgatttatgaaaaaatgagcggtcgctgggaaagtatggtggaatggtttgcaggaaaagacgggcaggaatcagaagcagggaaggtgtttgataccaccaacgagattattcggaaaattactcgctatgcaacccgtatcagcgagatgagcaatcagggctccaatcggcgggaggaatataaaaaggtggcacaaatgtttgcaaaatgcagagatatttctgaggcgcacaggttggcagcagtggtctttggcgtggaaaaaccgctgcatttaaagggcgaaatgcacagggaaacagatagtattaacagcagtgtgtatgaagagaatcctcatgtagttacggtaattccaagagtccgcacttatcgagaaaaggcgaaaagaagtgggattatagaccgctcagaagagaaagaagccatgcgtaaggctgagatacagaggttggaagaggaacggaaattattaagaagctatatcaaaaacgggcggttggagtttgcaaatcttccggtgattgaaccttatgtacgggatatgtttcttctgtggatgtctaaagcactggaaaagaaaaaccacagagctaagacagaagacggtcagatttattatattgaacaggcagatacaaaggaatactgtacgttaaaatgcacagatggagagttccaaatgccttgttataccatggtatttgaagaaagggaacaggggatatga

SEQ ID NO: 50530 - DNA, 1146 bp, Firmicutes bacterium CAG:424
atgaaggtactggaagtgttgctgaaccgcagatggattctgaaatccagagagcgggaattgtattatcaagtaaaagaggcgctggcatctggagaggaaaagaagtttttaagagaaaagcttgggtatcaggtgctgattaatccatatatgattaaggtggaaaaactgccggcagctccagaaaactggatgggaatctcagattttcgtgaccctattgagtatgtttttttctgcctggttctcatgtttctggaggataaagaagcagaggagcagtttgtgctttcggaactaacggaatatgtgcagagtcagtatgagaaggagcagattgactggaccatttatcgctaccgccgccatatgataaaggtgatgaaatactgcgtggcctgcggtattctggatgtaaatgatggaagtgaagagggatttgcaaaggatgataccagcgaagtcttgtatgaaaatacaggtgtttcccggtattttatgaagaattttacccaggacattatgggatatacaggaccaaaagactttgaaaaagaagagtggattgacttaaacgaggatcggggaattgtccgaagacaaagagtttatcgaagatttctgatgaccatgggcatgtacaaagacatagatacggaagaagattttgcctatgtacggaattaccggaatatgatacagggagaattatcagagctgtttgaatgtgaactgcaggtacatagcagcagtgcgtttctgattttgggagagaattgcaggcttggacgcacttttccggaagaaaatacgttgtctgatattgtgctgcttttgtttcagctcttgcaggaagaaatcagggaagggaaaatcgaggtacctttggacgaacaaatccgtattccaaaagagaattttcagcgacttatagagaaatgcaaggaacggtttggtgctggttttaataagacgtaccgggaaatgacttttgcagagttttatcgggaagtctctgattatatggaaaatctgatgatgatagagcaagcttatggagatgtgtgtatcaaacctgtggcaggaaaacttataggaaaatatccgaaagactttcggaaagagggaggaaacgatgaatag

SEQ ID NO: 50531 - DNA, 4101 bp, Firmicutes bacterium CAG:424
atgaatagtgggaagtggcagataaacaaagtgggactggtggatttctggtactatgatgaggaagcctttgatttttcggaagggcgcatgttgttaagaggcgccaatggttctggaaaatcggtcaccatgcagagttttattccgcttttgctggatggaaatatgcgtccggagcgcctggatcccttcggttcccgtgcaaggaagatggaaaattatcttctggaagaaggggatgagcgggaggaaagaactggttatctctacatggaatttaaacgcttggagagcgaagaatacctgactttggggctgggaatccgcgcaagaaagaataaaaagctggaatcctggtatttttgtattacagataaccgacgggtagggcaggatatttttctgtataaagatgtggaaaacaaaattacctgttctaaaatagagctgaaaaacagaattggtgagggcggaaaggtcatggaaacccaaagcgaatatgctgcctgtgtcaatcgtctgctctttggatttgaaactcaggaggaatataaggaacttctggaactgctgattcagcttcgtaccccgaaactctccaaggattttaaacctacagttatcaacgaaattttgagtacttcgctgcagaccttgtcagaagatgatttgcggcctatgtctgaggccattgaaaacatggataatctaaaaaccaatttggataccttaaacgagagtatccgtggagccaggcagattgagaaggtctatgaccagtacaatcagattgtgttgtatgacaaagcactgctgttttcagatgcggtaaaggtttatgaatcctgccagagtacagagacaaaatttaaagaagaactgacccaaaaaacaactgccctaaaagaagaaaaacagaggtatcaggaacttgtgcaggaggaagagattttaaaaggagaaaaagaatctcttacgaaaagtgatgcggcaaagttaaaggagcaggaactgaaactggcagaagaacttagggaaaaggaagaagagcaaaagactaaggaacgtcaggaacaggagaaaaaggataagctgttggaagcagaagaacggttaaaaaaagagcaggagaaaaacgaagtaatctgggaagagatggaaacctgcttggaagaaatggaagaggaaatggaagaaatcccatttgacgactttgcatttttgaaaaaagaactgctggaagataaaatcccggattattcctttgggtctcatacgcagcttttgaaggattatacagagaaagtagaaacgggaaaagaaagtctgacagaggagaaaaactgtcaggagaaatatgaccgatatttgaaagaattggatgtgtgccaggaagagcgaaatgcagcagaacgggaagtccagcagtatgagcgcctgttgcaagaaacaaaggcagagctgacagaacaagtgtatctttgggaacggaaaaatcaggagctttctcttgtaccggaaatcatgcaggaaatgtccagaaagattcaggagtatgagcagggaaaagattattctgaaatacgggaactggcgaagccaaagctgtatgagaaggaaaggagttttaccagggaaaggctacttttagagcagaatctggaaaaagaaagtcaaaaacttcaggaattggaagaggaacttgcagagtggcagaatcagaaagatccggaaccacagcagccggagtgtgtacaggaaaatcgccgtcttttaagagaaaaaggcattccataccagcagttttataaaaccatagagtttggacaggacttagaggcagagcatgcagaccggctggaagaagctctgctgcagatgggagtactggatgcgttgattatttcagaagaatacagggaaagcgtgttggcgctggacagcggcgtatgcgacaggtatattttcagtgatgtttctcatgtgcaggaaaatctcaacaaagtgttggatgtggataatggggaacatgatattttgctgtaccagagcatttccaatattttgtcttcgattggttttggcagaaagacagagcagggaacttcctggattgacgaacagggtaactaccgcctgggggttttggaaggaactgtcacaggggaatacagggctagatttattggcgtgagggcaagagaacagtatcgaaaggaaaagatagaagaactggaaaggctttgcaaggagacgaagcagcaggtggaagagataaaagctgcactggagaaaaaccagcgacgtctggagcagcttcagaaggaatggacagaatttcccaaggatgaagatttgaaaacagcggcgaaagaacttgcagactgggaatatcgcatggaacttgcagtcagacgggtgggagagcagcaggcacttacagaaaaagagcggaagaaattagatgaaatccgggtcaaagtaagggaattatgcgggaaatgttacctctccccacggttggatctttttgctgctgtattggaatccctgtacagatataaggaactgctttcggacctgcaggtggcttacggaaagtaccagaacggaatccggtatgtggaaagtcagcgggaatatagagaaggaatcgagctggacttagatgatatccgatatgatttgaacaggattcttttaaaagtccgggaactggaaggttttctggactctgtgcggaaacaattggcgcttacggattatgaagaaatcaaggagcgtctggactactgtatgcagcgtctggttcttctgcccggtgagagagaaggctgcgtgggaaggcagaacagactggaaaaagatgcagatgtgctgcaggaaaaaatacaggaaaatgagaagaaaaaggcagaacttctggagagaaaagagaaatactgccgtgtttttgaactggaataccgtctgggatatgtggaacagacttttcaggaaacggaagatatggggacactggctaaggaggtatgcagccggtttgcgggcagttttggaaataaaaagcagagtgatgtctttggcagtctgcaggaagcctatcaccagaaccggggatatcttttggattatcagattaccctgtcctctcttttcggagaactggatgaggaaagctccttcctggacatgagtgtaaagcggattgatatttcggcaaaatacaggggaacggcagtaaaatttaaagagctgctggaaaagctctgtgaagatgcagaagccctggcgaagattttaaatgaaagggacagggagctgtttgaagatattctggccaacaccatcagcaagaaaatccgtgcaaaaatccaggcaagcaggcgctgggtagagaaaatgaatgcacttatggagtctatgcagacctccagcggactgaagctgagcctgcgttggaaaaataaaagagcagaaaaggaagaacagttagacaccagggctttggtggaattattgcagaaggatgcagaaatcatgcggacagaggagatagaaatgctctcccggcatttccgttccaagattgaggaagcaaggaaaatcgcaggggatatgggagctgtgcagtctttccatgcaaccatgcgtgaggttctggattaccggaagtggttcgaattccagttggagtgtcagaagacaggagagaagaagaaagaactgacagaccgggtcttctttactttcagtggaggagaaaaggccatggctatgtatgttccactgttttctgcagtggttgcaaaatacacaggagcacgtccagatgcacctaaactgatttctttggatgaggcttttgcaggtgtagatgaaaccaatatcagggacatgttccgtcttatggtagagtttgagtttaactttatgattaattcacagattttgtggggggattatgatactgttccagctcttgctatttatcagttgattcgcccggaaaatgccagatttgtatctgtaatccgttatctttggaatggaaaaaagaaggtgatggtgatggataagatagaagaagaggtatag

SEQ ID NO: 50532 - DNA, 1284 bp, Firmicutes bacterium CAG:424
atggctaaaatggaaccgaaaaagttggcagaatgtctggactatttcaggcagcgtccggtttatgaaaagctttttctaaagttcagagaaaagtatacaagccttggacatatgggtggaaaagtggttctgtcagggcttaccttggaagaaaagcagcagttaggtggatttctgcaaaaggattacacagagaacaaaactgtgacggtttccgccgaactcctggaaaaacgccttggtgaaagccggttttccgggatttccggggaaacgcttctgcgggcttatttcggcaaaaaactgactgtgaagaaagaagaaaagcagaaagaagaagagaaaagaaatgcctgttttgaacaaattctggaaggtcaggaagaaaatccggcaggaaaatggcttaaggaggtcttagagaatcgagggagcgggtatgagcttttgatgcagcagtacagggaaaatcctgggaagttgaggaagattctggagaatgttatgagggcctcagagcagcttcattacataaagaagaaacagcttctggcagtatttgcagcgcaggcaacagggaatcctcattactttgataccggagaaacagcagaaaaacttttgattttattcctgaaatctcagtttccaggtagttatgagaaaggaatctcgccggcagaagagagaaaccatctgctgtaccaggcaaggattctaaaagatgacttgtctaatgaaacactggcttatggtctgcatgcatggaaacaagatgggagtatgcatgagggaattgaaggatttttgaaagaacaggagcctgtgcggctgactctgcgttctctaggaggaatcagtgaaatcagggcgcagcaaaaagaaatttatgtggtggaaaatccggccgtgttttccgttctgacaagccgaaacccagcttgtgcagcagtttgcgttagcggacagcccagacttgccactttgcttttgctagattttttaaaagaaaaccataggttttggtatgcgggagattttgacccagaagggcttttgattgctcagaggttgaaagaaagatatggagaagcgctggatttttggaaatatgaggttcagtggtatgagcagtatctgtcttctgtaagactgagtgagagccggataaaaaagctggaacatgtttatatgcaggaattacagggcattaaagaagggatacagaagcgaaaacgagcggcttatcaggaggctatgctgcaagtttatctggaatga

SEQ ID NO: 50533 - DNA, 1551 bp, Clostridium hathewayi CAG:224
atgaaggaaaaacccactataaagtcactgggaaatatttctgaattaaaatatataaatgctgataacgtcacgcgctatcgggcgattatgcgttatctatatttgcagtatgagcgattgagttattggctcagccctgagcagatatattctggagttatggaatggaatattttgaaaaattatacgctggagcagtgccagttggatttggatcagttggtttcgtggaaaaaccttacttatcgacatgatggtactagagcgagaaccgttgaggagtatctgcgaaaaaaatatcagtatctgattactccctattctattgaacttgagcgcttcctcgaacgtcttgaaggggtgaagggatatgggggctcactagagccgactttgtttgacaagattgcagacactattttggatatttatgagcataaaggagattatgaacctaaagctgctctggaagtctggaattcattatatgactcatttcaaaagttgaatcaaacatcaatggattacattgccagcctgcataccgggacagccgaagatttgatgatgacatcttcttttttaatgtataaagattcgatcaccttgtatcttcaggattttgttcaggcattgcagcgcagatcttaccgaatagaaggaaatttaaagttaattaatcgtgacatgcaaactcgattttttaagtgtgtattggaaggcgaatggttaattccaaaagtggaggaattctttacgagagaggaataccaacaaaacctggagcgcagatggcgtcaattatgccgatggttctgcggagacgatcatacacaaagtgagatgttccttttggagcaagcttcaaaagatgcgattaaaaaaatcgtaaggagtacacttcgaatacaggaaaagcaacggtcaattgtgagccgacgtcaggacctggattttctgggaaaatggttctaccatctggaggatgtgaaggaggctcataaattagcagcctatgcgtttggaatatttccgactcgccatttacagggggaggacaaccgcagctccgatagtcaggatatttctatgtgggatgaggctgctattgagcgcgtaattaggagcagaagtcgaaaacgcggtggaaagggaagtggagagagtgagacgattgcagataatcatttaaagaaggaagcgttgaggcaagaacttgttgcataccagaagcaggaactggctttcttgattgagatgacaaaaaaaggaagcgttaaagtctcagaactccaatgtatttcagcagttgcaaggattcaacttttaaattggattgggaggtgtatctcatcggagggacaagccttttatacgtccgaggggattaaggtaacactttatatgccggaagagaagcattatgttacgttagattgcgatgacggaacattaggccttttagattactcctttgtgtttgaaattgagaatcaagaaacgtggcaaaatttactgagagggatggcaggtgatttggatggctga

SEQ ID NO: 50534 - DNA, 1185 bp, Clostridium hathewayi CAG:224
atggctgatggaatagagcaacgcggctttgaagatcataccgatatggaagaacggcgcaagatctgtatgaatgcgttattgaaccgtccttggatagaacgtgataaggatccgcagctctatcactgggccagggagcagtatctggaaatacggaattggtttgccaactatccgggatattccgttattatgaatagaaagctgatcaaactggaaaaagttccggttgaggcgaagagttggatggggtttgaagggttcaaggaacccatcgattatgcgctttttacctatggtctatggtacctggaagataaatcagctggggatcaattcatattgactactatggtcaaggaaataaaggaatttatgaatgagcagggcctaaatgtcgattggaagaattatttccatcggttatccatggccagggctctaaaaaagctgaaaagtttgaatgttttgcgtagcattgacggtcaggagtccgattgggcgtctgatgcagaaaatcatgatgtgctgtatgaatgcgccccttgtgccagctatgttttgaggacatttcgtagagaactgtcatcttatcagtctatggaggaattgagcgatttgccggaggaagaggataaaaagaaacgacagctaatgtaccggaggtatttgctcgaatcattcgtggggctggatttatgggaacaagacttattttattttcatggacaaaaaaatcatttaattggacagctcgataagatgtttggttggggtggaaccaaatataaagaaggtctcctgtttttctatccggaattggtgagtgatatggagcttttccccacactatcggctatatcagatcttgtcctgctattttgtggaaagatcagaaccatgtatgagttgggtgaagtgaaaacagagtcggtgtcattgggtaaaattcgactgactagaggtaggattgaacagattctgcttgaattacagtatgaaaatggatatcgctggacgaaagaataccggagtatgaaatcgtcacagttggcagacgcagtgtgcgaacatatggaacagtgggaattcggtagttggcaggatgacatgttctttttgttgaatccggttggaggaaggtattacactcaatatggagaagtggagatcgaggagtag

SEQ ID NO: 50535 - DNA, 4089 bp, Clostridium hathewayi CAG:224
atgaaacgatggcggatgaatcgtatggggattctgaatttctggctttatgatgaagaggtttttgaactggaacagggtagattgctgttcagaggagcaaatgggtcgggaaaatctgttacaatgcaaagctttatcccgctggttctggatggagacaagcgcccggagcgcctggattcgtttggttcaagggatcgccgcatggaatattatcttttgggcgacagcgagactggccatatggatcgaactggatatctctggattgaattttataatgaagataaacagagctataaaaccatcggaattgccctacgcgccagaagaggggcggcgcaaatggttttttggggatttttgctggaagatggacgacggatcaatcaagatctccatttatatgattatccgaattggctggaaacgaagaaaaaggtgccactcacaagaaaagccttgacggaggccataggggctggaggaattgtagttcaggaacaggcaacgtatcgtgaacttgtgaaaaaacacatatttgggtttaaagacaacaatgattcttacaaagatttattaaagcttcttctggagatcaggagcccaaagctttcaaaagagtttcgcccatcatcaatttacagtattctgacaaattcgcttccagcgttgacggaagacgagttgggtgacctttcggatgtcctggaagatatggatcaaatttcagagcggctggaagaactgcaaattcagatacaggaacttgaaggcctggagaagcagtacgataattacaataaagttttgctgtatcatgtgtccttggatttgaaggtgttaaatcacagttttaatgaacgcaagaaagaattggatgattgcaaaaaaaaattagacattacgattgcttgtggtatcgcgcttaagactcagatattgaaagcagaacttgaaattgagaaaatgcagtcggaattagattatctccagcaaagcgagggattggaaaaacctatagaactggaacgtttacatacggattataagaaattgaatgaacgatatgtggcagtcaaaaagcggatggccgataatgaaaggcgggtggaggcatggcaaaacgaaatagcggaaaagaaagtactaagggatgagttattccagaatcaagacagtttactggaagaattagagagctatgcgagagttatggagttttatgaacatgatatataccatcggcagtggcagcaggtgggcgatgattacgcacgctgtgcggacaattggaatcaggacttgctggcacatcaagtaaaattaaagactgcagttttgattggagaaagagaacgggaagctagtttggatatggcaaaggaaaaggagcgatggggggaattctataaaaagaaaagcctagcggaagaagaatatttgtctgcggaagaaaaatttagtgctggaaaaatgcagctgaaggagtgtgtcattggctggcgtcagggcctttcgcaattagaagtcagtaatgagaatgtaggtaatattctagcagcgctatctgaactgggcaaggataaccgcaattatgaaactgtaagaacgtctgtgtacaatttgtttctagatcaatatcagcagttgacaaacaaggtactcgttttagaacaacagtttagagaatttgaagaaaaaagggagcttttgcaagcagaactaaattcgtggagaagccataaagagcctgagccgttgcggtcactttcgagaaacaagtgccgtggtgagagggcggagcggatgggcgcacctctttatacggtctgtgatttttccgatgaattgacggaagcagagaaggcacagcttgagactactctggagcaggcgggtatactggatgcctggattttgccaggagggcgaatgggctattttgctcatgaaaaagatgaggaaatttggattgaaccctgtgaaaatcctggagtggtgaccctaagtgatgtgttagcgccgtgtccttctgatgaaagtggtttgacaaaagaagatattgccttagtattgtccagttttacctggagtggtgagatggataatatgcagggctctatgacatcggcggcattcaatcagatcgggagagaggggttccggctgggagctttggctggacggaattctaccaaagagcaggcggaatatatcggaagtgagaatcgacaaaaggcaaaaagacggatgattgaccaactggaacaacaggttttggaactggaaaataaacaggatgctattcaggaaaaaatataccaggagcacgaaaagcaggatattctaacagcggaaaaagaaagtttcccagatgatggggaaattcaattatgtctggatcatttgacaagtaagtggcatcttttccaggcggcgattaaacaggaaaaggaagcagagattatataccataaaaaagaggcagactggaaggaacgaaaagttgaattgaccgagataacatctgcctggacaaggcttaaaactttaagtacgctttcggaggcgatgaattgtgcgaatgattacaagaccagtctgtcacagctgaagaccgagtatgtgcattacaggagtctgcagaatgattgtgagaactatcaggggtatatcgatgaggtgaatgagcaaattagcgataatcaactggagttaagcggagtacgaaaatcacaagtgctgctggaaaaccagataagccagcttgaagaactgatagaggctaaagggctaagagatatatttaataaaattgataaatgcaagcaaacgaaaaatgatttagcaaaagaggtctcaaaactgcatgaggaattgagggaaaatgacaaatcgcaaggttccttaggtgctcaactggacgcgagacaagaacatttgtcagagataactgagaatctggaggctgctattgtacagtggcaggcagaattgaatctgggacttatagaaaatatggatacctataatctgactgagcgtcgggacattatgcgtttggcggatcagcttgtgacggaatataaagtagtctgggggaacatggtaaaggagactgtgataagcgacctgattacagaattcaacaaggctaatgtgaatctgcgagagtatgcgttggagcgggaatccttggagaatggacgggccattatccgttccaatcgagatcgaatgaatcctatgactcccagagaattgttaaaggaactgcgggaaaaggaagcggaacaaaaacttcttctgacagaacaggataaaaaactgtattcagagattattattggtagtgtgggtaaatcaattcagttaaaaatacatcaggcgtttgattggattgataaaatggatgggctgatgaaacagcgaaacacctccagcggtctgagattatctttaaaatgggttccgttgccatcgcgaagtgaatcagaattggatacagaaacacttgtcaaactgcttttaagtgatacagaacgactggatgacagcgagattaaccaaatgattgaacatttcagaaagcggattctattagcaaaggagtcggcaaaagaggaacagggttctctgcgaaaatatatcaatgaaatgctagactatcggacctggtttaccttccgattagattttcgcaagggagatcagtcgaattaccgggaactgaccaacagtagatttaatgtgctgagtggtggagagaaagcaatggcaatgtatataccgttgtttgcggcagcaaattctcgatatagtaaggctgaggatgatgccccgaagattttggcgttggatgaggcatttgccggtgtggatgattctaatatgcgtgatatgtttgatcttttgacagatatggattttgactacataatgacatcgcaggttctgtggggatgttacgataccgtgccaagtctggcaatttatgaaatccatcggcctaaagacattgatataataacgttactccactatcggtggaatggtaaacaaaaattatatgtggagaattag

SEQ ID NO: 50536 - DNA, 1992 bp, Clostridium hathewayi CAG:224
atggagcacaagaggaagataacggcagaggagtattacagcgatccaaatttaaaacgtatgctgaacgcggtttttaacaagtatagaagttatggcagtggcagaggaaaaattaaacttgtcatctccagtcaggccgaggctcaacgattacagacgttttttggaccgagggtcaggggcctgctgggggtaggcgatcagctaagcatggagatgagcgtgatagaggaggaacttgggaaacgttttatgttgaccgtcccatccttatacgaaatactatttcacgaaccattgttgaccaaaaaggaaagtttagcaaaggcagatacagagtgggaaaccttgtttaccaatgtggttgagaagcttcagaatgaggagaatatcaatatcgtggacaaagcgttctgtgagttgacgtatgattggttatatcgtctctggaaaaaggaacctggttcgggatatcggattttacaggcggggatgaaagactataatgctgcactcacctctcttaaaatctgtttggaagctctttggtatctgctaatggatttggaacgcctggagcaggagaatgtgaaaaagtctgataaaatatatatatccatgttagcaacttttgtcgcgggtaaacactcattagatgagaaaaaaacgttggcaggcaggctttttttccgagctttggaaaatgtttactcccaaagatatcgtgaaaatggagcgtcagacccgctggaacatgttccggcttttatgcgaaagcggatgatgtatcgtttgtatcatttaagtgatgatacaaccagttcactttttcacagatttactttagatatttatgaatctatgaagaaagagacagttaatctcggcaatgttgaggatatgggagactttgagattaagtctaacctttttttgattgaaaatccatcggtttttcattatttagttgattgcctgatagaatatgtgaaggttaacaatattccaaagcagctaataagagacagatttccgattattatatgtacttcaggctgtttccgagctgcagtgctggagtatgttcggatatgcattgaaagaaactcaaaatgccgagtctatttttcaggtgattttgatcgagcaggaattgagatgatggaaaagttaaaagaatattttcctaaaaatgtatctccgtttcaaatgaacgcaaaaacatatcttgcaggattgaatggaaaatgtagggagctttcagaaaaggatagagagatattggctgggaaaaacagcgaattagcaaggttaatagcgttacatggaaaaaaggtatatcaggaaagcattgcttatgacctatgggaagtccttttgagagaaattcaatgtgttgagacagttatgtatcaaacatatgaggaagggaagcgcacgatggaaaaacgcaaagtagagatgtttttatcatattgttggcaagatgataaaatagctgcggatatttttgcctatttgaacaatgtcacgaatattcatattcatagggatacaatagatataaagaaatgggatagtattagagattatatgaataatatagaaaatatggactatattattttgctaatttcagacgcctacttgaggtcaagaaattgtatgtacgaagttttagaggttatgcgagatcgcaaatataagaataaaatatttcccgtagtggtttcaaaagaaatctataacccaactgtagttgcaaattatgtgaaatattggcaggatcaacagcagcagctggaggatactctgagcagtctgaggattcagaatttgggaaatttgaatcaggatttgaaaattattcaagatatagcagcaaataccgccgattttttgtatttggtgagcgatatgaacaatcctgaaattgctgaaataaatgttgaaattactaaaaaattagaggagtggggagtaatttaa

SEQ ID NO: 50537 - DNA, 1491 bp, Ruminococcus gnavus CAG:126
atgaaaattcaagaaaaaatgagaaagccaatgttggaggcaagatatctgaatgtagagaatacagacagatatcgtcccatcattcggcttttttatttgaagtatgaaaaattaaaatattggatgtatcaggaggacgtctttgaggagttaaaagaagatccttattttcaggaatatacgatggaacagtgtcagcaggacctggcggcgcttgcatcctggggaaatctgcttacaattcaggatacccggaaagtgacaacgattgaggaatttaaaaataagaagtttcgctatcagctttctgagacagcagttgaagtcgagcgaatggtgattcggattgaaaatctgttgatcgaaggctcttcgctggagccgactttattggagcggcttcggatcagccttggaaggctgggggagatgtcacaggcagaagcggaaaagcggtatggatggtggaatgatctgaacagtgattttattcggttgaatcagaattaccaggactatatgagggaattaaacagtgtaaaagcagaagagatgatgaaaacaaaagagtttcttgtgtttaaagaccggctgatcgagtaccttcgctcgtttgtaaagagcctccaggtaaatgtgactgcgatcgagcagcagctccgaagtgttgaccgggaggtcgtgaatcagattttgcagaaagtgacagagtatgagctctcgattccgagaatggatacagagattgatgagcagatgatttatgacaaaatgaaggggcgttgggaaagtatttccgagtggttttcaggaaaagacgggatggaatcggaagcgggaaaagtgtttgatacaacaaacgaaatcatccggaagattaccagatatgccacacgaatcagtgagatgagcaatcagggctcaaatcggcgggaggaatataaaaagctggcggacatatttggaaagtgcagggatatcaacgaggcacatcgactgtcagcggtcgtattcgggatcgagaagccgctccatctcaaaggagaattgagcagagagacagacagcattaacagtggtgtatatgaggaagaagcatatgccgtgacagtcactcccagagtgcgcacctacaaacaaaaagccagaagaagcggtatcgtcgaccggtcaaaagagaaggaagagatgcggctgctgatgatcaggaggctggaagaggagaggaaactgcttgggagctatatacacaacggacgacttgagtttgcaagtcttccggtgatcgaaccacctgtacgggatatgtttcttctgtggctttcaaaggctctggaaaggaagaatcatcgtgcaaaaacagaagacgggcagatgtattatattgaacgggcagatgtgaaagagtattgtatgttagaatgtacagatggaacatttcagatgcctgcttatacaattgtgtttgaagatggggaatcaaaatga

SEQ ID NO: 50538 - DNA, 1146 bp, Ruminococcus gnavus CAG:126
atgagaacgttggaattattattaaaccgccgatggattttaaaatccagagagagggagctttattatcaggtgaaagaagagctttcatcgggagaagagaagaaattcctgatggagaagctcgggtatcaggtggtcgtgaatccgtatatgatcaaggtagaaaagatgcctgcagttccggaaaactggatgggcattttagaatttaaagagccgatcgagtatgtgtttttctgtcttgtgctcatgtttctggaggataaagaggcagaagagcaatttgtattgtcagaattgacagaatacgtacagagccagtatcaggaggagcagatcgactggacagtttaccggtacagacgtcatatgatcaaggttatgaaatactgcgtagccgtcggaattctgaatgtggatgatggaagtgaagaaggatttgcgaaagatgataccagtgaggtattatacgaaaatacaggagcatcccggtattttatgaaaaacttcacgcaggacatcatgggttacacatctgcaaaggagtttgaaaaagaagagtggatcgatgtgaatgaagacagaggaattgtgcgcaggcagagagtataccgaaagcttctgatgtcgatgggaatgtataaggatgcggaatcagaggaggattttgcctatctgagaaattacagaaatatgatacagggggacctggcagaattatttgactgtgaactgcatgtacacagcagcagtgcatttctcgtgctgggagaagagtgcagactggggaggtgttttccggaaggaaatacactttctgacgttgttcttttgacaaatcaactgatacagaaaagagtaacagagggaaggattaccgttccactggatgaacagatttgtattccaaaggaagtttttcgtgcaattgtggaagaatgcaaggaaaaattcggagaaggatttaataagacgtaccgggagatgacgtttgccgagttttatcgggaagtggaaagatatatggaagagctgatgctgatagaaattggagcagatcatgtgaaaatcagaccaacagcaggaaaaatctatggaaaatatccggaagattttttgaaaaacggaggaagagatgaatag

SEQ ID NO: 50539 - DNA, 4092 bp, Ruminococcus gnavus CAG:126
atgaatagtaaatggcaaataaacagagtgggattgctcgatttttggtactatgatgaggaagaatttgattttctggatggacgtatgctgcttcgaggggcaaatggttccggcaaatcggtaacaatgcagagctttattccgcttctgctggacggaaacatgcgtccggagcgtttggatccattcggttcccgcgccagaaagatggaaaactatcttctggaggaaggagatgagagagaagagcgcacagggtatctttacatggagttaaaacgcctggaaagtgaagaatatctgacacttgggatcggacttcgtgcgagaaagaataaaaagctggaatcctggtatttctgtgtgacggacggcaggcgtgtgggaaaagatttgtttctgtataaagatgtggaaaataagattacctgctcgaagggagaactgaaataccggatcggtgagggcggcaaagtgatggaaacacagggagagtatgctcagtgcgtcaaccgcctcctttttggttttgagacacaagaggaatacaaagagcttctggagcttttgatccagctgcgtacaccgaagctttccaaagactttaagccgaccgtgattaatgagattttaagcagttcgcttcagacactttcggaagatgatctgcgtccgatgtccgaggcaatcgaaaacatggacaatctgaaaacaaatctggatacattaagcgaaagcattcacgcagcgcggcagattgaaaaggtatacgatcagtataatcagattgtgctttatgacaaggcgctgctgttttcagatgcagggaaagcatatgagaactgtatgaaaaatggaaaacagattacggaagatctggcgattcatatggaagaactcaggaaggaagaacagcattatgaagctctgaaacaggaagaggaaattttaaaagaggaaaaaacctctctggataaaagtgatgcggcacagttaaaagagcaggagagtaagttgaaagcagagcttctggagagagtaaaggagcagcagacaaaagaaaaacaggaacaggaaaagaaagaaaaacagatcgatacagaagaaaagataaaagcagaaacagaaaaaacagaacgtatctgggaagagattgaaagttgtctggaagagatggaaacagaactggaagaaattccgtttgatgagtttacatttttgaagaatgatatcttacaggatcgggaaaaagaacagagtttttcttcacatcaccagcttttgaatgactatacaaagaaagtagaacagggaaaagaggttcttttggaagaaaagaacagccaggaaaaatatgatcgctgtcttctggagttggatgtctgcagggaggaaagaaatcttgcagaaaaggaaatgcagcaatatgagaaccttctgcatgagacaaagtcagaattgacagagcagatgtatttatgggaaaaacaaaatcaggagcttcaccttcttccggagaccatgcaggaaatctcaaggaaaatagaaagctatgaaatgggaagcgattattcagaaatccgggaactggccaggccaaagctatatgaactggaacgacagttttctgagaatagaatggtactggagcgaaatctgcaggaagagcaggagaatctgtatcaggcagaaacagagttggaagagtggaaaaatcaaaaggatcctgaaccagaacagccggattgtgtaaaggcaaaccgagagctgctaaaggagaaaaaaattccgtatttccagttttataagaccatagaatttgaccagatattagaggaagagcgcagaaatcatctggaagaagcattgctagagatgggcatactggatgcgctgattgttcctaaggagtatcgggaacaggtctatgctctggacaaaggagtatgcgatcgttatctgttcagcgatgtggcacatgtcagggaaagtctgcaggaagtgctggaagtggagaatggggaaaatgatattttgttttatcagaatatttccaatattctttctgcgattggatttggtgatacacatgcagagcacggagattcctggattgatgccaatgggaattaccgcatcggcgttctggaaggaacgatcaccggggaatatcaggcgcgctttatcggggtgcgtgcaagggaaaagtaccggaaggaaaagatagaagaattcaccggactctgcgaacagctcagagccagtgtggaagagttagaaaaacaattggcagaaaacagagcgcggacagaaatattgcagtcagaatggaagtcattcccgggagaggaagatttaaagacagcggcaaaagaattttctgatcgcgaatataagttagaacgaaagaataaaagactctgggagcatcaggaactggcagaaaaagaaagaaaagcactggatgaggtacgcatccgggtacgggaaatctgtggaaaatgttatctttcgccaagattggatttgtttacacaggcttttttggcattgcacagatataaagaaattctttcccagcttcaggttgcgcatggcaagtatcaaaatagtctccggtatatcatgagccagagagactatctggaagaactggagcttgatctggatgatattcgttacgaattcaatcggatctgtctgaaagtcagagaagtggaaggctttcttgcgtccgttcaaaagcagctggagctgacagattatgaagaaatcaaagaacggctggatcattgtgtagaacgccttggaaaacttccgggagaacgagagacctgtgtcaggaatcaggcggcacttcgaaaagagacggaagtactgcaggaaaaagaaagagaaaatgaattcagacaaaaggaactgcttgagaaaaaggaaaaatatcagaatgtatttgaacaggaatatcagcttgggtatgcagagcgagtatttgttgttacagaggatttggaagatcaggcgaaaaagatctgcagccggtttgcaggaagttttggaaacaagaagcagagcgatctgtttggaagtcttcaggaagcctatcatcagaaccgaggatatctgctggattaccagatcacactgcagtccctgtttgaagagctggatggagagggcagttttctggatgtaacggtgaagcgaattgatattttggcaaaataccgtggaatgccggtaaaatttaaggaactgattgaaaaaatgaatgaggatgccgaagtattaaaacgtcttttaagtgatcgggacagagaattgtttgaagatattctggcaaatacgatcagtaagaaaattcgtggaaagatccaggccagcaagcgctgggtggaaaaaatgaatacactgatggaatccatgcagacatcaagtggattaaagctgagtctcagatggaaaaataagagggcagaaaaggaagaacagctggatacaagagcattggtagaattattgcaaaaagacgtggaaattatgcgtgaggaagaggtagaaagtctttccaggcatttccgttccaaaattgaagaagcgagaaaaatttccggggatatgggatcggttcaatcgttccatgccacaatgcgggaagttctggattatcgaaaatggtttgaatttcagttggaatgccagaaaacgggagagaaaaagaaagaattgacagaccgtgtattctttacgtttagtggcggtgagaaagcaatggcaatgtatgtcccgcttttttcggcagtggtggcaaaatatgcgggggcacgtccggatgcgccgaagctgatttcactggatgaagcgtttgccggtgttgatgagaccaatatcagggatatgttccgtctgatggtggagtttgaattcaactttatgatcaattctcagattttatggggcgattacgatacagttccggggcttgcaatttatcagttgatccgtccggaaaatgcaaagttcgtatcagtgatccgctatatctggaatggaaaagtaaaggtgatgcttacaggagaggaatcgtga

SEQ ID NO: 50540 - DNA, 1320 bp, Ruminococcus gnavus CAG:126
gtgaaagcagaagagaaacagaagttgatgcaggagtgtttacagtattttcgtgagcgccctgtgtatgaaaaagtcttccaaaaaatgagaggaaaatatgagagcctcggacatataggcgggaaagtggtattgacagggttaagccttcaggataagagccaactgggaggatttttgcagaaggattacaccgagaatcagtctgttaccatatcagcggaagcttttgaaatctgtctgtccaaaagcaggttttctgatatttctctggaggaattgctggatgcttattttgggaaaaagctgacggtgaaaaaagaagagaggcgaaagaaacaggaagaaagagatgccttttttgcggaagtccaaagtgggtatgaggacacgacaggagcaaaatggcttcagaatacattgaaagagcatacgacaggctatgaaattttgcagcagcaatacaacaataatccggaaattctgcgggaaattctgaaatatgtgtttgaggcagtaaaacagcttccgcgaatggaagaaaaagaacttttaccggtatttgcggcaaagctgacaggagatcctcattattttgacgcaagcacagtggcggaaagattgctttttatcattctttctgcctgttggcaggaaacgaaagacagagaattatcagaagcggaaagaaaaaaccagattttttacagggcgggtattttaaaagatgatctgtcaaatgatacgcttgtctatggaatccgagcatggaaacacaatggaaatcttcataaaggaatcgaaggattttttcaggaaagagaaccagtccgcctgacgcttcgaacgattgggacgtttggaggggtgcatgcagaaagagagaaaatttatctttttgaaaatccggcagtattttctgtttttgtaaaaaaatacccggactgtgcagcaatctgcggaaatggacagccaagacttgcaacacttcttctgctggattttctaaaggaaaatcatagtttttattatcatggtgattttgatccggaggggcttctgattgcgcagagattgaaagaacggtatggagaaagtatctgtctctggaattaccgggcagattggtatgaaagatatctgtcggatgtaaatctgagcgaagtgagaatgaaaaaactggagaaagtatatctcccggaattgctggaagtgaaaatgcagatgcagaagagaaaaagagcggcgtatcaggaggcgatgctggatatgttggaacccgaaaaaaatgagtggatcacaaggagtgtgaagtga

SEQ ID NO: 50541 - DNA, 1488 bp, Blautia sp. CAG:257
atgaaaattcaggaaaaaatgagaaagccgatgatggaggcaaaatatctgaatgtagaaaacacagaaagatatcgcccgatcatccggcttttttatttaaaatacgaaaaactgaaatactggctgtatcaggaggaggtattcgaagagctgaaagaggatccttcttttgcagaatatacaatgatacagtgtcagcaggatctggcggctttggcatcatggggaaacctggtaacaattcaggataccagaaaggtcagcagtattgaggagttcaaaaataaaaaatttcgttatcagctttcagagacagcagtagaagtagaacgaatggtaatacgggtggaaaacctgttcattgaaggttcttctctggaaccaactctgttggagagactgcggatcagtcttgagaaaatggaagaaatggcttcccggaatgaggaaaagctttatggatggtggaatgatctgaataatgattttatccgtctgaatcagaattatcaggactatatgcgtgaactgaacagtgttaaagcagaggaaatgatgaagaccagggaatttcttctgtttaaggacaggctgatcgagtatctgcggtcatttgtaaaagggcttcaggcaaacgtatctgcaattgaacagaagcttcggaatatggacagagaaactgtgcatcagattttggaaaaagctacggcctatgagctttctattccccggatggatgttgagatagatgatcagatgatttttgataagaatcagggtcgctgggagagtatcgtggaatggttttccggaaaagacggggcggagtctgaggctgggaaggtatttgataccacaaatgaaattatccgtaaaatcaccagatatgctgcgcgaatcagtgagatgagcagtcagggctccaaccgcagggaagaatacaaaaaagtagcccgtatttttcatgagtgcagggatattcagcaggcccacagactggctgctgttgtatttggcatagagaagccttttcatttaaaagggaatttacaaagagaaacagacagcattaacagcggcgtatacgaagaagctcccggtgtgatcacactgactccaagaatccgtacctatcgggaaaaggcaaagagaacaggaattcgtgatcattcaaaagaaaaagaagaaatgcgtgcgtcagaaataaaaagactggagcaggaaagaaaactgctgaaaagctatatcaaagataatcgtctggagtttgcctctcttccggaaattgagcctcaggtaagagatatttttcttttatggctgtcaaaagcactggaaaggaaggatcacagggcaaagacggaagaaggccagatttattacattgaacaggcggatgtgcaggaatactgtactctgaattgtacggacggcacttttcagatgcctgcctataccatgatatttgaggaagagaaggactaa

SEQ ID NO: 50542 - DNA, 1146 bp, Blautia sp. CAG:257
atgaatgtactggagattttgctgaaccggagatggatcctgaagtcgagagatcgggaactttattatcaggtaaaagagaagctggcttccggtgaggaaaagaaatttttgagagaaaagctggggtatcaggtgattgtaaatccctatttgatcaaggtagaaaaaatgcctgctgtgccggaaaactggatggggattttggactttaaagagcctgtggagtatgtgtttttttgccttgtacttatgtttttggaggagaaggaagcagaagaacagtttgtgctgtctgagcttacagagtatgtacagagtcagtatgaaggggagcagattgactggacggtttatcggtaccgccgtcatatgatcaaggtgatgaaatactgtactgcctgtgggcttctgaatatagacgatggaagcgaagagggatttgcccgggactatacaggagaggttctgtatgaaaatacaggtgcttccagatattttatgaaaaatttcactcaggatattatgggctaccattcaccggaggactttgaaaaggaagagtggatcgacgtcaatgaggacaggggaattgtgcggagacagagagtttaccggagacttttgatgtctatgggcatgtataaggattcagattcagaagaagatttcgcctatgtgagaaattacagaaatatgatacagggagaactctccgagctgtttgactgcgagcttcaggttcacagaaacagtgcgtttttgattctgaatgaaaacagccatcttggcagatgttttccggaggaaaataccttgtcagatattgttcttctgtttaaccgaattctgcaggaaaagcttcagacaggagaaattcaggttcctcttgatgagcagatcaggattccaagggaagcctttcagagacttgcagaagaatgcagagagagatttggagcagcctggaataaaacatatcgggaaatgacttttggagaaatctatcgggagatggctgactatatgaaagaattaatgcttatagaagaaaaacaggatgagattgttataagacaggcagcaggaaagatcatgggagtttacccggcagatttctcattagaaggaggacagaatgaataa

SEQ ID NO: 50543 - DNA, 4104 bp, Blautia sp. CAG:257
atgaataacagtaagtggcagatcagcaaggtggggctgattgatttctggtattatgatgaagaagaatttgattttctggacggccgtatgctgctaaggggagcaaatggttcaggaaaatctgttaccatgcagagccttattccgcttcttttggacggaaatatgagaccggaacgtctggatccctttggctccagggcaagaaaaatggaaaattatcttctggaagagggtgatgaccgggaagaacggaccggctatctttatatggaatttaaacgcatgaaaagtgaggaatacatgacccttggactaggaatccgcgccagaaagaataaaaagctggaatcctggtatttttgtattacagacaaccgacgggttggaaaagatgtttttctgtataaggatgtggacaaccgtattacctgctcaaaggcagaactgaaaaatcgtattggcgacggcggaaaggtaatggaaacccagggagaatatgcggcctgtgtgaaccgtcttctgtttgggtttgagactcaggaggagtacagggagtttctggagcttctgatccagcttcgtacgcctaaattatcaaaggattttaagcctacagtaatcaatgaaatcctcagcagttctctgcagactctgtcggaagatgatctgcgccctatgtcagaagcaattgaaaacatggacagcctgaaaacaaatctggattctttgaatgagagcataaatgctgccagacagattgaaaaggtatatgatcagtacaatcagattgtcttgtacgacaaggctatgatgctgacggaggctctgaaaaatcttgaggattgtgaaaaaacagaaaaggagctctcagagagtcttatgaacagggagaagcttttgattcaggagaagcagcattatgaagctctggcatgtgaggagacggtattaaaagaagaaagcagttctcttgcggaaagtgatgcggcaaagctgaaagatcaggaaataaagctgacgcaggatctggatgaaaagcggaaggaagagagaaaaaaagaggctcaggaacaggagaaaaaagaaaaacatctggatgcaaaggaaaggctcagacaggaaaatgagagaaatgaaactatctgggctgacatggaaggctgtctggatgaaatggaagaggaaatggaagatatcccctttgatgagttttcttttttaaggaaagaacttctggaagacaggaatccttcttattcgttttcatctcacaatgctttattaaaaaaatatacagacaaggtggaagaaggaaaagaggggcttacggaggaaaaaaactgtcaggatcgatatgacagatacctgaaagagctggatgtctgtcagcagcagcgggatcaggcggaaagatcagtccagcagtatgaaaaactgtttcaggagacaaaggcagagctgacagaaaaaatttatatctgggctcacgaaaatcaggagttaaaaccagaaccggatgcactgagggaaatgacccgaaaaattcaggagtatgaattaggggaggactttctggaaatccgtgattctgtaaaaggcattctgttcagtaaggaaaatgaattgaaccgggaaaagctgcaactggaacaggctcatggcaaagcacaggaatcctttgaagaattaaatgcagaacttgaaagctggaataataaaaaagatccggaaccggagcagccagaatgtgtaagacaaaatcgaagaagactgaaggaacagggaataccctatcagcagttttataaaatcatagagtttgacacaggattaactagagaacaggcagaccgcatagaagaggctcttatgaatatgggagttctggatgccctgattatctcagaggaatatcgggaacaggtgtattctctggacccaggcgtctgcgacaaatatattttcagtgacgtttcccatgtgaaagagaatctgactcaggtcctggacgtggataatggagagcaggatattcttttatatcatagcatctccaatattctttcagcaataggatttggaagccgggaggagcagagcggtcattcctggattgacagagagggaaattaccggattggagtgctggagggtacggttacaaaggagtataaagcgcgttttattggtgcccgtgcccgggaagaatacaggaaaagtaagatagaagagctgacagtcctttgtgaacaggaagaaaaagaaatccggatgctggaagaagctatagtgcaaaatgaagaaagaaggaacaggcttcagagagaatggttggagtttccaaaagaggatgatctgaaaacagcggcaaaggccctggcagagtgtgaatataagttggaaatttcggtaagacagctgggagaacagcagatcattacggaaaaagaaagaaaaaatctggatcagattcggattaaggtcagggagctttgttcaaaagcatatttaacgcctcgtctggagctgtttgtacagacgctggatgggctgagaaattataaggagcttttggctagtctccaggttttatggggaaattatcagaatggtctccgatttgtggaaagtcaggaagcgtatctggaggagctggaacaggatctggacgaaatacggtatgaaagaattcggattcagcagaaaatacgggaattggaggggcttttggattctgtgagaaaacagctggagcttacggattatgagcagatacaggaacgcctggatttctgcatgaagcgtctcttgcagcttccgaaagaacgggaaaacagtgtaagggaacaggaagccctggaaggtgaaatccagacgcttgaagaaaaaatcaaggaaaacggtataaagaaacaggaatttctgaagaaacaggaaaagtatcagtatattttccagaaagaatataatttagggtatgtggaaaaaaattttgtaattacagaggatatggatgatcaggcgcggaaggtgtgcaggatgtttgcaggaggctttggaaataagaaacagagcgacctgtttggaaatcttcaggagatttatcatcagaaccggggatatcttctggattatcagattactctgttgtctctgtttggtgatctggatgaggacagtctgttttatgaaaaaagtgtaaagcgaattgatatttcggcaaaatatcggggaatatcagtgacttttaaggaactgatccggaaattgacagaagatgcggaatcattgtctgctcttttaaatgaaagagaccgggagctgtttgaggatatacttgcaaacacaatcagtaaaaaaatcaggataaagatccaggcaagcaggcgctggatagaaaaaatgaatacacttatggaatccatgcagacctcaagcggattgaaattaagtcttcgctggaagaataagcaggctcaaagagaagatcagctggataccagatctctggtggagctgcttcagaaggatgcggagattatgagggaggaagaggttgagagcctttcccgtcattttcggtcaaaaattgaggaagcccgtaaaatttcaggagaaaccggcgcagttcagtccttccatgcaactatgcgggaggtactggactacagaaagtggtttgaatttcaattggagtgccagaaaacaggagagaagaagcgggagctgacagacagagtattttttaccttcagcggaggagaaaaagccatgtccatgtatgttcctttattttcagcagtggtggcaaaatatgcaggagccaatgaggatgcgccaaggctgatttctcttgacgaggcttttgccggtgtagatgaaaccaatatccgggatatgttccgtctgatggtggaatttgaatttaattttatgatcaattctcagattttgtggggcgattatgatacggttccgggactggcaatttatcagctgatccgaccggaaaatgcaaagtttgtttctgtgatccgctatatctggaatggaaagaaaaagatcatgacaacaggaagtacggaacagaggtcatag

SEQ ID NO: 50544 - DNA, 1362 bp, Blautia sp. CAG:257
atgacagaaggagagaaaaataaaaacctgaaggaatgtctggaatattttcgtgagcgtccggtttataaaaagtttttctcaaaatggcgagagaaatatgccggactgggatatctgggcggtaagataacgctgaccggattggatcaggaggagaaggctcagctcagtggcttttttcaaaaggattatacagaaagcaggactgtgacaatttctgcgcaggtgtttgaaaaaaggcttcagaacagccgttttgcaggaatttcgggagaagagctgctgaaagcatattttgaacagccattggtaataaaaaaagaagaaaaacagaaggaactggaaaaaagagctttttatttcaatgatattataaaaaaatctcagggaaatacggcttctgtatggctgaagctggttctggcaaatcaccttccaggttatgaaattctgattcagcagtatggaggtgatccggagacatttcgcagtgtgctggagaattttatggctgcagttcagagacttacagaaatgtttagagaaggaaacggctgcagagaactgcttcctgtattttctgcaaaggtcacaggcaatcctcattattttgacgcaggtactgctgccgaaaaattactgactgcatttttttcatggcagttgtcggacacagactcagagaaaatgacaggtgcagaggaaaagaaccgccttttttatcagtgcgggcttttgagagacgatttgtctaatgaggttctggcttatggtatccggggctggaaaagagatggaagtcttcacaggggaatagaaggattttttcttgagaaggaacccatgcgtctgacgctgcacaccatgggcagtattgaggttatcagggcgcagcggaaacaggtttatgtagtagaaaatccggcagtattttctgttctgacagcccgatatccggaatgtgcggctgtgtgtatcaatggacagccaaggcttgccgctctgcttctgctggacagcctgaagggcagtcacagattcttttatgcaggggattttgacccggaaggtatcctgattgctcagaggctgaaagaacgatatggtgaaagtcttcatctctggaaatatgataaaaaatggtatctgcagtttctgtccgaagtggaactgaatcccagacggcttaaaaagctggaacaggtatatatagacgagcttctggaaatccgggagtgcatgaaaaagaagaaaagagctgcctatcaggaggctatgatggagatttatcttgatgcagtaaaatctgaagagtcagaaaatggttttgtatcatcatcagcagatgaaaatgaataa

SEQ ID NO: 50545 - DNA, 1485 bp, Roseburia sp. CAG:197
gtgcaggtaacagacaagctaaccaaagcacttactgaagcaaaatatttgaatgcggataatgtcagcaggtatcgctgcattatgcgcattttttttgaaaattacgaaaaacttcgttattggctgtatcaggaggaggtttatgcccagatggtacaggatccgttttttgcagattataagccggagcagtgccagcaggatctgacaatgcttgtagaatggaagaatctgaatacgattcaggatacgaaaaaagtatcttccattgaagagtttaaaaataaaaaattcaggtaccagatgtcggaatacagcgtggagattgaacgtctggtattacggttggaaaatctttttatcgagggggcttctttggagccgacgcttttggaacggattcggataaatattgcgcgttttccacagatggcggaggaagatatcaacaaagtttatacctggtggaatgatctgaataacgactttgtgcgtctgaatcagaattatcaggactatatccgtgatttaaacagcgtgaaggcagaagaaatgatgcacacaaaagagtttctggtgttcaaagaccgtcttgtcgagtatctgcgtaattttattaaaggattacaacgcaatgtcggtgtgatcgaggaagacctgcgaacattggaagctgggaataagcagcaggtgtttgaaaaaatcgtgcagtatgaactgttgattccacgtatggatgtggaagtctcacgggaattattggaagaaaagacaaagggacgatttcagagtatatatgactggtttgtctcttcgaatggcgaggaaaacgaggccggcaagctttttgatgcgaccaatgaaattatccggaggattacaagatatgcagcacagctcagcgagaaaaatgcgtttggtgcgaatcggcgggaagaataccgcaaagtagcagaactttttttgaagtgtgaggatgtgcagcaggcacacaggatgtctgctatggtctttggattggagagaccctatcatttaaagggggatctggtccgtgagacggacagcatgaaccagggggtttatgaggaaagtccgtttgaagtaatgttgaaaccgcgtgtgagaacctacagggagaagtccggccgcagtgcaatccgggaatctgcagaagaaaagcaaagaacaagacggcagatgattgaaaaacaaagagaagatatgcgcaggctccgggaattggagtccggtggaaaaatagacttttccacattgccggtcattgagtctcatgtgcgggaaattttgttaaagtggatttccgatgcgatggaaaatccggcaggtgctgcaacaacggaagagggacaacattatatgcttgatatgagtcgaaaagaggaacgctgtgtagtgcattgtgaggatggaaactttacgatgccaaaacttgcgattgtatttcaggaggaggcatga

SEQ ID NO: 50546 - DNA, 1146 bp, Roseburia sp. CAG:197
atgaaggaactggaagtactgttgaatcagcgctgggtgttgaaatcggaaaataaagagttatattaccagctgagagatgcaatcggtgatattcgtaagtatgcatctgacaagctgggatgccaggtgacagagaatgcgttgatggtgaaaatggaaaagattccggtgattccggagacttttatgggaatccaggatttttcttcgaaagaagaatatgcattcttttgtattttgcttatgttcctggaagaaaaagatacgcaggaacaatttattttatcgcagcttaccgagtatatttctgcaaatatgccgggagagccggtcgattggaccgtatatacgagccggagaaggctgatcaaagttttacgctatgcagtgacacagggaattgtcagcattacagatggagcggatgatgcttttatggaagatgcgacaggggaagtgctgtatgaaaacaccggagcatcgcgttattttatgcgcaatttttccaaggatattacggattatggaagaccggaagattttttggagagtgactggtttgcgatggatgaggaccggggaattgcaagaagacatcgtgtgtataagcgcttgttatttgcacccggcatgtatcgcagggatggatcggaagaagattttgagtacctgaaatattatggtcgacgtcttaccgaagaccttgaacagaattttgactgccatgtgcatattcacagaggaagcgcctatgtaatgctgcaggatgacggtcggatgggaaatgcatttccgggaaacaatgtgctttccgatattatccttttgtgcctgtcagaaatcaggacacggatagaacaaaaagaatggaaagtacaaaaggatgagatttgcattgtggacatggtgtcttttgaacagatgatacagagtgtccgacaacagcatggacagggattttccaagaattacagggagatgccggacagtgagtttatcagcacggtaatgtctgccatggaattatggatgtttataaagcgggacagaccggcacatcaggtggaaatctacccggcagccggaaagctgcagggccggtatccaaaggattttacaggaggacagaaaaatgagcagtag

SEQ ID NO: 50547 - DNA, 3678 bp, Roseburia sp. CAG:197
ttgtcaaaaaaagagctcgagaaccgcatcgcagcaggcggacaggtgtttgaccgtcaggtggattatatggaatatgtcaatcgccagattttcggatttgacacagtagaggaatacaaagagatgattgatctgctgattcagctgcgtacaccgaagctgtcaaaagattttaagccttctgtcattaacgatattttaagtgattccctgcagccgctttccgatgatgatctgcgtccgatgtctgatgcaattgaaaatatggatcagatgacgatgaacttaaaaagccgtcaggaggcgcagcaggcggcacagaaaatccaaagtgtatatgacaaatataacaggttggcattatatgaaaaagcaaaaaaatatcaggatatttgcagcgatatagaagctgctgacagggaacagaaaaagcgcaggacggacattgcagaaagtgaaaaagaaattgcttcattattcgacaagtatcaggagatgcaggcaaagcatgatgcaatggagaaagaaaaggaatccttaagcaagagtgacgcggtaggtttaaaagaccgggaagcagagcttgtgaaggagatgaagcgccagcaggggattattgacagtaagaattcggctttgcagggaaagcaggaacagtaccgggaggaagaggacaaacagaaaaaagaagaagaccgcaaattcgaaaaagaaagagaaatttgtaatctttttgaagagatgcagacagaggcggattgcatggcttttgaggaacacagcttttttcaaaaggaatgtgaggaacatttggaagaaacaattgcatttgatacgcatgaaaaacaattttctgatgtaaaaaacaaaatacataaagctttctggatcctgcaggaaacgaatttgcttgaaccacgggcagaagaacttttgaaacaaagagacagcatccgaaaagaactggatgcgatacagcgggagatcgctgcgaaagatatgctttttgtgcaggaacaaaatgcgtggaaggaagctttgtatgcgtggaatggttcgaatacggaacttcttctggataaagaacagttaaaagactgctgtagatatgcagaggatttcggggaggacgcagactttgccgaggtgcggaaacaggtggcagacatctggttttcctataaaaatccgttggagctgcaggtacatgaaaaggaaaatgtgtatgagcagaagcgactggagaaagaacagacagaagaggatctgacagaatgggagaatgccaaagatccggaaccggaacgctcggacgcagttataaaaaacagacagcgtctagatgaactgcagattccgtatcaggagttttataaggcgattgagtttggcgattcgctgagcgaaatggaatgcaaccatttggaagaagcgttactgcatatggggattctcgatgcactggtcgtggatgtctcttaccgggagcaggtgctgacactgtcggaaggctgtgaagaccgctatctgtttgtgcagaagtcacacagcggaaaaagtctgctcgatgttctggaactgaacgattccatgaatgacattttttctaatcagcgtctgacaggcattttgtccaatatcgcatatgacgaggatggtgtaatctcggtttccccggaaggcatttatcagatgggcgttttgtgcggaacaatcacaggggaacatgtggccggatttctgggcactcgtgcaagggaacgaaaccgtcaggagcacatcaaagcctgcagggaaaaaattcaggaattgcagaatataatgaagcagctggaagacgagaagaatgtgcttgaaaaccggatgcagaagctggaaatggaatatcaggctttgccggaggatacagatttgcgtgcggcctggaagatgcttgtgcaggagcagcacagatatgaaataaagaagacggaatgtagtgaagtagaggaaaattggaagaagctttcggaacagatacaggaaaagaaaaagaaagcgatggaaattgcgcagcagttgtatctgcaatgcagctatgcagtattccgggatgccgaggaagcagcagcggattatgagaagaatctgattgctttgaaatctgcacatgagatgtttttacagagtgtaagacatattcaggatctggcggagcgtctggaaaatattgacgcagatctggaagaaatccgttatgatctctcaggtgcacagcgtcagcttgcaaaagtaatgcaggaacatacatcggttgtggagcagttgaaactgacggattatgaacagatcagggagcggctggatgcctgcgttgcatggctgaatgattatccggaagaattgaatcaatgtgcgcagaaacgggcaaaagtagaggaacatctgcgtactttgtgtaatcaggaagaagactgggaagttcaccggcagacattggaagaaaagtatatctggagaaagaaatgttacgaggcagagctggcacttgcttatgttccattcccggaggatatgcagatggatcttgcgaacatttgcatatatttagagagtgatgtaaagacacttggaaagaaaaatatcattgctagtctgaaccaggtatattttgaaaatcgtggattcctgaatgaatatcaggtgatgcagggagatttgtttacggaatttgatgaaaacatgccagaaggggagcaagaagctgcaagacaggactttacggcgcgttatcagggaacaaagcttccgttcgcgcggcttttggtgcatttacaggaggacattgcgcagttacaggatttgattaaagcaggagaccgcgagctgtttgaagatattctggcgaatacagtcagtcgcaaaatccgtgggaaaattaatgcttccaatgcatgggtagagaagatgaatgctctgatgggcagtatgaatacatccagcggtttgaaactgagtcttcgctggagaagcaagacggcagagagtgaaaaccagctggatacaaaagaattggtagaactgttaaagaaggactaccggttaatgagcgaggaagaggcagcacgtctgtccacgcattttcggtcaaaggtcgaagaggcgagaagaagtgccaaagacagcggtggtatgatttcgttttatcaggtgatgaaagaaacgctggattatcgtaagtggtttgaatttcagttgttttcccagaaaaagggagagcggatcaaggaacttaccaacagtgtatttggtacattcagcggtggagaaaaagcgatgtctatgtatgtgccgttgttttccgcagttgtcgcaaaatatcagggaggacgcgcagatgcaccgcgtctggtttcgctggatgaggcatttgcaggcgttgataaccgtaacatccgtgatatgttccgtctcatgaccgaattttcttttgattttattatcaattcacaggtactttggggagattgtgatacattagatgcacttgccatctatcagttaatacgaccggaaaatgcgaaatttgtgactgtgatgccgtatgtatggaatggtcatgccagagaacttatggaaaatgaagaggcagtagaacagcggagggcggagattgaacagacagcaggagcatag

SEQ ID NO: 50548 - DNA, 1281 bp, Roseburia sp. CAG:197
ttgaacagacagcaggagcatagttgtattgcatattttaaatccaatccggtgtggaaccgggtatttcgtggattttgggaaaaatacaggtcttatgggactttttcgggaaaagtcgtgttacagaaacttacagcggaagaagttgaaggattggagggcttttttgcaaaaagtttccatggaaaaaagagtgcaacggtatcggcggagcgctttgcgcaggcattgatgaacagtagattttctgatatggaacctgaacatttactggaactgtattttcaggaaacactgatagggaaaaaagaagaacgccaactggaagaacacaaaaaagatgttttcttagaacagtggaagaaaacatatcagggaacaccaatagaaaaggctttgacacaactgctggatgtggtacaggcaagtcatacaaaaaatttagatgagtgggagcaattgttgcgtcttggcgcagaaatctataattgttttccatatcggaaaaacaggacgagatatcttgctgtttttgcaacagaaatcaccggaaatccacatgcttttgatcagggaagttcattggggacttttttgtatcaagtgatacagatggaactgttgcggagaaaggtttttccacagaaatcggacatttttccggcgtttttccgacaaaaatgttttttcgcagagggaatacttattgatgatatatcaaattatgtgatgttatcccatgtaaaagcacaaaaaaaagatggtactttccatgcggggatggaagggttctggcaggaagatgatatggtacaggtgccgcttgcggttctgtcacagtggaacagaatgttttgcatagataatgaaatgtatatcgtggaaaatccatcggtatttgcgggactttgtgccaggagtgatgagtcggtttcctgtatgtgcatgaatgggcagccccgcctggcaggcctggttacattagatcttttggcggcatcagggactgtggtatattacgcgggagatttggatcccgaaggcctcttgatcgcacaaaaaatttcgaaatattatgcaggagaatttcattattggcatatggcacttgaagattatgaaaaaagcaagtcgaatgaaattatttctgagaaaagaataaaaagtttggagcgtattacggatgtagaattgtttcctgtgatagaaaaaatgcgaattgaccgcctcgccgggtatcaggaaaaaatagaatatgaaagctgttgtcagaattga

SEQ ID NO: 50549 - DNA, 1596 bp, Roseburia intestinalis CAG:13; identical to SEQ ID NO: 49980

SEQ ID NO: 50550 - DNA, 1146 bp, Roseburia intestinalis CAG:13
atgaaagagcttgaaattttgttaaacagacgctggatactgaaatcagaagataaagaactgtattacagggtcagggatgcagtcggggagatccggaaatatgtgacagataaattaggctgtcagatcatagataattctttgctgataaaactggaaaagataccggtcatcccggagcagtttatgggaattggccagttctcttcgaaagaagaatatgtgtatctgtgtattttattgatgttcctggaagataaagatgcacaggagcagtttatactgtcacagctgacggaatatatgacggcggtgatgcccggtgagatcacagactggacattgtacaacaaccggagaaaactcatccgggtactccgctatactgtggaacagggaatggtccgtgtgacggatggaacagatgatgtgtttatggatgatgccgggggcgaggtcttatatgaaaatacaggggcatccaaatattttatgagaaatttttcccgggatatcatggagtatacaaaaccggaagatttccgggaaagtgaatggtttgaagtggacgaggaccgcggattagccagaaggcacagagtgtataagagactgttgtttgcaccggcagtgtacagggaagatggatccggggaggatttcgagtatttaaaatattacggatacaggctttctgaagaattagaacagctttttgaatgtcatgtacagattcatcggggaagtgcatttcttttatccggacaggactgccggatgggagctgcttttccggagaacaattccctggcagatattttaatgcttgcctttggaaagatcagagaaaaaatagaaggtaaggtgtggaaaataacgccggaagaaatgagtcttgttgataagattgagtttgaatctctgatcctggatgtgaaaaaggaatatggatctggttttgcgaaactttaccgggatatgccggaaggggagtttataaaaaacgtaacagatgaaatggaacgctggatgtttataaaaaaagtggatgatatgcatcagataaaaatctgtccgcttgtcggaaaaatacagggaagttatccgcaggattacacaggaggaaatgaaaatgaacagtag

SEQ ID NO: 50551 - DNA, 4110 bp, Roseburia intestinalis CAG:13
atgaacagtagatggcaggcaaataaaattgggctgatcaatttctggtattatgatgaacaggaatttccttttgtaaaggggcggatgcttctccgtggttcaaacggttccggaaaatcggtaacgatgcagagtgttgtgccgttactattagacggaaatatgagtccggagagacttgatccgtttggttcaagggatcgtaaaatgagcagttatcttctcgaggaaaatgatggaagggaagagagaactggttatctttatcttgagttcaaaagaaaagacagtgaaacatatctgacgatcggaatgggaatccgcgcaaagcgaaataaaccgctcgataaatggtatttcagtctgacagatggaagacgcatcggcaaagactttttcttatacaaagatatgggtgagaaagtgaccctttccaaaaaagaactggaaaacagggtggcagaaggcggaagagtatttgatcgtcaggcagattacatggattatgtcaacagacagatatttggatttgagactgcagatgaatataaggaaatggtagatctgctgatccagcttcgaaccccaaagctgtcaaaggatttcaaaccgtctgtgatcaatgatatattgagtgattctctccagccgctttcggatgaggatctgcgtccgatgtcagaagccattgaaaatatggacatgatgaatatgaatttaaaggggcgcagggaggcgagaggggctgctgaaaagatcaatgcggttttccagaaatataataaacttctgctctgtgaaaaagcggacagatatgaacgtacaaagcagagattacaaaaagcggcagcagaacaaaaggcatatgaggataaatatgcagaatgtaaccggaagattgaggaacttgaaacagagattctgcagatgaatcagaagaaggaaaccttagaaaaagaaaaggagtccctcaataaaagtgatgcagttgcgctaaagggcagagaggcacagctcaccaaagaacttgaggctcatgataaaatccttgcggataaaaagtcatttctggctgcaaaggaagcacagtacagagatgtcacaaaccagatcaaagaggaagaaaacagaaagtatgaaaaagaaaaagaagtagagactctgttagaagatatgcgtgaggaagcagaccagatggcattccaggaatttgcatttatgagtgaggaactgtgtgctgatctggaaaatgattataaatttgatcttcacaggcagcagtttgaacatacacgtcaatatatcaatgatggagaaaaattgctcgcagaacttaaaagtcttgacaggcggaaggatgaaatgatccagaaaagggagaagcagatccgggaattagacgcactccagcgaaaaatatcggaatttgaaaacatgctgatccaggtagaaaatgagtggaaagaagcactttatcaatggaatgaaaacaatgtggaactgaaattggaaaaggaactattgagggaactcagtacattcgcagatacgtatgaggaaaattctgactacgcggtggtacgccagaaggctgcagatcaatggatcaaaaagcagtctaaaatagaaacgcagatcaattccattcttctggagcaggaaacagcaaaaacagaactcgatgaagcaaaaacagagctgagtgagtgggaaaatcagaaagaaccacagccacagagatcagaagctgtgataagaaaccgccagagactggatgaagcagggattccatatcaggaattttataaagtgatagagtttggatcggagctggatgaagatgcctgtaaccatttagaagaagccctgctaaaaatgggaatactcgatgcaattgtggtggatgagcaatacagggaacaggttcttacaccggtaaaagggtgcgaagaccattatctttttgcaggaaaaacgcaggcagaaaagagtctgttggacgtactggaactaaacgaggaagtcaatgatattttttcaaaccagagactgacaaaaatcctttcaagtatcgcttatggcggtgagaatgatgtgtcagtttctgaggatggttcctatcatatgggtgttctggctggaacagttaccggggaatatgaagcagggtatctgggcagtaaagcgagggaaagacacaggcttgcaaaaatagaagaatgtaaaaatctgatattggtgttagaggaaaagattgcaggtttagagagagaacgaaacaatttatcagaacggaaggaccggctgaaatcagaatatgatgcgcttccgggcgatacggatctgagggaggcaatgaagctgctcttagcggaagaacaaaagtatgaattgctgcggagtgaaaatgaaaagacgggggagcagctgacagcctttctggaagaaataaaggaaaagaaaaagggtgcgattgagatcgctgaaaaattgtatctcaactgtacttatgagacgttccagagtgcaaaaagtgcagcggaggaatatgacaaaaatctggtagagttaaagtcggcacatgaaatgattttaagaagcgcggcatacttaagggagcgcaaagttcatttagaagatttagatcttgatatggatcagatcagatatgacataagggagaccgaaaagcagatcagttcaaaacaggaagaaagaacatccattctggaacagcttgccctgacagattatgaagcggtcaaagacaggttagatgcctgcatttcgtggctgaatgcatttccgaaagagtttcagaaacgcgtgaccgaaaaaacacaaaagacggatgaagcaaagctgatcgaagcaaaccgtatcagcaatgcggatacgataaaggtatatgaaaagaaagtggaattttaccggaaatgttatgaacaggagcggggacttttttatgtggctgtaccagaagagattacggatgatgcagggcatatttatgattatctgctgacggatatcaaagatatggaaaaaaacagtattatcgctgacctcaacagggtatattttgaaaacagaggttttctgaccgattatcagcttacgcagaatgaattatttgcagaatcagatgagagtgaaaaaatagatgattataccccaaagcggcttgatatcacagcaagatatcaggggacgaaggtaacgtttgcaagtctgctgacacatcttgatgaagacatcagtgagcttgaaaacctgatcaaagacggagaccgggaattattcgaagatattctggccaatactgtgagccgcaagatccggggaaagatcaatgcgtcgaatctgtgggtgcagaaaatgaatacgctgatgaatggcatggatacgtcaagcggtctgaaactgagtctcagatggaggagtaagacagccgaaaaagaggatcagcttgacaccagggaactggtagaactgttaaagaaagattaccgtctgatgagtgaagaagaggcggcaagactttctgcacatttcaggtcaaaggtcgacgagacgagacgcaatgcgcgtgacagtgccggaatgatctccttttatcagatcatgaaagaaacacttgattatagaaaatggtttgaatttcagttgttctcccaaaaaagcggagagcgccagaaggaactgaccaatagtgtatttggtacgttcagtggaggagaaaaagcaatgtccatgtatgtaccgctcttttctgctgtcgttgcaaaatatcagggcggcagggcggatgcgccgagactgatctcgttagatgaggcatttgccggtgtcgacaaccggaatatcagagacatgttccgcctgatgacacagtttgaatttgattttattatcaattcacaggtattgtggggagactgtgatacgctggatgcgctggcaatttatcagctgatccgcccggaaaacgcgaaatttgttaccgtaatgccttatttatggaacggacacagtaaagaactgttagatgatgaagaaaaagtagaacaaagagggatagagattgaacaatttgacagggcatga

SEQ ID NO: 50552 - DNA, 1281 bp, Roseburia intestinalis CAG:13
ttgaacaatttgacagggcatgaaaagttaaaacgtgactgcgtggcatatttcaggcaaaatgagatctggcagcgcatctttacaggttttcgtgagaaatacagttcctacggcagattttcgggtaaagtgactgtaaagaatatatctggggacggacttgacacgttagaaggattcttctgccagaattttcatggcaaaaaaagtattacggtttctgctgaaaaattccgaaaagcactttcctgcagcaaatatgggacggtcacaccggaagaagtgctggcagagtattttggaaaagcgctgattggaaaggcagaggaaaaggcatttaaagaaaatcagatacgggagataaaaaaggagttccttgaaaatttcaaagggactcctgcctttttggagtttgatacattcgaaaatattttaaaaagcagcgacaaagagaacttaaaagagtggaaacgccttctctggctgtgtgcgaacctatataacgctttgccgtaccgcacacaaaagagcgtgtacctcgcggtatttgccgctgctgtaaccggaaatccgcatgcatttgaccagggcacggcagagggaaagatcctttatcaggtcatacagatggatttaggacagaggggcatacaggtggaaactttagaaatgtttcctgcatataagagacagaaaagctatcttcttgccgggatattaatcgatgatatttccaattatgcattgctttataacgtgcatgcgatcaaaaagaacggagaattacacagagggatggacggattctgtcaggaaaaaaatatggtgcaggtgccgcttacagtactttctgaatgggagcgtatcgagtgtgtggatcatgagatctttatcgtggaaaacccgtctgtttttgccctgatctgtggagaaaagtcgtgcatgtgcatgaatgggcagccaagactggcagggcttttggtgttagaactgcttgcaaagtcaggaactaaggtatattattccggcgatctcgatccggaggggatactgatcgcacaaaaattatcgcagtactatcggggaacattctgctattggcatatgacgcctttcgattatgagcagtgcagatcgaaagaaataatttctgaaaagagaaagaaaatgctgcaaaagattacagatgaaaggctgctccctgtcgtggatgcggtaacaaaatatgggatggcgggctatcaggaaagtatcggattgaatcagatttccatttga

SEQ ID NO: 50553 - DNA, 1491 bp, Firmicutes bacterium CAG:94
atggcgctgcaggcagatttgttggagagcatcccccagacaagatatttgtctgcggatagttatgtgtcctaccgggccattatgcgcacgttctacctggaatatcaaaaaatgcgctatcagctggataaggatgcccttctggccctgttgcagcaagaccctctttttgccgggtatactgcggagcagctgataccggacctagaccagctagtcaagtggaaaaacctgacccctatccaggacccgcataaggcgtacaccatcgcagattttaaaaaccgccagttccagtacatgatgacagaggccgccctggaagtggaacgcatgaccattacgctggaaaacctgtatacccacagcacaggcctttcttccagcgctttccgccggatacaaggggctttgcgggctgcggaacagctggaaaagatgtccctgaaagaggtgggggaatggtggggggaactgcaggaggatttccgccgccttcgtcaaaaccatcaggattatctgcgggaattttacggccccagcgcggaaaagcagatgaaatcggcggagtttctggtgtataagcaacatctcatccgttacctggaagattttgtccaggaccttcaaagcagcgctgcgcagattggtgcgctgctggaatcgttttcggaggagcaggtccaccgcatcctcacgttggtgcacaaaagcgcgctggaagtcccgcgcccccatggggacccgggccctttctggcagcaggaactttggcagcaggagcagggcgtgtggaattcgctgatggagtggtttacagggaaagattccacggctaggcaggtgatggacgttacaaacgaggtcatccgcagagtggtccagaatgccgccatcttggttcaaatgcagaatatgggcgtcagcaacaaggcggagctgcgccacctgatgacgctgttcgcgggtgtcccctccatggaggatgcccaccggctctccgccttggtgtttggttcccaacaatgcaggcactttatcagaaacgccgagcgcgagacggaacgcatcgacttgagtacctacgaagagccgcctctggactacgccctgcagccaagactgcgcacctataagccccgtatggaccgcagcgggtttgcggataaaagcgcggaaaaggcggcccagcggaagaaaatcctggaggaggagcgccgccttcgggaaaagaccctgcactatgttcacgaggggaggctggatttctctgccttaaaggagccggtcccgccggaggtgcgcagcgtattcctgtcgtgggtagctatggcaaacctcgcgcccgatggaagcgggatcacccagtatgggcagcgttttttcctggaaaagcgcggggagggaacgtgccagttggtgtgcacagacggcacgctttccatgccggactgcgtgctggtgtttaaggagaatgggtatgtatga

SEQ ID NO: 50554 - DNA, 1167 bp, Firmicutes bacterium CAG:94
atgtatgagtttcggtttttgctggataggttctgggtgacccgggcggagaataaggacctgtattttgctgtaaagcgggcgctgccccattaccgccgccttgtaaacgaacagctgggctggaacctgattgtcaatgaagccgtggtaaaactggaaaaagtcccggcaaaggccatggcttggatgggaatacaggaatttcaagaaaagctggattactgtctgctgtgtgccctgctgcttttcctgtccgacctggatgacggagagcagttcctgctctcttcgttgaccgaagggctcgaggctctccttgcggaggtgcagccggtggattggacccggtttccccacaggaaatccctggtgcgggtgctccagtacgcgcagcggacagggatgcttcttgtctacgatggcgccagcgagggctttgggagcgaccagacccaggaagtcctctatgaaaacacagggctttcccggcattttcccacacattttggccgcgataccctgcattgcgcgtccatagaggattacgaggcgttcttgtgggagggggaagaagcggaccgggggcgtcaaaggattcagcgggtgtaccggcagttggcgctggcgccggcgctgtactggtctaggcagaaccgcagcgattatgaatatgtgaaaaaccagcgttcgtggctgaaccgccacttgggggaagccatgggcggggaactccaaatccacaggaacggcgcgttttttgtgctggatgaggaaagccgctttgggctggtccacccgcgggaggcggctatccccgaggcggcgttgctgctttgcgggcagctgcgggaacaggttgcggcgggtgtttacccccgccaggaggacgatacggttttcctaacccggcgggaattccagcaggagcttgcccaatgccgccagcgctgcggagcgggatggggccgccgcctgcgggagcttccccaggaaaagctggcacaggagctggttgcctacatggccggttggatgcttttagaggagcgggacgagggctttttgctctatcccgctgttggaaaatggataggacactatcccgccggctatcagggcgggcccggagaggagaagtgggatgaaccgctggaagatgcatag

SEQ ID NO: 50555 - DNA, 4047 bp, Firmicutes bacterium CAG:94
atgaaccgctggaagatgcataggctgggctttctcaatttttggctgtatgattgcgaggagttctggattcgggatgggcactttttgctgcggggcaacaacgcctcgggcaaatccatcaccacccagagctttatccccttcctgctggatgggaataaaagcccggagcgcttagacccctttggctcccgggaccgaaaaatggagtactacctcctgggggatggggaacgggaagaatccaccgggtacctctatttagagctgaaaaaagacggcgtggaagagtacctcaccataggagttggaatgcgcgcccaaagggggaaaggcattgatttctgggggttttgcctgtgcgatgggcgccgtatcgggaagggcggtgtctccctttacgaaacggtgggagggcagatgctccccttgagcaagcagaagctccgcaacctgataggcgatgaaagcaactgggcagaaacccccggcacgtacaaacagctggtcaacgacagggtgttccagttccgtgatatccgccaatatgaacagctcatccagctgctcatcaaagtgcgcactcccaagctttccaaggagtccttccgcccctctgaagtgaaaaagatattgaacgaatccttgcaagtgctgacagatgaggacctttccgccatggtcagtacgatggagagaatggacgccctggaagacacgttgcgtgattttcagaccgccctgcgggatgcggctataatccgcaacgagtacagccgctataaccaatatatccttggcagaaagggccaggcatatctgcaagcccacaacaatgccctgcggcttcgcaaccagctgcaagacgccaaagaggccctggaacaactggagcaggagtttcgggaccaggcccaaaagcagaaggacgcggaatccctttttcagcaggcaaaagcccaatatgcagccttgggagaagacggcctggaatcccagcgcaagcggatggaagaggaggaggccgcatgcagccagtttgcggagcagctggcagaggagagacgccagctggagaacctccacagcatcatcgaccgctgcgaggtggatttgcgccaaaaggagcgccagctttccgaggcgcaggaccagctggagtgcggtatacgtgagctcaatgggcaaaacgagctgctggccctgggggaggagcaccaacagtatgccagggcgctgcgccaaaggtcccccagggcggaaagccacagcctttccgctgccctccagcagaggaaaaaacacattggccaggtgctggcgtgtttccgggagctgtcccaagccaaagaaacctatgacgcggcctgccaggcgctggatgaggcggatgccgcggaaatccaggcaaaaggcgctttgcgcgatgggcagctgctggagcagcaggagcgtgacaacctcttggaagccgttgcccgttggcaggacaacagccaggagctccgcctttccacggaagagctgcccagcctaaagcggatggtcgtccaataccgctccccggcggactgggcagaggtcagccgctttgtcggttcccgctacctggagcgtctcggcaggctgcagggcgagaaaaacaaagaggagctccagctgaaagagctaaggcgggcgcgggaagagatacgaaaaaccttgacgctgctccgggggcagccggagccgattccaccccggagggaacagattcaggccacccgcgtgcagctgatgatgcggggcattcctcacgctgccttttacgaggtcgtagattttgccccggagctgggacagtctcagcgtgatttgttggaagctcagcttgccgacgccgggattttggatgcgctggtgatcccccgggaaaacctggaggaaatccgggagctgctccaggaatacccggaccggttcctgtccccagacccccctgttcgagaccctattaccagtctgcttcccgatggggatctgcgcttccgggagacggttctttcctgcctgcggggcatttcccaatccgacttgcaggcgggcaccgccctgctgcccgatgggagataccgctgcggcacaatccaagggcatagccgccaggaaggccctgccggctttgtgggcgccgccgcgcgccgcgccaaccgggagcggcagctgcgagagtgtgaggagcggctggaccgtgccgaagcgctggtacgggaaaagcagtccgccttggatgggttggagcgccgtctggcaaggctgcaagaagaaagggaacagctgccgccggcaaccgagctggaccaggccttggagatacttgcccaggcgcaagaaagcttctctgcagcacaggccaggaaagagcggtgcctggaccaggagcgggctgccaaacaggctgttgcccgtgtggagcagcagatccgggaagggagccgtgggcttccctatctgcgggccgaggaagcctatgaggaggcgctggatgccgcggaatcctaccaggcgctgctgggtgcgctgggggtcagctacagcgattggatccatacagccgacgcagtcgaagcggccggggaccgcatcgccgaactccgggaccaggcagatgtgcaaaacagaagcgctgcgcaaacccaaaaacagctggagctgtcccgggcgcgggtgcaggccatccaggaattcctggaccgcccggagaacagggccagggcccagcggcgcgctgcgctggaccaggagatggaggcccagcggctgcggatgaacgaggcggaaaagcgctgtgccgccctggaggtagaacggcgcgccaaaggggagcagctccggcagcgcaatgaactgctttgcggcgcggtgctagaggaggatgagctgaagcggtatttccaagaggatttgggactggacctgtgccccctgccccaaggcaccctggagcagtgcgccggggaagcctggggaaaagtccgcccggaagaccgggaacgtacccccgagcgcatgggggacgcccttcggaacaattacctgcagcacaacaattcgcttttgaaataccagcccaaaatccagctggtgtttgaggatgccgccaagcctgggtggctccgccagcggctatgcatcagccttcagtgggaggggaaggacctctccctctatggattcctccaggagctgcaaaaaaagatagatatgacagctgccctgctggaggaaaaagaccgtgacctgtttgaaaatatcctggcggagacgctcagccataaactgcgggcacgcattgaggagagccagcagtgggcccggaacatgaccagcctgatgggaacgctggaaacctccatggggctgactttccgcctggagtggaaggccaaaaaggcggaaggggaatcccagctggatacggaacagctggtccggctgctgaacaaagaccgcgcccttctaacccgagaggacagccagcgggtgtccctgcatttccgcgccaaggtgaaacaagcccggcaagaggcggttttgcaggagcaaatgaccagctacgcagatttgatacgggatgtgctggactaccgggattggtacgagttccatctgctgtaccagcgggacggcgacccgagaaaagagctgacagaccgcgcctttaacaaattcagcggcggggaaaaagccatggccatgtatgtccccctgtttgcggcggtttccgcccagtatcaaaagggcggcccccagtgccccttgcttttggcgttggatgaggcctttgccggggtggatgagcggaacatcagcgccatgtttgagctggtgggtgtgctggactttgactatatcatgaattcccaggcactttggggctgctatgccaacgtgaaaagcctagacattgccgagctgcaccgtcctgccaatgcctcggtggtcgttatactgcactatcactgggatggcgcccagcgggccttggaggaggatagcccatga

SEQ ID NO: 50556 - DNA, 1326 bp, Firmicutes bacterium CAG:94
atgaaggagattgcagcagcctgtgcggcctatttccaagagcaccctgcataccatcggattttagtgctccttttccagaaggtgaaaagctttgggggcccggcgggaacagtccgcctggatgacgccacgcccgaggaatgcgatgccgcccgcgctctgtttggccgctctttctccgcgcccctccgcattaaaacagcggactttgaggctgcgcttcaaaatacgccttatcgtggcgtgacgttaaaagaggtgctagagtgctactttcatactgccattcaaacaaagcgggaaatccgcagccaggaagacgcccgcatcctgaggataaccaagggggcggccgcctctgtggagagcccgctgtgccttcgatggctggaggagctttccacccaccggggggagggctggcagctcatccaaaagtcgttggccaaaggggaagaagcggtggggcaggcccttttgcaggcgtgcaaaagcatggcttggctggaaggccatcctggccggaggattcgcttggccgtcctcagcgcctatgccacatcggatccccatgccttggacgtcaatacgctgggtggtaagctgtttttgcacctcctttccatgggtgcaggcgtccggctgccaaccgaagccgaggcgcgggctgccctctactacaactggggaattctgtgcgacagcatatccagccttgtcacgcaggtgggactccgcttgtatgtgggaaaagaggagcatccggctttctacgctttccgcctgcgcaacgaggcctgcaccctcacgctgaccaacctggctggcttaacaggggcggacagcccatccggaagggcctatctggtggaaaaccaaatggtgttttcccagctgtgcgatgctgctgcgggatttcattcaccattgctctgtacctctggccagcctgcgattgctgtaatccgcctgctggatttgctggtttccgcgggcacagacctgttctatgcgggcgactttgacgggaaggggctgtccatcgctttgcagcttctggagcgctacccagaccgcctgcgcctgtggcgaatgacaggggaggattacgcgcagtgccgctcggaggtgcgggcaagcgacaaaagccgcgcccttctccgaagctgtgaaaacacagtcctggctcccgtggcccaggccatcgagcgcagcggctttgttgggtatcaagagctgctgctgccacagctgcaaagggacttgctgcaaaatggatcaggcccaaggcgcgtggaaacaggccccaagacctgctgctga

SEQ ID NO: 50557 - DNA, 1482 bp, Erysipelotrichaceae bacterium CAG:64; identical to SEQ ID NO: 50125

SEQ ID NO: 50558 - DNA, 1131 bp, Erysipelotrichaceae bacterium CAG:64; identical to SEQ ID NO: 50243

SEQ ID NO: 50559 - DNA, 4035 bp, Erysipelotrichaceae bacterium CAG:64; identical to SEQ ID NO: 50244

SEQ ID NO: 50560 - DNA, 1284 bp, Erysipelotrichaceae bacterium CAG:64; identical to SEQ ID NO: 50128

SEQ ID NO: 50561 - DNA, 1482 bp, Clostridium sp. CAG:411
atgcgtattgcagataaattaggtaaaccaatttcagaaacagcgtatttaacagcggaaaatgtgacccgatatcgggctattttgcgctttttctatttacagcatgaacgaatacgatactggttagaccaggatgaagtgtatgaagaaatgaaaaaatatgaggaatttgccgaatatacaccagaacaatgtcgacaggatttgaatgcattggaaaattggaaaaacttgattgcaatgcaggatacaaaaaaaataacttctgtagaggcctttaaaaatagaaaatatcgttatcagttaagtgaatacgcagtcgagattgaacgtatgacaattcgacttgaaaatctttcggttgaaggagcatcattagagccaagtttattagaacgtatcaaagaacaaatctttgacatgattacaattgcgggggagacacctgcaaaggtgtatgcctggtgggataatttgcaaaatgatttcaaacgtttgaatcaaaattatcaggattatatgaaaagtttaaatagtgccagagcagaagaacttatgaaaagcacagaatttctaatttataaagataacttgattgagtatttgcgttcttttgtaaaaggattgcatatacatgctggagcaatcgaaagtcgcttgaagaatacgaatacttctgtatttgaagaaatattagacaagattgtatcttatgaaatgtcaattccaagagttgatgtaataccagatcagaaattaataacagaaaatgaaaaaggaagattaaatagccttttagattggtttgttccaagaaatggaagagagagcgaagcaacaagattatttgatatgacaaacgaaagcattcgaaaaattacacgttttgctacgagaatcagtgagcaattttacatgggtgcaaatcggaaagaagaatataagaaattggcacagatgtttctgcaatgtgaggatatgaatcaggcacactgcttatctgctatggtatttggtgtggaaaaatgtttgcatttacgtggagattttcaaagggatacagatagtattaatagtggagtatatgaggaaaatggattgcagataaccatcaaaccacgtattcgtacatttggagaaaaaacgaagcgaagtcacatacaagatcattctgttcagaaagaacaagcaaggaaggcagctattgaaaaacttcaaaatgaaaaagcaacagtagcaagttttattaaggataaaaaaatagtattttctgatttgcctgttatttcagaacacaccagaaatattcttcttaggtggctctctaaagcactggaacgagaagatggaaaggcaaaaacagaggatgggaaggtgtactacatttcgaatccgaaagaaaaaaataattgtatagtagaatgtgaagatggatattttcaaatgcctgcatttgaattagtatttgaggaggtttag

SEQ ID NO: 50562 - DNA, 1155 bp, Clostridium sp. CAG:411
atgaacgcattgtcagagctttgttcgaaacgttggattattaaagagaaagataaggaaaaatattatcaaatcaaagatacgattggaatgtggcaggagcttattcgagataaattgggctatcgattgattgataattcttatgttttaaagttggaaaaattaccaggggaagcgcagccttggatgggaattacagagtttcaaagcaaagaagagtatgtgcttttttgtttagtattgatgtttttggaagataaagaaaaagaggaagcttttgttttgtcccaattaacagaatatttacaggcaaattatccagagggacaattggaatggacggtatttgaaaatcgacgaaaattgattcgtgtgatgaaatatgcgatgaaacagggactaattttaaataatgatggaaatgaggatgatttcgcatctgcgttagaaacagaggttttgtatgaaaatactggtatttctaaatattttgcgcgtagttttacacaggatattagcgaatttacgaaacccgaggatttttttcaaagtgactggatggaaatgaatgaagacagagggattatacgtaggcagcgcgtatatagaaaattgttgctttcgcctggggtgtatcgggaacaggacaaagatgaagattttgcttatattaagagttttcgaagttcgctggaacatgatttagaagctattttagatggttccctacatgttcacagaacgagtgcattttttatactggatgagatggaaaatgccggacgtagtttcccaggaaataataatttatccgatgccattttacttgtgttttctatgttacaacaagagataaaagtgggaaattatatggtaaaaaacaacgaaaccattgtattatctcaggacgagtttaacagattacttattcggtgtaaacaaacgtacggaagcggattcgcaaaaaaatatcgtgaggaaatgagtgaagaggcatttgctgcatttataaaagagagtatgttagagtatggaatgattcaggtagatccgattacagaagatgtaacagttatgccaattgctggtaaaatttgtggcatgtattcgaaagagtttttagaaaaggagaaaattgatgttaatcagtga

SEQ ID NO: 50563 - DNA, 741 bp, Clostridium sp. CAG:411
  modified_base (674)..(675): a, c, t, g, unknown or other
atgttaatcagtgaatgggttattaataggataggcttggttgatttttggtattatgatgaggaagaattttatttttctgacggaaggatgctacttcgtggtgcgaatggttctggaaaatcggtaaccatgcaaagttttattccgttgttattggatggtaataaatcttcggaacgattggatccatttggtactaaggccagaagattggaaaattatctcttagaagaaaatgatggacgggaagaacgcactggatatctttatatggaatttaaaaggagagagagtgatacctttcttaccattggtatcggaatgtgtgcaaagaggaataaacggttagattcctggcatttttttattaatgacggacgaaggataggaaaagattttttcctgtacaaagataaaaagaataagtttacgttaacgaaaaaagaattgatcaatcgtttgggcgaaggtggacaagtggtagattcgcccaaagattacatgcgaatagtaaatgatcgcctatttggatatgaaacggtagaagagtacaaagaattggttgacttgttgattcagcttcgtacaccaaaattgtcaaaagattttaaaccaacagtgttaaatgaaattttaagtaacgcactacagccattatctgaggaagatcnntacagccattatctgaggaagatcttagacctatgtcggaagcgattgaaaatatggaccagttga

SEQ ID NO: 50564 - DNA, 1476 bp, Clostridium sp. CAG:609
atggaattaagcagtaaattaacaaaacaaataacagaaacaaagtatttaagtgtagaaaatactgatagatatcgtcctattatgcgaatattttttgaaaattatgagaaattaaattattggctatttaaggaagatatttttaacgaacttaaaaatatgcaaggctttgaaaattatacgctagacttatgtgaatcagatttaacacaattatattcatggggaaaccttacatattttcaagatacggaaaatgttatgacagtaaaagagtttcaaaatagaagattcagataccaaatgactgattatgctatagaaatcgaaagatttgtaagttatctagaaactattagtgtaaaaacatcatcactagaaccgaagatttttgaaaaactaagaaatttgattaccaaaatatcaacattaagtagttcacatgatatacatgattgttttgaagaattaaactatcaatttactaatatgaatgaaaactacaaaagctttttaaagacttttcatgaagctaaaactgaagatttaatgaaaaaggaaagtttcataatatataaagaaaaagtaattaaatatttacgtgaatttataagtggatttcaattaaataatttaaaaattgtagatttaattgaaaaattaccagaaaattttgaagaaacactaatggataatttaattgagtatcaaaaaaatatacctaacatggaaccagactttgattataattatcttcgagaaattaatcagggaaaatggagaagtataattcattggtttaagaatgacggaagtatatcagaaagtagcagattaaaaaaagcaataaatgatataatagataaaattatgaaaaatgtttctgctatcatggaaatgcaagcaagcagtattaacagaaaagaagagtacaaacatcttttaggacttctttgtaaatcagatacccttgaagaaatagaattattgtgtccacatatattcggtttaataaacacaaaacatttaagcaaaattgaaaaatcaacagaatcaattgattatgatgttaaacaattagaaaatgtttctattgaacttaaaagtcatagcagaaaaataaaagaaagagtagaaaagaaaccaataattgataaaagtttagcaaagcaagcacagctaaatgaaattatgagtataagaaacaaagaaaaagaaatattaagtggatatattgataatggtaaaatagagattaaatcattaggaaaagtcagtagatttgaaagaagattcattttaagtttaataactgctggaataaaaagtaatgattatgtaatggatggagaacatgggatattatataaagttacaaaacaaagtaatgattatgtaaaacttgatagtgaagatggaatgcttgaaatgccagatttcttaatagaattcggaggtaaagatggaaaataa

SEQ ID NO: 50565 - DNA, 1149 bp, Clostridium sp. CAG:609
atggaaaataatattaatgaagaaatgagttatttacttaacaacttgtggatatctaaaaccactcaaaaagaaaaatattataaaattaaatcaaacttaacagaattaagagaaatatctggaaaacttggatgtgacataatagcaaataacaaaattattaagcttgaaaaacttccaatttcaattgattcaacatttaaaatagaagcattcgataataaacttgattatgttttatatatgtgtttattattatttttacaagataagggtttagatgagcaatttatattatctaattttactgattatacaaccaatatattatcaagttttgaaggtaacaataaaccagattggacaaaatataaagatcgtaaaagtttggtagatgttttaaaatatgcagaaaaagttggaataataagattaagagatggaaatgatgaaagttttgcagacaatgaattaagtgaagcattatatgaaaatacaacattatcacactatgtagtaagaaacttcaagtttaatgtgtttaattgttatactccctctgatttcttggaagaagaaaagaaaactattgatgaaaaagattataaaaagataataagttatcgaggtttattcttttatccgcatctttacctaccagaattaactgaagatgcaagaaattatataaaaaatattagatatagcattggaaatgatgtatcaaaatttttagatggagaattgattttagcaaaagatgaggctctagttagcatgccagataataggaatagtgaattgtttccagatttaaacaagagtataacagacatagttttgttggtatgtgcagagctaaacaatcaagaagttgaaaatctaataccaaaagaacaatttaaattgatattagaaaaggtatttaatgaatataaagattatttttcaaagctatatagggatttgcctacatataagtttgatgaggaaataatgaaatacatggaatctttcaaattaataaaaataactgaaaattacgtacaagtttatccaatttgttatttttttgaaggatactttaagaaagaagaaagtgttgttaataattttgaatatttaacactagatttggagggctaa

SEQ ID NO: 50566 - DNA, 4002 bp, Clostridium sp. CAG:609
atggatagatataaaattaataaaataggtttattaaactattggttatatgatgaagaagagttttatttttgcgatggaaaattattgcttcgtggaagtaatggttcgggaaaatcagttacaatggtatcgttttttccacttctttttgatgggaataaaaatcctgaaagatttgacacattcggttcgagagatcgtaaaatagaagactatgtattaccaattgacagtgatacaaatgaatcaactagttatctttacatggaattttacaaaaaaagtgagaataagtatttaaccataggcattggattaaaagcagtaagaaatagaaacgtcgatttttggggatttgctattactgacaacaggagagtaaaagatggatttatgctttacaaagatcatttaagaaaaataccattaacaaaaaaagaatgtcaatatgaaattggtacaggtggggaatttgtaacatcaattaaagaatataagagcatggtaaatagacttttatttggttttgaaaataattcaatgtatagtgaattaattaatttaatgcttcaacttcgtagtccaaaattatcaaaagattacaaaccaacacgcttagttgatatactttctggtgttttagaacccattccagataaagatattcaaactatctccgattcaatagaaagtatgaataaatataaggaaacgatagatgatttaacagaagaaaacaaagttataaatctattaaagaataatttccatgattatagtaacattatactttatcataaatgcaatgattatttaaaaagcaaaagagaattaaatgaacatgaagaagaattaaagattttaaatgacaagttaagtgaattaaaaaaaatagttgaagaaagtaaaaaaatattaattgaatatgatttagaattaaattctttaaaagaaagtgaaaataaacttgcagataatgatttaaatacattgttagaatcacaaaaaaagttggaaatacaattgcaagagattaaaacaaaaattatagaaaaagaaaattctatattaaataaagaaaatgaattaaaagatactacaaaaaatattcaaaaacttgaagatgaaatatacaaaaataataaagaactaaatgaaatcaaagaaactattgaatgtctaatcgaagatactggatttagtgatataaacttaaatgaggaaagtataaatgaaacaatagaaaacaaaaagataataataaaaaatattaaatcattagcggaaaagaaatatgctgaggagttaaaagtagataaattatttaatgaaataagtattagtgaaaatgacataaaaaacaaaaatatagaatcaaataaaatctccagactattaattgatgaagcaaatgctattgttgataaatacgcccaaatgcaaaataataaagttttaactctaacaaaagaagatgtatcaaaaattgaagagataattactaatttagatattaacactaagaatcaagttgaaacaattgtaaatagtaaatataattttattttagaaaatttattaaaaagtaaaaatataacagaaaataatattagagaaaacgaatatcaaaaagaaatactatcaaaagaattagaagatacaaaaaatgtttttgataaatatgtttatgaaagtgaaaagaaaaataaactagaaagtcaaggaataaaaggaaaatatttatatgaattaattgattttaaaacaaacgttgatttaaatacgcgcaagttacttgaagattcacttcgttcattaggtattttgcacacacttatattcaaaaataaatcattatcaataaaaacatttggcaacttaaaacaagttgataattccataataaaatattttgatataatagataaagaatacgaaaatgaaacaatccaagtgttaaatagtataagcattgattctggcgaaactttcatatcagaaaacggaaaatatcaaatgggaataattcaaggtacaagtgatgataattataaattaaaatacattggcaaaaatattcaagaagagtatttgaaaagtcttcaaaaaaacattattgaacaaatagaagaaacagacactttaataagcaaatatactaaaaatttggaaaatattaatgaagacatgaacatattaagtaatgaaaaaaatattaatgtcaattattctaattatgaaaaatatattattgaattacaaaaaataaattttgatattgaactaacaagaaattctatcttgacatatcacaaggatattgaagtaataagcaaaataataaaggaaatagaaacaaatatctttgaaaaaaaagaaaattataatggtgatttaagcgttgaaataattaaaaacgctgaatattcattaaatgaattatcaagcaaaattacttcaatgagatattgtaataacaatattgacgtcttgaatgactctaaaaattcttttcaaaacagagaagaaagcctttataatgatttagaaatattaaaagatgaattaactgaaaatgaggcaaaaataaattattatcaaaaagaaatcaaaataaatgaagaagagataaatcaggataaatacaaggatttaaagcaaaaattagaaacgattaaaactagaatatcttttatagaaaaggataaggatgtcaaaaaagaaaaactaattcgtgcagaaaaagatattgaaattactgaaagtacaattaatacaaaaacgcaatcgataaaagatgaaaagataataacagattgcttatatgatatatttaaaaaggaatataaccttggctatagtagttataaaaatgaattaacagatataaaatcatggtttaaaaacttcaaacttgaaaagttcaaagcaattaatgatgccaatgataattttaatgatagaataaacgactatttatataagttgcaaaattatgctggtaaaaaaatatacaaatttgataacttagaaatggaagaagattattataaggatataaaagatgataattctaaagagaaaatcaaaaatatattaataaatgctaaaagaacggatttaggatttaaatatcaaggattaaatttaaatttattagaattaagtgatactttatctataagattagaagaaacaaagaatttattaaataatgaagatagaagactatttaaagatttgcttttaaacaatgtcggagatacaattcgtgaaaaagtacgttcaagtaaaatctgggttgaggaagttaaaaaaatcatggaaaaaatgaaaacttcaagtggtttaagcttctcaataagttgggtaggtaaaggaaaagatgcagaagatgaaatggatacaaatgaagtggtttctatatttgaaggatcagctagtagcattactgatgaagacaatgaaaaaattgtaaaacactttagaagtaaaatagctcaagaggaagaaaaatatgatgaattagaaaaaaactatgtcgaaataatcagagatgttttagattacagaaaatggtttcaatttaagttgttctttaaaagaaataatggtgataaaagagaattgacagacaaagaattttcaaaatttagtggtggagaaaaagcaattgcaatgtatattccattatttgcgggaataaatgcaaagtttaattctgctaaaaaggatgccccaagaattgtagcacttgatgaggcgtttgcaggtgtagatgacataaatattgaagattcattcagaatactagatgaattaaatcttgattatgttttaacaagtcaaattctatggggagactatagtacgataaagagtttatcaatttgcgaattgcaccatttatcatcttcagatgtagtaagtgttttaaggtataaatgggatggacataaaagattgctaattaatgatgaaagtgagtatcaaaattga

SEQ ID NO: 50567 - DNA, 1200 bp, Clostridium sp. CAG:609
ttgaatttagaatattttgaaaataaaaatttaaagcaactattcgatgcattaaaagaaaaatactataaaacttcaaaattaagtggaacaataaaaattatacctaaaaccaaagaagaagttatagaaatcgaaaaattaataagaaatggtaaatatctaaaacaaaatgaaataaatgtcataaaaataaatgatataagaacaggaatatcaaaaacaagattcagctcacactctttagaagatatacttaaccatctatatggcaatattatttctaaaaaaactataagagaaaatataaccaaagaaaatttaataaaatacaatgagtttatttctaaatatatagagacttctataatggatattcttattaaaatgcctgaaaaagaaataataaattatataaacaagaatgaagaattactaaataatgtttgtttagcacttttaaatattcccaatgttccgacgttattaagtgtattttctacagatattaccaagaatccacattactttgatttagaaacaaaatcatcaaatttgttaattaagtttttatcacaattaaataatgaagacgttcctaaaaatagaactcaaaaaattaatgttttaaaaaataataatatagtaactgattcatactctaattttgtgattacttacaacttgtggggagaagactatttaaacattttatctaataaaaaagaaccggttatattaaatattaataatattataaatttaacaaaagttaatagtaaaaataataaaatattaattatagaaaatccatcaccattagattatataacaaaaattgatacaaattatggaattataattggtggaggtaatccaaatgcagcattgtatgaattattggataaatttgaaaatcatgtatttttatatcatggtgattatgacccagaaggattactaattgcagataaattaaagcaaaaatatactaatttggaattaattctatataatgaagaactatttgaaaagtcaaagtctgataaaaaaataaatccttcaagaataaaaatattagacaatgtttcatcaattccactgcaagaaataacaaaaatgataaaaaagacaaatacagttggatatcaagaaaaggttatatcagatataataaaatatttacatgataacaaataa

SEQ ID NO: 50568 - DNA, 1476 bp, Clostridium clostridioforme CAG:511; identical to SEQ ID NO: 50210

SEQ ID NO: 50569 - DNA, 4068 bp, Clostridium clostridioforme CAG:511; identical to SEQ ID NO: 50428

SEQ ID NO: 50570 - DNA, 1299 bp, Clostridium clostridioforme CAG:511; identical to SEQ ID NO: 50213

SEQ ID NO: 50571 - DNA, 1518 bp, Thauera terpenica 58Eu
atgccatttacggacacatcggccgacctgttccgacacgtcagcgcggacaaggccggcatctaccgcagcatcatggcgagtttcgccgcggcaaagcgtcagttcaggcttcacatgcgccccgacgaggtgctggccgaagcgcactggaccgatggcctgcccaggctcgaggaggtccaggtcgcgctcgcccagctcgccgagtggggcaacctcgaggcacaacccgacaccgcgcgcgtcgccagcatcagcgatttttaccgcgcccgcttcctctatcgcctgtcccatggtggtgaggccgtcgagacggcgcttgccgccttcgcccaagcgctcggtcggcgggccgagctgcagaccgtggcgctcgaagacatcgcgagccggctcaagaccttgctcgcgctggccgacgcgccgacgctggacgcggccaagctgcacgaaaccctgcgcgatctggtgcgcgtgttcgagagcctcgccgacaacgcccaggccttcatggccggcatggcacgcagcattgagctgcagcaagccgatgcgagcgcggtgctggcctacaagcaacgcctgatcaactacctcgagcgcttcatcggcgacttcgtcgggcgctccggtgcgatcgcgcagcacatttccctgctgcatccgcgcatcgatccactgctgtgggcggccgcgcagcgcgaggcgcgcgacgcggcgcccggcgaccagcaagcgcaggctgacgcgctcgcccagcgccagcaggcctggcgcgaacgctggggtggcctgcgcggctggttcgtcagcacccatcatgaaccgccacaggccgaggtcctgcgctcgaaggcacgcgcggcgattccgcagctgctggccgcagtcgcggcgctcaatgagcggcgcagcgggcgtagcgaccgctcggctgacttccgcgtgctcgctggctggttcgcgacctgcggcagcgacgacgatgcccaccgtctgggacgcgccgccttcgccctcaatccggcacgccatttctcgctcaaccccgacgccgacaatgagcttccggccaccacgccgtgggccgaggcgccgccgctgcgcatccatccgcgcctgcgcgagtacggcgaagccgctccgcgcgggcccttgcccaaggtgcgcgagcgcaacgaggagcgcgccctgctcgcgcgccagttgcgtgaggagcatctgcaggtcgaagccgcgcgcgcacgcctggccagcggccgaacgacgcgcctgtcggagatcgggcagctcgacccgcacgccttcgcgctgttcctgtcactgctcggcgaggcgctgagcgcgcagtcctcgcccgaaggcgtggttgagcgccagaccggcgacggcctgctgcacatccgcctggagccgctggaggcgcacacacgcgctgaagtgagcaccgatgccggcgtctttgccggtcgcgaccacctcatcacgatcaccgccacccaagccccctga

SEQ ID NO: 50572 - DNA, 1293 bp, Thauera terpenica 58Eu
atgacaagcgacagcaccacaatcggccagcagcaggcccttcatcaacgcgaggagttcaccgccgcgctgcgcgccctgctgatgaggccgctgatgacgccggcgcacgcagagttcgccgccgtgcgtcgccacgccgaggccttgcgcgaatggttcgtccgcgaggccggctggcctctgcatatcgaacgcgatgcggcgcgcctgtacaagcgcccggccgatgtgcgcgacgccagccgcgggctgcccggctacgagcgccgccgctacgtgttgctatgcctggcctgcgcggtcctggagcgcgcagacccgcagatcaccctgcgcgtgctcggcgaccgcttgctcgtcctcgccgcagaccccgcgctggcagccctcggcttcagcttcaccctgcaggcacagcacgaacggcgggagctggtcgcggtatgccgcaccctgctcgagcttggcgtcctcaatcgcgtggccggtgatgaggagagtttcatacacggtggccacggcggcccggacagtctccatgacgcgctctacgacgtgcaccggcgggtactcgccggcgtgctcgcggcatcgcgcggcccgtccacctggccggcggacgaagccccggccacgctcgaggcacggctcgcggcgctggtggtggagccggtgccggacagcgacgagggccggcgcacggcgctgcgccaccacctcgcgcgccgcctgctcgacgacccggtgatctacctcgaccgcctcgacgtcgaccagcgcgcctatttcatgaaccagcgcggcacgatggcctcccggctgtgcgacgccaccgggctggtcgccgaacaacgcgccgagggcctggcgctggccgacgaggacggtgaactgaccgacgtggcgatgccggccgagggtaccgaagcgcatgtcaccctgctcgtggccgagttcctctccagtcgatcttcgcgcggctcgggcgatcgctccggaccgggaacaccgcacgccgcgcctaaggatggctacgcgagcaccgacgaggttgctgcattcatcgctagcgcgcgccaaggtttcggcaagttctggcgcaaatccgcgcgcgagccaggcgcggaacacgaactggcggcaaccgcgctcgaacgcctgcagcgtcttcagctgctcgaacgcaacggtgccgaagtgcgccccttgccagcgctggcacgtttcgccgttggcgaggccgagctcaggccggcgccaccggccgccaccggaaccctcttcgactga

SEQ ID NO: 50573 - DNA, 4245 bp, Thauera terpenica 58Eu
ttgaatactctggactccctgttcgcaagcccgtccgcccaggcgaggaccgacgcgcttcctgccctcccgcagcccacgctggcgcgctggcaacccctgcgcatcggcctcgtcgagctgttccactacgacagcgaggagttctggttccacgatggccacctgctgctgcgcggcaacaatggcacaggcaaatccaaggtgctgtcactgaccctgcccttcctgttcgatgcccaactcaagccatcacggatcgaacccgatggcgacgccggcaagaaaatggcctggaacctgctgctcggcaagctcgaccgccgcatcggctatgcatggatcgagctcggtcgcatcaccgacgatggcgagcccgactacctgaccctcggctgcgggctgtccgcggtggcggcgcggacccaggttgttgcgtggttcttcgtgctcgaaaggcaacgcatcggcgaagacctatggctcaccagcccggcacgcagcgtactcacccgcgaacgcctgaaggaagcattgcacgatcacggccaggtgttcgacaccgccaccgcataccggcgcgcggtcgacgagcgcctgttccagctcggcgccgtgcgttatgcggccctgatggataccctggtccaattgcgccagccacaactgtccagaaagcccgatgaaggcaaactctccgacgcgctgaccgaggcgctgccgccactgtcggccgagttgctgaccgacgtcgccgacgcactcaaccagctcgaggaataccgccgcgaattgcaggattacgaagcactggcgaaggccgtcggccagttcacccagcgctaccagcgttacgccgcgatcaacgcgcgccgacaggcccgcgccctgcgcagcgcacagagcggccatgactccgccagccgcagcctcaacgaggcccgcagcgcctggcaggccgcgcagcaggccgaggcacaggcgcaggcccgcctcgaggcggtggacgccgccttgttcgccgcccgcacccggctcgagcagctgcagtccgacccggcgatgaaggacgcgaatcgcctgaatcaggccgaacgcgacgccgaatcgcgcgcagccgaccgcgccgatgcgacgcgaatgaatgccgaggcactcgctcgcctcgagcgcgagcaacaagcgctcgcggaacggggcacgcgccagacacaggccgaacaggcgctcatcagcgcccgcgaggacctcaccgcggcggcactggccagcggcacggccgagccgtggagaagcagtccgctggcggtgctcccggccgccgcactggcgacactcggcgagcagcccctcgacacggcccgcaatgagctgcgccaggcaacggttattcgacgcgaacagctcgccctggtacagcgccgtgtcagcgaggtggcccaggccgaggccgtccacgcaagccggcaacagacccgtgacgagcgacaggacgaaaccgaagcggccgctgcccgccgcaatgtagccgatgctgcagtggagtccgaaggcagccgcgtggtcgaggcctggcaggaacacttcacgaacctgcaggtgctgcaggtgaatgaggcgccgctgcccgcgctggccgcgtgggtcgccaacctgcaaggtgacaaccccgcccgtgccgccttgtcgtcagcccagcagcgcaccgccgacgatctggcacagcagcgcgccggacacctcgctgcacggcaagccctgcacgacgagcaggcgacgctgagcgccgagcacgagcgcctcacgcagggcgaagacgccagcccgccgccaccttatacccgcggcgccgaggcgcgcaggcacttggccggtgcgccgctgtggcagctggtcgattttcgcgagcatgtcgacaccgcccagcgtgccggccttgaagccgcgcttgaggccgccgggctcctcgacgcctgggtcacccccgatggtcgcctgctgggggccgacagcgcagcgcccgtgcacgacacccagtggctggagcgccaggcccatgaggcctcgctcgccgcgtggctcaccccatccgcggcggcgacaaggcccggcatcgacgccgcgcagctgacacgcctgctcgaaggcctcgcctgctccacccacgacgacggccaggccgaaggctggattgcacccgacggccgctttcgcctcggcgccctggccgggcgctggcacaagccacaggccagctacatcggcttcgccgcccgcgccgccgcacgtgcgcggcggcgcgcggagatcgagcttcgcctgggcgagatcgccgaggctgcacaccgcatcgaccaggcgctggccgagctcgtacggcagcagacgcgagcggccgccgaatggcaggacgcccccaccgacgagaacctgcgcgccgcccacgctgacgccgcggctggggagcgcgagttccaggctgcgcgcagccggctcgaagaagcccagcgccagctgcacgcagccagcgctgccctgcaaagccgccgcgatgcgctggcagccgacgccgccgacctgcacctgcccacccagtccgcagcgctggaagctgtcggcaccgcgctgctgcacttcggcgagaccgtgcacggtctcttccaggtggtgcacgcactgcgcctggcggtgagcgaactcgcccgccagcaagagcggacacacgaagccgaggccgacgcgcgccagcgcgccgagcagcttgccgagcgccaccgacaggccgaggagacccaggtgcggctcaccaccttgcgcgaatcgatcggcgcccgcgtcgaggagctgcaagcgcggctgcgcgaggcgcgcgctgcggtgagcgacggcgaacgccaggccaagaccgaaggcgaagccctgcgcacggccggcgaagcccgcgcccgcggcgaacagaaagtgtccgacgccgataccactctgcaggaacgcgccgacacccgccaacgcgccatcgcccagctgcaaggctttgccgccaccggcttgctgtctgccgcgctgcccgcggccgagttgcccgatctgcgtgcaccgtggacgatagagccggcgctcacgctcgcccgccgcaccgagcaggcgttggcacaggtggtggacgacgacgacgcgtggacgcgcatccagagccagatctcccacgactatggcgagctcgggcgggcgctgaccgcgctcggccagcaggcccaggccgacaccagtgactacggcatggtggtcagcgtcatctaccagaaccgtgcggagcgccccgaccagctcagcgcccggctggccgccgagatcgcccagcgccgtgagctgttgacggcgcgcgagcgcaccctgctcgaaaaccacctccaggccgagaccgcggccgagatccagcgcctgctgcaggcagccgagcgccagatcgatgcgatcaacaaggagctgcacaagcgcccgacgtccaccggagtcaagttccgcctcttgtggcaagcgctgcccgagggcggcgaaggcgcaccggtgggcctggaggccgcgcgcaaacgcctgctcaataccagcaccgacctgtggtcggccgcggaccggcgggtggtcggcgagatgctgcaccagcgcatcgccgccgaacgcctgaagaccgatgcgctcggcggcagtctgctcgagcagctcgcgcaggcgctcgactaccggcgctggcatcgcttccgcgtccagcgttggcaggatgggcagtggcgtccgctctccggcccggcctcgagcggcgaacgcgcgctcggcctgacggtgccgctcttcgccgccgtgtcgagcttctacagccaggccagctacgcctttgcgccccgcctggtgctgctcgacgaagcctttgccggcatcgacgacgccgcccgcgcgcattgcatgggcctgatccgcgagttcgacctcgatttcgtcatcaccagcgagcgtgaatgggcctgctatgccgagctgcccggcgtggcgatctgccagctgcagcggcgcgagggcatcgacgcggtgcatgtgtcacgctggacttgggatggccgcgcgcgcctgcatgcggacgacccggatcgacgctttccgcctgaggctgaaccaccatccggcccgcttgattcgctgcaccacgagggggcgcaggcctcccctggggcggcccggcgcgcgcgctga

SEQ ID NO: 50574 - DNA, 1185 bp, Thauera terpenica 58Eu
atggacccccgccttgaacggctgctcggaggcgaaaccctcgcggcgctgcgcaagcgcctacgccagcgctatgagcgcggcgtgccggccgaggtcctgcgtctgggcgcgctgagcgaagccgagcatgccgccctcgcggcgctctgcggccgacccgcacgccctgtgcggtcgatgcagatcaaggtcgcggagatcgacgccgccctcacccgggcgggtctcgcctcttccctgcgtgatgcgctcgagcaactcgacggaccgatcatcgacaccaccgcccagcgcctgcaggttcgcgtgcaatggcagcagctggtcgagggctgcgcacaccctgcccttgctgcggtgctgcagacatcggtcggactcgggcttttgaagcgcttgtgtgccagccagcccgaggccggcgagcgcctgctcctcgacgccaatcaggtattgcggcggctgcccgcagcggggattgcgcgcgcgcagctggccgttgccacgctcggtgatgcacacgcgctcgacagcggcaaggcggtcgccaccctggtcctgtcggccttgcgccatggggccgcgcccgacgatgacgccgacagggcacgggacctgtgggctgcggccggcgtcctggtcaatgagctgacacggcccgcgctcgccctcaacctccccgggccgaccggcaccgcagcaggcgaaccgacctatttctcgctgcgcagcctggtgcgatcaccgccggtctgggccgtcacgggccgcccggtcttcgtctgcgagaacccgaacctgctcgcgatcgccgccgatcagctggggccgcgctgtgcaccgctggtgtgcaccgacggcatgccggccgccgcccagcgcgtcctgctcacgcagctgcgtgccgccggagcaaggctgcattatcacggcgacttcgactggccgggcctgcgcatcggcaatcaggtgatccgtgagcacggcgcccacccatggcgcttctcgagcgccgactaccgcgccgccgtcatcagcgcaccgcgtcccggccgcaccctcgatgaagccgctgtcagcgcgctatgggacgacaccctcgccgacgcgatgctcgccgcacgcctggcgatcgacgaggaagggctcgccgacgtgctgctcgacgatctgggacactga

SEQ ID NO: 50575 - DNA, 1482 bp, Anoxybacillus sp. SK3-4
atggatacgtcatggctaaagccgattacagaggcgaaatatttagtagtggacaacgcgtatcgataccgcgcgattttgcgctatttttatacacagcacgagcgaatgcggcaatatttgtttccggaagaagtatacgcttttttaaaacagttcgatgaatttcaaacgtatacagaagaagagatgcaacaagatttggaacagctcgtcaaatggaaaaacttaatcgcgcggcaagaaacgggccatattcggacgattgaggaatttaaaaagaaacggtttcgctatcaatgcagcccatatacagtcgaaatcgaacgaatgattcgtacccttgagcaactaggggaaacttttggcggttcgctcgagaaaacgcggtttgaccgcctgtatgcctcgcttgtccggatggaatcgattattgacaatggattcggggaaaaacgagaagaaatgaatcaagtgtgggaagaaacgttcgattattttaaaaaaatcatccaaaattctgccgattacatcgcttatttgaacggagaaaatatggaagaacggatgatgtctgattcgtttcttgcgtataaagaacagtttaccgcctatttgcgtgattttatcgtcgcattgcaaaaaacatcgatgcaaattgaaaagctgctcgaagatttgccagaggacggggtgcgtcggtttattgaggaagtagttgcttaccaactcgccattccccgttttgaaggcgccgttttttcacgtgaacagctaacggaagagaagctagacacatggcgcagtttaaaagaatggtttttagggagaaacggacatgaaagcgagctatcgtttttacaaaagcaaacgaacgaagcgattcgacgaatgacgcgcgtcgtccagcggttaggagagcgccatcatcattttcgcagccgaaagaaagactacttgcatttagccaaatggttttcgtcattagaaacggtacaagaagcgcataaactgtccgcggttgtgttcggctgtttccatacgaaacacatcgtcgccgaaaacgatgcgacggaaaacatgtaccgcgatatttgggaggaacagccgacagaatggctcgtcaaaccgcgcgttcgccattaccgggaaaagaaaaagccagaagcaatgattgataggcgaaaagaaaaagaggaaacaatgaccgcctatttagcagagaaacaacaagaagaagaagcgctcgcacagcttataaccgacgggaaaattgtacttcaagagcttccgatcgttgctccacacattcgtaaaacgttgctcggctggattgcgaaagcgatggggcgagaagacaggattgtccaaacggaaaacgggtggaaagtgaaagtggtccaacgtgaaggaacgattacactggaagcagaagatggcatgttaatgatgccgaattacgaaatccatttgctagattag

SEQ ID NO: 50576 - DNA, 1167 bp, Anoxybacillus sp. SK3-4
atggaaaaagagtttgatgagaaagcgaaagaagcgttaacggcattgtttgaacatttttggattgttcgggaaaaagagccggagctttttcaaaaaatacgcgaacgcgaaaaagtattaaagcggtatgtgcaagagaaatttggctatcggttaattattcaccgctactttgctaagctcgaaaaaataccagcggagccagaagcatggatgggcattgagtcgtttcaagaaccgctcgattacgcattgttttgttgcttattagcatatttagaaggaaaagcggtcgaagaaaaatttttattgtctgacgtatgcgaagaaataaaagcgatgtacccaggcgaaacagcgcttgattggacgaactatcaacatcggcgcgcccttattcgcgtgttgaaaacagccgagcaaatcggaattgtacatcacgtcgacggagaactcgaggcgtttgccaatcaagaagacgaagaagcattatatgaagtccctgtattgtctcgctattttatgcggtcatatccgaaagattttattcaatatgaaacgatcgagcaactgttagaagaagaatggaaagcagcgcccgacgactaccgccgccactttatttatcggcagctctttttatcgcctgtcgtgtatcgtcggcaaaaagacgacccaaacttttattatttgcgcaacttccgccatcggttgcgtgacgacatcgaagcgcataccgattttcgctatgagctatataaaaacgcagcgttgctgacgatttcagaacggcaacatgtgtatacattgtttcctaaccaaaaaggaacatcggatatcattcttcactttgccgccgttgtgcgcgctcacttggacaactatccgccagatgaatacgggcaaattcgtgtcacgatgtcggagtttcatcagttgctgaaccggtgtatggagcaatacggcgaaggctggagcaaaacgtatcgagaaatgacattggcacaactttcatctgaactgctctctgctttaaaagaatggaaaatggcggagcatgaacaggaaacgggcatggtgactctttatccgctacttggacggcttgtcggtcgatatccggacgattttctaatgaaaggaagagacgatgatgacgaataa

SEQ ID NO: 50577 - DNA, 4137 bp, Anoxybacillus sp. SK3-4
atgacgaataaatgggtgcttcatcgcgcaggattgattaatttttggtattacgatgagcaatattttgagtttgccgacggtaagttgttgcttcgcggaacgaacggttctgggaagtcagtgacgatgcaaagcttgcttcctgtcttattggacgggaaaaaaacgccagatcggctggatccgttcggttctcgggcacggagaatggaagattacttgcttggtgaaaaagaaattgtcgatcgcgatgagcggacaggctatttgtttttagaatataaacgaaagcagacggagcaatatgtgacaacgggaatcggattgcgggcaaagcggcaaaaaaacatggatttttgggggttcgtcatttttgataaccgccgcatcggccgtgatgtatttttatataaaacggaaaaatcagcgaacggaacggaaaaaatcccgctcacgaaacgcgagttagccaatttgcttggcaacggtggaacggtcgtggattcccaaaaagaatatatggaactcgtcaataagcacgtcttccgttttgaatcaatggaggcgtttcaagagttaattgagctattgattcaattacgtagcccgaagctatcaaaagattttaagccgaccgtcatttatgaaattttagaaagctcgcttccggcgttgacggacgacgaattgcgccatttatcggaaacgattgaaaatatggatcaaacaaagcaacaactagagcagctcgagcgggatgagcagtcgttaaagcggctttgtgggcaatatcgggcgtataacgagtatatgatagcggaaaaagcgagcgaatggctaaaggcagaaaaacaggtgaagcggctagtcgaagaagggaaacaatggcttacggaagaagcagaaacagaagcgcaccttgtggatttaagcgaatacattcaaacgcttgcaaacgagcaggacgtattgcatcaacgggaattagaactcgcaagccacgaagtattccaagcggcgcaacaatatgaacgcatccaacgagaaatccaaaacgtgaaagaaaagcaacaaaagctattgcgacaaatcgatgaaaaagaacaaatcgaacgccgctacaaacgccagcttgaagaaacgaatgataagctgtacgaaacagaaaaacaactcgatgggcagctagaagatttgcgccacgatgcgctagaaagctccttttctgcccacgacctcaatgaagcggatttttcccgccaccgccaaacgccatttgattttactgtatggaagcgtgaggggcaggggtatgttgagaagctagaacaaattctcaccctttggcgccgtcatgatgagataaaggcgcgctatgaagagacgagtaaagaagtaggcgacctgcagagggaagtcgacgaattgcgccacgaagaagcgaaatggctcgagctgttagaaaacgaaaaatcgcggttccaacaagaagtatttcgctggctcgagcaatgccaagacgtttccgtgcaagaaacatctgtccaactatttttgcagcgccttcatgaactatacgaaacgtatcatatcgacgagatgaagcagccgtttacggaagcgtattacgaagcgctcaatcgaaaaaacgaagaaaaaatggcgcaaaaacatgcgtgcacgttactagaagagaagattgccgcaaaagaagcggaatggaaccaatggaaaatgcaaaaagacccagaactagcgcgcgatgaacaaacgttggcagcgcgggcggagttagacaaaaaaggcgttgcttttgtcccattttatgcaggggtggaatttcaagaccatgtgccagaaccgcttcgggagcggatcgaatcggcgctgtaccacgcagggctgcttgatgcgttaattacagaaaccgatgttgaagtaagttgtgaccgtgtacttttcccacgtcctgtcgaaatggcgcatacgttggcagactacttacaaccggacgtagatgaagcgtgtcaggtgtcgaaaacgcgcatcgaagaagtgctccaaagcattgtgctttctgacagagaaatggatggagcgtttgtgctcaatgaagcaggacattatacgctcggattagtcaaagggcatgcaccgatgcgagaaaaagcgctatttattggccgaacagcccgcaaacgttggcggttagaaaaaatcgccgcacttgaagcggagctagctgaacttcgtgcccatctttacgaacaaaccgaaatgttccgccagctggacgaggcgattgagcaaatgaaaaattggtttcgctcctttccaaccgatcgtgacatgcgcgcagcctttgaagagcgagaaaaaacgaaacgcacgatgtttagtaaacaacaagaatgggaaaagaaaaacgaaaaactagcacagcttgcccgcaattggcaacaactcaaacaaacgctccgtgaacaaacggaagggctcgatatagaattttccaaagatggctatgaacagtcgcttcttttgatgaaatcgtatatgcggcgtttgcatgaacttcaattgacccaccaatcatttgttcatttatttgagatgatcgagcgtctcaccgagcaagtgggaacattgcaacaagaaatcgatgacatcaagggtgaacgaaatgtactagcaaacgaacagcaaaaacttgatttgaagcggcaagaaatcgagcgaacgatgcagctgatgggggcggaagaagtgcaagcagaaattcagcgcgtccgcgcccgattggcgtttttgcagaaggaaatgccagcgaaaacaaatgagcgtatcgcactagagcatcagctcaaagctatccgtgagaaacgcgaacagctagaagggaaagaagcattcgctaaacgattggcaggggcgtggaggcggtcgtttgagcgagaggtcgccctcgaacttgttgaacttcacgcacaagatgcggttgaacaagcaaaagaagcgattgagcgatatggagcacagcttaaggaaacgcgaacgtcgcttgtgaaccggttaaatagcgtctttttccaagagtcagcgaatttgacggaataccggcttagccaagagccagttgtcgtagaggaagcgagtccatttgcggagatcgagctagacgaagaaatggaattaaaggtcgctgggtggagagaaaagcaagaccgaatcgtccttttgcttgattataaagggcagcgcgtatcgccgttttacgtatggaacgaaatcgagcatgatattttcttgcagcgtgaatacatgaaagaacaagaccgtgaattgtacgaagaaattattttaaaaacgattgggcggattttgcgcagccgcatccaacgagcggagcgttgggtaaaagatatgaatgacttaatgcagcagctcgatacgtcttccggtcttgtgttgtttattcaatggaagccgcgcactgcggaaacggaagaagagatggatacgaaagagcttgtcgagttgttgcggatgaattcaaggttattaaaagaggaagatttgcagagggtgacgaaacatttccgctcgaaaattaaccgcgcacgtgaactgctagaagagcgcggccaaggcaatacgctccaccaaattattaaagaagtgttggactatcggaaatggttttcgttcactctttattaccaaaagacgaacgagccaaagcgggagttgacgaaccaacgtttctatcaatttagcggcggggaaaaagcgatggcgatgtatattccgctctttgccgcaacgtattcgcgttatcaagaagcggcagaagatgcaccgtacattatttcactcgatgaagcgttcgcaggggtagatgaaaataacattcgcaatatgttcgggcttgtcgaacagcttggatttaactatgtgatgaactcgcaagccctctggggcgactatgacaccgtcccatcattatcgatttgcgaactcgttcgtccgaaaaacgcgtcgttcgtgaccgtcattcgctattattggaacggaaaagtaaagcagcttgtcactgaagcaagaaagggtgagctcattgaaccgattagatga

SEQ ID NO: 50578 - DNA, 1242 bp, Anoxybacillus sp. SK3-4
ttgaaccgattagatgaagcggtgcaattttttcgcggtgaacgttcgtttcaccgccttttttgcgagatgaaaaagaaatacgaatcgcttggccgcattggcggcacgatttccgttgcatctttttcaatggaagaaaaagatgcgattgcgtctttttttggcaaagaaatgagccgtgtatcgcttgcagcatttgaacaacagcttgccaatacaaagtttgccggtatttctcttgtggaactactgtcaagctattttggcgagccgctcgtaacaaaaaaagagcaacaacaacaagcagagcaagaaaaagaagcatattttacgcggttgatacatacgtatcgaccacagcgcgattggctgatggagatggcgaaccaacgagtggtgcaactagcctatcaacaaaatcctcaagcgctagaagcagccatttccgccgtttgccgcgcgcttgaacagcttccatccacgtatgtccgtcttcctatgtttgcacaaaaagtggcgaacgacccgcatgcatttgatttgcatacgcttgcagggaagctattgctttcggcgctgcaattttatgcggacaccaaatacgacttgtcgtcggtcgaagacgtgaacgaattattgcagtcgtatcggttattgcgggaagatgtgctgaactttgtcacgtgcgctggcgtgatggcagaaaaggagggtcgccatcctgtgttcgctgctgcatgcgaaacgaatacggcgctaaatgtgccgcttcgggaagtgatgccgttgacacgagcgtatccgtccattggcaacattgtctttatcgttgaaaatgccggcgtgttttcgacgttattagatacgaacgtaccactcattagcaccaacggccagctcaacttagcaacgatatggctgcttgatttgcttgtcgaagaagggatcgctctgtattattcgggcgattttgacccagaaggattaaaaatggcgcagcgccttgtcgagcggtacggttcctctgttcggctttggcattacgatcgattggattatttggcgacaaaaccgaccgttccgctaccagatgagcggttagcgaaattgcaatcggtgacgcttcatgacttgcagccagtaaaacaagaaatgttgcggcggaaaaaagcaggataccaagaggcgcttgtggaagcgttgaggaaggagataaagagaaatgttgattttgtttga

SEQ ID NO: 50579 - DNA, 1566 bp, Alicyclobacillus acidoterrestris ATCC 49025
atgactgtggatgtaggatataatgacgagatagattccgttgtcttgcagaggatgagtgctatgaatcgacgtcaacccagggaactttgggtcaagccagtgcccgaggttaagtatctcaatgccgataatgtgggacgatatcggctcattatgcgatttttctatgataactatcggaagttgaagtattggttgaagccggaggaagtgtttgcgggcatttccgcatggaatctgctggatgactataccctcgaacagtgtcagcgggacctggatgtgttgaccgaatggagaaatctgaccagtagccacgatggtggtcgggctgggtctatcgaagagtatctgcgcaagcgatatcgatatcagatgacgccgtatgcgattgagattgagcgtatgctcgagagtttggagagtattcaagggtacggcggatcgttggagccgacactgctcgagcggattgtcgtgtatgttcgaacggttgccgagcatgcgggacaatttgccccgggagaggcccttcagctgtggagagatttgcaagccgcgtttcgaacgcttcatgagaacgcctccgattatctggccagcttgcaaacgacacgtgcggaagaattaatgctgacggagcagtttctcgtttttaaagatacgttaaccaattatctgcagaattttatgcttggtcttcaaaagtacggggcacaggtcgaaggtctgattcgccggacggattcggcccaatggagaacctttctggcggccgttgtcgaggatgagatgagaacccctagcctagacgatgtgttgtctgcggaagaacgcctgaacgggcggctagaagagtgggcgattttgacgcgatggttcgtcgggagcgacatcgaggaaagtgacgtagtgtttctcgaacgcgccacgaaggacaccattgggcgcatggttcgctacgccatcgccattcaggaaaagcaacggcttggcatcagccggcgtcgggagttggattacttggggcagtggttcttgcgcctcgattcagtggaagacgcgcataaattgggcgcggcggcgtacggactcatgaagccgcggcattttcagggggaaccgccgagatggtctgattcgcccgatttgtcgatgtgggacgaggcgccgatggtgcgggaactcacttctcgtagtcgcgttcggcgcaaagcgggatcgaccgagcctgtcaggtcgcgtgagggtgagcaagctgaggccagacaggtgctgcttgcgcaaatggagcgggaagcggctgtcgtccgagggtttgctgaacttggcaatttccatctgtccgatctcgacgttttgtcggtcgagcaacgacgtgtgctgctgtcctggatcagtcgttgtttggtcaacaaagcgaggcgatttcgaacggcggacggctatcatatcgaattgacgctgcctgagtcggacgagcgagcggaattaactttttccgatggtcaattggacatgcctaatttccatatctccattcgggaggcggctagatcatga

SEQ ID NO: 50580 - DNA, 1233 bp, Alicyclobacillus acidoterrestris ATCC 49025
atgaatgcgtctacgagacggaaggcgccgactcgcgccgaggtcaagagcgatttgcaggccgtcgcgatggcacttttgagtcgaccgtggttgacgaaacaggatgatcccgacgcgtttctgctgattaaagatcactatgaataccttcgcgactggtttcatgagcatgccgggtattcgttgttggtgacgaggtcattcgcgaagctcgataagatccccggtgtgttccgaagttggatgggtattgacggttttcatcaaccccgagactacgctttgttcacctatgggttgtggtatttggaggcgaagtcggatggagagcagtttttgctcacagagatggtggaggccattcggaatcatctgttgggattcggtttcgatgtcgactgggcgttgtacgatcaccgcttgtcgatggttcgcgctttgaaaaagttgcgatcgcttggcgtactcacgtccatcgagggcgaggaaacgggttgggctcgcgatggggcgaccgcgaacgtgctgtacgaggcgtcgccgctcgctcgatatgtactgcggcgatttcctagggaattaatggcgtacggcgagatcgacgaattgtacgaggtggaacaaacggccgtggtgccaaccagtggcgacatgatgcacaatgcggatgttcgatcccgccggcacaaggtttttcgccgccttctgatggaacctgtcgtctacgacttcgagtggacggatgaagagcggcgctatgttcagactcagcggtcttggattacctcgcagatggaagagatggtgggacttgaaggtcgtcgctttcgcgaggggctctatttctattggccggaattgatggcggaagtggacttgtttcccactcaatctgccgcgtcagacgtcacgatgcaattcgctgcgaagctgcgcgacatgttgaaagaagcgccggacagttatccacgcgatgagaatggatgtctacacctgacccgcggcgagttcgaaggaattttgttttcactccgtgaatcgagtgaacggtactggactaaggaacatcgagaaaaatcgacgacgctgttggcgaatgacattcttgagcatatggtcgagtggaacttggcagcgttggacgacacgggcacagttgtgctgttgccggggctgtcgagatactgcggaagctacgatgacgcgagtgtaggaaatggaggagtgtga

SEQ ID NO: 50581 - DNA, 4155 bp, Alicyclobacillus acidoterrestris ATCC 49025
atggcgaatgaacggtggcagatgaatcgggctgggtttctgaatttctggttttatacagatcaaagttttcaattgtccgatggacgtttaattctgcggggcgcgaacggtgctggcaagtccgtcacgatgcagagctttcttccgctcgtgcttgacggtgacaaacgaccggtgagactcgatccgtttggttccaaagaccgcaaaatcgaatactacctccttggcgacgcggaaagcggtatttcggaccggacaggctatgtctacttggagttcattcagccagcgacggacaagaccgtcacggtcggtatcggcctgcgggcgcggcgaggggcgaatcaagtcgcgttttggggattcagtttgacggatgggcggcggattggacacgattttttcctttatgacgtcgatgtgttcgaacgggaaggtgagaagatcccgctcgatcacgccgggctcgaagcagcgattggtgcgggcggccgcgtcgtcaaggaacagcgggaataccagcagatggttaaccaggttttgttcgggttcaaggatgagcaggcgtataaggatttgctcaatctattgattcaattgagatctcccaagttgtcgaaagagtttcggccgacgacgatttataccatcttgaacgactcgctgccgccgctcggggacgacgatttgcttccgttgtcgcaggttttgcaggacatggacgaaatcagcgatagattggatgaactgatgttgcatcaggacgcggcgaagcggcttgcggacgcgtacgagcgttacaaccagatgtggctgtatgaaacggcgaagcggaccgttgacgcgacgaaggctgccgacgacgcgttccaggcggcggaggaacaggtcgcgctgttgaagctggcggaggccgagagagaagagacggaccaggcgtttgttcaggccacaaaggatcgggacaagacggagacggaactcgagttgctcaagcgttccgagggcatggagcttcgaatcgagctggatggcacgcaaaatcgagtgaaagacacagcgcgcgagctaaaagatacggaagagcgtatcgcgcaaaacaaggaggaagtgagacgaaagcaggttcgggttgacgcggaaatgcgcaaactcgaagacgaggagcacaaacagcgcggttggctgacggacatggccgagatcgccaaggacattgaattcagcacgcatgaagcctatgctggcggtgtcagtacgtccttggaggatttagacgaggcgacgtggcagcgctggttggcggatgtggaccgttatcgtggagagctagatcacgcgctcgatttgattcgcaaagaacgagcagaggcggataagctcaaggaagcggagagacaaatgagcgtggcccgggagcggcgggatgctgcggagaaaacggtgcaggagcgagaaagagacttgtccgccgcgattaccttgcaggaggatctcgccttcgcttggtttaagggactgacggaactgcccttatccgaggaagcttggcgttccctcctcaacgatttgcgccgttacggcgagctttcgtatgaccagattctcacgccagccaaggaagcattggatacagggcggagcaaggcgacagaagcgcgtttgaagttcgcgcacgagaaatctttgttggaagaacagcgaacacagttagaacgcgagttggaggagtggcgcacctttaaggaagccgaaccacctcggacgggcgcgagatctgacacgcgcaatcggcgggtggctctggcagcagacaagcgcatttcaggcgcgccactgtacaaagtatgcgagttccgtgattcggtggacgagcctacccgggctgcattggagactgcgttgtttcagagcggactgctcgacgcgtgggtgtcaccggaagcacctcctgttgaagatggcgacgaagacggatggattcgaccgaaccctgctgtttttggttacacgctggctgactatctgatgccgacaccgtcggaggaaagtgggttgacgccgcaattcgtggaagacgtgcttcgcacgattctgattgcgaatccggattcggttgaggatgccaacacagcggccgtgacgaccttcggccagtacatgctgggacccttggtggggcagagtgcgagcaaaccgagcgcggaatggattggctttgaagcgcgcaaacgttcccggcaggcggcgatggagcgattgaaggaagatatttctgcgctgacggatcggattggggaactagatagagacattgccgagatagagtgccgtattcgcgcaatgcacgcagagtttgcggcttttccctccgaagagcctctcagaacacatcttgctcagctcgagactgccaaacgcgattttgcgcacgcgagagacgtggaagcaaagcaaacagacgcgttcaagatgcagcaggccgcctggcaaaaggtgaaggaaatcttggtctcatatatctcccggtgggatgcactgcgaatcgaatcggactttcagcatgcgctcggcttgttgcgcagctatgaacaaacatgtcaatcatgccgaatgagcgcgcgattgtctgcgcgaatgcgtttggaaatggggtatttgaaggacgagatcgacagactggagcagcacatcgacgaagacatgtcgaccgagacagaattgcgccgccgtttgtccggtttgcagacgaccatcacgtcgctgcgagcgcgtttggaggcgttaggcgcgctcaatgtacatgatcaagagcaccaactgaaggaacgcttggagatgttgcgcaggcacattgagacgctgcaggacatgaaggtggaacgggcgacgaaggtgacgcgcctccaagagcggctgcgggagaaacgggaggtattggataaaagtgagcgtgtactcgaagcgtgtatcgagcgttttcgtcaggaatggcaacttggtttaacggttcacggtagggcagatggggacgaaacgatggcgcttagcgggcgtcaggaagtgattcaagcggcgcgcaaggcctttcgtgcgttgcgcggtgtttgtgaagctcgaaatatccagtccatcacggatcagttgcgagaggtatttgccgtcgaaaaaaacacgcttcttgactattcgctggagtcgcggttcgacgaatcgctggagcggctgtttgtcgaatcgaggcgggatagaaatcactcttggacaccatttcgcatccatcaggagttgacgcgaatggtggaagagcagcggattttgatcagcgagaaggaccgcgagttgtacgaacagattctgattcacagcgtcggtcgtgcgatacgagacaagattaaccgcgcggaacgctgggtcaaagaaatgaaccattttatgtcactccggaacacgtcgagcggtatggtgttgtccttggactggaagcctcgtcctgcccgtggtgagcgagaattggacacggagcggctcgtttatttgctccgcaagagccccagcacgttgttggacgaagaaatggaagatatgattgagcattttcgttcccgcatacgcatggcgaaagaagagtccgaatctggagaaacactgcggagcttgattcgtgaattcctagattatcggaattggttttcgttcacgttgtattatcgcaaaggcggtatggcgtctcggagagagttgacggattcgcaatttaacgtgctgagcggcggtgaaaaggcgatggcgatgtacattcctttgtttgcggcgaccgattcgaggtttaacgattctcgtccagacgcgccgcgtctcatttcactcgacgaagcgtttgctggtgtggacgaagaaaatatgcgcgatatgttcgaattgttgactgatatgaagttcgactatatgatgacaagccaacaactctggggatgttacgacaccgttccagcgttgtccatctacgagatcttccgacccggcgacgtcgacttcgtcacggtgattccatattattggaatggacattcgagacgcatcgtggatggtgacgattggagttcggctcaggaagctgcagctacggttgaaccggttctcgaatga

SEQ ID NO: 50582 - DNA, 1311 bp, Alicyclobacillus acidoterrestris ATCC 49025
atggacgaattgatgacgtatcttcagcagcccgggttcgagcgattgtggcgagcggtcgcggataaataccagagacacgggagagttggcgggcgcgttcagctcacagggctatccgacgaagagatagacgcattgtcagggcttttagctgtgaatctcgatgggcggacagaggttgcgattcaattatcgaagattgatgaggcgcttttgaacagcaagtttcgcattggagtggcggacgtcttggtacgtctgtttccagatatgcgcacacgggaagagcaactggctgaggcgtcggccagttggaccgcctttcgcgattgggcgaaagcaggcgttcatcgtccggcagtgcttgattggattgagagattgagcgagggaaacgctcctggctatcgaacctacatggactgttatcgggcttatcaacgaataggtcgatgcgacgattggcgcatcgcgatgaaagctttggaggtatctctttcgccgcatcgcgtgtggaggctgcctgtgtttgcggctgaggtcacgggagatccccatgggttggaccggaatacacttgcgggtaaggtgttctattggggattggtcgcgttgacggccgattccgatgctgcagatagctccttaataagcgcactgcagccgaccgccacgtctgattcggaacatgttgacgatctcgaatcgaccgatacggccagcgacgcgccgtcggagtatatgcgatcagtctatatgaaagccggtatccgactcgatgacgtgagttcgattgtctgggtcggaaactgggctggtttgtttgaagtgccggtagcacttccgctgatggcgttggataatcatgtgaaggaagtgccagcggtagactccgtgtacgtcgtggaaaatccatctgtgttcgccgaactgattgagcagctcccatttggcgttccggttgtctgcaccagcgggcaaccgtcggtcgcggcgcttcgactgctggacatggcggttgctgcgggatcgaagattcgctacaacggggactttgatgtcaaaggtttgcagatgaccttgtcgcttggcaaccgatacggggatgcgttcgagccgtggtatatggatgtgtatacgtaccggttggcgagcaatgagaaacagccggaactgtctgatagagaagtacaaatgctgaagagcctcaacgtagactgggatgatgaattgattcctgcgatgacacttgtacggaagaaagtctttcaggagcatatcatttcgaagctattgagtgacttttga

SEQ ID NO: 50583 - DNA, 1509 bp, Geobacillus sp. JF8
atggacgccacatggctcaaacccattgtcgaagcaaagtatttatcgacggaaaacgcgcaccgctaccgggcgattttgcgctacttttacattcagcacgagcggatgcggcaatatttgtttcctgaagaagtgtacgcctttttaaagcagcacgaggaatttgccgattacaccgaagacgatttgcagcaagacctcgaccagctcgtcaaatggaacaacttgatcgcccgccaagagacggcgcatgtgcggacgattgaagagtttaagaaaaagcggttccgctaccaatgcagcccgtacacggtggagattgagcggatgatccgcacgcttgaacagctcggggattcgttcgggggatcgcttgagaaaacacggtttgaccgcttgtacgcctcgctttcccgcatggaaacgatcattgcgtctgattttcaagagcagcgggacgaactgcatcaagtatgggaagagacgtttgactatttcaagaagatcattcaaaactccgctgattacatcgcttacttgcacagcgaaaatttagaagagcggatgacgtctgaggcgtttcttgtctacaaagagcagttcaccgcctatttgcgcgattttatcgccgccttgcaaaaaacgtcgatgcagattgaacaattgcttgaagatttgccggaagaaggggttcggcagttcatcgagcatgtcgtcgactatgagcggtcgatcccgcgctttgccgaagcgctgccgccgcgtcctatgcagattgaagaaaaatgggagacgtggcgcagcttgtgcgaatggtttttagggcgcgacgggcgtgagagcgagctgtcgtttttgcaataccagacgaatgaagcgattcgccgcctgacgagggttgtgcaacggcttggcgagcggcatcaccattttcgcagccgcaaaggcgactacttgcatttggcccgttggttttcccgccttgaatcgattgaagaggcgcactgcctgtcagcggtcgtgtttggctgcttccatacgaaacatctcgtcgccgatgcaggggcgacggacaatatatatcgcgacgtatgggatgagccgccgtttgaatgggtgacaaaaccgcgcgtccgccattacggggaaaagaaaaagccgcaggcgatcgatgagaaagagatggaaaaagacgaagcgcgccgccgctatttggaagaaaaggagcgtgaggaagcggcgctcagacagcttgtgaccgatggaaaaatcgtgcttgccgaacttcccgaagtgagcccttatgtgcggaaaacgctgctcggctggatcgccaaggcgatggggcgtgaaggacaagcggtgaagacggaaaacggatgggtcgtcaaagtggtgaacaaagacggcacgatttgccttcgcgctgaggatggggagctggtgatgccgaactgtgaaatccatgtgctttcaagggggaatgagaatggaaacggcgtttga

SEQ ID NO: 50584 - DNA, 1197 bp, Geobacillus sp. JF8
atggaaacggcgtttgacgaccaggcgaaagaggcgctcgccgcgttgtttgaacagttttggatcgttcgggaacaggagccggagttgtatcaacttgtgcgcgagcgcgaacatgtgttgaaaaggtatgtcgaagagaagttcggctatcggctcatcgtgcatcgctatttcgccaaacttgagaaaatcccggctgaaccggagccatggatggggatcgagtcgtttcaagagccgcttgactacgcgttgttttgttgcttgatggcgtatttggaaggcaaggcggtggaagagaagtttttgctttccgacgtatgtgaggaaatccgcgctatgtatcccggagatataccggttgattggacgaactactcgcaccggcgcgcgcttattcgcgtgctgaaaacggcggaacaaatcgggctcatccgccggatggatggggaggtggaagcgttcgctcatcacgccggggaagaggcgctgtacgaagtgccggtgctggctcgctatttcatgcgcacgtatccgaaagatttgcttcggtatgaatcgcttgaggaactgctcgccgaggagtggaaggcggcgccgcaagactatcggcggcaccgtctgtaccgaaaactgtttttgtccccggcggtgtaccggacggaaggggatgaacaagacttttactacttgcgcaactttcgccatcggctgcgtgatgatatcgaagcgcatacgccgtttcggtatgagctgtacaaaaacgcggcgatgttgacgcttcctgagcggcaggcgccgtacaccacttttcctgatcagaaagggacgtcggagatcattcttcattttgctgctttggtgcgcgaacggcttgaggaatgtccgccggatgagtatggccgcctccggctgacgcctgaacaattttccgcctggctggctgattgccgccgccgttacgggtgcggatgggggaagacgtatcgtgacatgtcggccgccgagcttgttcgagaggtgcttgcggcgcttagcgaatggtgcatggcggatgtggagcacgataccggcatgatcgtcctttatccgcttcttggtcggctttcaggacggtatccggacgattttgacacgaaagagggggaggagcatcatgaacccgtgggttcttcatcgcgccgggctgattaa

SEQ ID NO: 50585 - DNA, 4119 bp, Geobacillus sp. JF8
atgaacccgtgggttcttcatcgcgccgggctgattaatttttggtattacgatgagcaatatttccatttcgctgacggaaagctgctcttgcgggggagcaacggggcgggcaaatcggtgacgatgcaaagcttaatccccgtgcttttggacggcaaaaagacgcccgaccgccttgacccattcggctcgcgggcgcggcggatggaagattacttgctcggggaaaaagatgtcgtcaaccgcgacgaacgaaccgggtatttgtttttggaatacaaacgaaaacagtcggaccaatacgtgacaacgggaatcggcttgcgcgcgaagcggcaaaaaagcctcgatttctggggatttgtcatcttcgacaaccgccgcgtcggtcatgacatcgccctatataaaaaggaaaaaacaggggagaaaatcccgttgacgaaacgcgagctggccgcattgcttggcgcgggcgggacggtcgtcgagacgcaaaaagagtatatggagcttgtgaataaacatgtgtttcgctttgaatcgatcgaagcgtttcaagaactgatcgaactgctcattcaactgcgcagtccgaagctgtccaaagattttaagccgacggtcatttacgagattttggaaagctcgctgcctccgttgaccgacgaagagcttcgccatttgtcggacacaatcgaaaacatggaccaggcaaaacagcagcttgagcaacttgaacgcgacgagcgggcgttgaagcgcctttgcgatcaataccgcctgtacaacgaatatatgatcgccgaaaaagcggcagaatacgtaaaagcggtcaagcaggccgaacagctcgccgccgagcaacaacgcctgcacgatgaagaagagcgggcgcgaacgacgcttgatgagcttgaggagtccatcacccgccttggccgcgaagaagatgtgctgcgctcgcgtgaaatcgacttggccggccacgaagtgttccagcaggcggagaagtacgaacagttgaaggcggagcgccagcgcctgcgggagcggcgagagcggcatgagcggacgatcgaggagaaggaacggatcgagcgccaacgccgccgccgcctcgatgaagcggaagcacggttggacgaccttgagcggaagcttgaagacgagctggagcagctgagtatggatgccgacgaaggatccttttccttgcatgaaacgaacgaaggcgactttcaccgccatcgccaaaaggagcaggagtttttgtttgccgcttggaaacaggaagccgaccgccatatcgagcggcttgaagggctggcccgcctttggcgcaggcatgacgatttgcagcggcgttatgaagaggcgagcaacgaagcgggggagcggcagcgggaaatggacgaatggcggcatcagcaacggaaatgggaagaactgctcgaacaagagaaagagcgttttgaacaagaggtgcttgcttgggtcgagcggggaggggtcgacgtttccgaagcggacattcagatgtttttgcaacaagtgggcggcatatatgaacaatactcggtcgatgacttgaagcgcccgttcgttcaaacgtattatgccgctgtcggcaagaaaaacgatgagaaatggcggctcgaacatgacatccgcctgttggaagagaagcgggcagagcgtgaagcggaactctgccattggcgggagaagcgcgatcctgagcctgagcgcgacgaacagacagaagccgcccgctcggctttggaacggcaaggaattccgtttgttccgctctatgccgccgtcgagtttgccgaccatgtacccgaccctgtacgcgaacggatcgaatcagcgctttcgcacgccggtctgcttgacgcactcattacggcccgcgaggtcgatgtcgcctgcgaccgtgttctcaccccaaacccggttcatatggcgcatacgctggctgattatttgcgccccgacgaagaggctcctgtgccagccgaacggattgacgacattttgcgaagcatcgtcatcgccgatgtggaacagcaagcgggcatgacgctggatgagcaagggcgctatgcgctcggtcttgtccgcggtcatgcgccaaagagagacaaggcgatgttcatcggccgtgcagcgcgggaacggtggcggctcgagaacatcgcggcgttggaagcggagatcgccgctttaggtcaagagatcgaacgcctgagaagggagcatcaggcggtggaagcggccatcgaggagctggccgattggtttatggcgtttccgtccgaccgcgatgtgcgcacggcgtttgaggaagcgcaagaagcgcgccgtcaggccgaaagcaaagagcgggagtggaagcggcaagaagaaaaagccatcctcttggcgcgggaatggaaacaaatcaagcagcagctccgtgatgagtcggccgagcttgacttagccttttccccggaaggctgtgaacaggcgcagttcgccatgaaatcgtacgtccgccatttgcacgaactcgaagtgctttaccgcgagacgcgccataccgaagcgatgatcgcacaacaacgcgaacagctcgaagcgctgcgcgaggaaattgacgaagcgaaaggggaacgaaatcagcttcgcgatgacgaagagcaacttgcattgcgaatgtcagagatggaacggacgctgaaacaaatgggggcggatgacattcgggcggaaattgcccgcatccaagaacggttggtatttttgcgcggagaaattccgcgccttgtcaacgaacgggcgcggacagaacagcgcctcatgcgcctcgtcgaggagcgggaacaaggggagcggcgagaatcgttcgcccgccagctggccgcgatgtgggagcggtcgtttgccgatgaagcggcgcttgggctcgtagacctcgaccgttcgctcccccttttggagcaggcaaaagaagcgaaacaacgatacgaagcagcgctaaaagagacgcgctcctcacttttggcgcggctgaacaccgtctttttccaagagtcgtccaacttgaccgaatatcgagcggcattcgagccgttgatggaacaaagagagcacgaatggatcgccgccgcgccggatgacgagatggcgatgaaagccgccgattggcgggaaaaacaagagcgccatgtcatttacctcgattataaaggccagcgcgccacaccgtttgccgtgctcgctgaggtggagcgcgacatcgccctgcagcacgaatatatgaaagaacaagaccgcgagctgtatgaagatgtcattctaaaatcagtcggccgcattttgcgcagccgcatccagcgcgccgagcggtgggtgaacgatatgaacaagctgatgggcggtctcgatacatcatcagggcttgtgttgtccattcaatggaaaccgaaaacggcggagacggaagcggagctggatacgaaagaattggtgcgccttttgcgcattgattcgcggttgttgaaagaggaagatttgcagcgggtgacgaaccatttccgctccaaaatcacgcgcgcccgcgaattgcttgaggagcgcggccaaggcaacacgctccaccagatcattaaagaagtgctggactaccggaaatggtttgccttcaccttgtactatgaaaaaacaaacgagccgaaacgcgagctgacgaaccatcgcttctaccaattcagcggcggggagaaggcgatggcgatgtacattccgctctttgccgcggcgtattcgcgctaccaggaagcgggtgatgacgcgccgtacatcatctcgctcgacgaggcgttcgccggcgttgacgaaaacaatatccgcaatatgttcggccttgtcgaacagcttggttttaactatatcatgaactcgcaagctctttggggcgactacgacaccgtgcccgctttgtccatttgcgaactcgtccgcccgcgcaacgcgtcgtttgtcaccgtcattcattaccgttggaatgggcgcgtcaaacagttggttgccgacgacaaagaatgggagagggttgagacgtga

SEQ ID NO: 50586 - DNA, 1221 bp, Geobacillus sp. JF8
gtgagcatcgccaaggaagccgccgcctttttccgctccgagcgggcgtttcatcgtctgtttgtcgagatgaaacgcaagtacgagtcacttggccgcgtgggaggcacggtttcgctgcaatcgttctctgacgaagaacgggaggccatcgccgcctttttcggcaaagacgtcgcccgcgtctccctttccacttttgaaaaacagctcggacaaaccaagtttgcgggcgtcggacttgtcgctctgctggaacaatattttggcgaatcgctcgtgtcgaaaaaggagcggcttcaggcggaagaggacgaacgggagcggtttttcgcgcgccttgtagaggaacatcattggttcgcgacgatccgcagccagcgcttcgtccaaacggcgtacgaaacgaaccgcgatggccttgaagcagctgtccgcctcgtcggcgaggctctccgccgcctgccgctttcatcctacatgcgcctcccgctctttgcccaacaagtggcgggcgatccgcacgcgttcgacctgtccacactgtcaggaaggctgctgttgtccgccttgcaagcggccgtcccaggccaatgggacgcgacgtctgtggagagtgtcaatgaactgttgcagtccgtcggattgctccgcgaagatatattaaactttgccacgtgcgccaacatcctggcggaaaccgaggaagggcctcatcgggtcttttccgccgccgtcgaggggaacgttgcgctgaacgtgccgttgcgagaagtgctgcccctcgcacgcgcccaccccgcctgcggccaaacagtgtacatcgtcgaaaacgccggcgttttctcgacgttgcttgacacccgcgccccgcttgtgagcacgaacggacaaatgaacctagcgacaatcaagctgctcgatttgctcgcggcctctggcgccaagctgtattattcgggcgacttcgacccggaaggattggccatggccgagcggctgctcgaacggtacggtccagccgtcaccctttggcgtttttccttggacgattatatggccgccaacccggtcgtggacctccctcctgagcgcctcgccaaactcgcatccgtggcgtccgagccgctgcggccagtgaaagaggccatcgagcgaacgaaaaaagccggctatcaagaagcgatcatcgagaggctggcgagggatataaaagggtag

SEQ ID NO: 50587 - DNA, 1491 bp, Geobacillus sp. A8; identical to SEQ ID NO: 50217

SEQ ID NO: 50588 - DNA, 1197 bp, Geobacillus sp. A8; identical to SEQ ID NO: 49776

SEQ ID NO: 50589 - DNA, 4122 bp, Geobacillus sp. A8
atggcgaatccatgggtgcttcatcgtgcggggctgattaatttttggtattacgacgagcagtattttcatttcgctgacggtaagctgctcttgcggggaagcaacggggcgggcaagtcggtgacgatgcaaagcttgatcccggtgcttttagacggcaagaagacgcccgatcgcctcgatccgttcggttcacgggcgcggcgcatggaagactacttgcttggggaaaaagatgtcgtcaatcgcgatgagcggaccgggtatttgtttttggaatataaacggaaagaatccgaccaatacgtcacaacgggcatcggcctgcgcgcgaagcggcaaaaaagcctcgatttctgggggtttgtcctctttgacaaccgccgcatcggctatgaccttcagttgtataaacaagaaaaaacaggtgaaaaaatcccgctgaccaagcgggagctggccacagcgctcggcgcgggcgggacggtcgtcgagacgcaaaaagactatatggagctcgtcaataagcatgtgtttcgctttgaatcgcttgaggcgtttcaagaattgatcgagctgctcattcaactgcgcagcccgaagctgtccaaagactttaagccgaccgtgatttatgaaattttggaaagctcgctgcctccgttgaccgacgacgagctccgccatttatcggacacgatcgaaaacatggaccaggcgaagcagcagcttgagcagctcgaacgcgacgagcgggcgttgaagcgtctttgcgatcaataccgcctttacaacgaatatatgatcgccgaaaaggcgacagaatacgtaaaagcggtcaagcaagctgaacagctcgctgctgcacaacaccgccttcacgatgaagaagagcaggcgcgaaagacgcttgatgagcttgatgagtccatcacccgcctccgccgtgaagaagacgtgctgcgttcacgtgaaatcgacttggctggccacgaagtgttccagcaagcggagaagtatgaacagttgaaatcggagagggagcgtctgcaggagcggtgggagcggcacgagcagacgatcgcggaaaaagaacggctggaacgccaacatcgccgccgcctcgatgaatcggaagcgcggctggatgaccttgaacggaaacttgaagacgagttggcgcagctgcgagcggatgcggaagaaggagccttttctttgcatgaaacgaacgaagacgattttcaccgccatcgccaaaagcaacaagagttttcgtttgccgcttggaaacaggaagctgaccgccatatcgagcagctcgaggagttggcgcgcctttggcgcaggcatgacgatgtgaaacgacgctatgaagaagcgagcaccgaagcgggcgagcggcggcgggaaatggacgaatggcgtcatcagcaacagaaatgggaagagctgctcgagcaggagaaagagcggtttgaacaagccgtgcttgcctgggtcgagcaaggaggaatcgacgtttccgaagcggacattcaggcgtttttgcgacaaatgggcgccctctatgagctgtattcgctcgatgatctgaagcgcccgttcgttcaagcgtattacgatgccgtcggtaagaaaaaggatgagaaatggcggctcgaacatgacatccgtctgttggaagagaaacgggcagaacgtgaggccgaactgcgtcaatggcgggaacaacgcgaccctgaacccgaacgggatgaacaaacgacagccgcccgcttggcattggaacgggaagggattccgtttgtcccgttttatgccgcggtcgaatttgtcgacgatgtgcctgacgatgtgcgcgagcggatcgaatcggcgctttcgcacgctgggttgcttgacgccctcattgcggcccgcgatgtcgacgtcgactgcgaccgtgtgctcatcccgaaaccggttcatatggtgcatacgttggccgattatttgcgcccagatgcggatgcccctgtgtcggcggagcggattgacgaagtgctccgaagcatcgtgatcaccgatgcggaacaaaaaggcggcatgacgatcgacgaaacaggacgctattcgctcggccttgtccgtggccatgcgccgcggagagcgcgggcgatgttcatcggccgtgcggcgcgggagcggtggcggcttgagaacatcgcggcgctggaagccgagatcgccgctgtgggacaagagatcgaccgtctacgtcgtgagcatcaggcggtgggagcggccatccaagcgcttgccgactggtttgtgtccttcccatcggaccgcgatgtgcgcaccgcgtttgaggaagggcaagaagcccgccgccaagccgaaagcaaagaacgggaatggaagcggcaagaagaaaaagccgccctcctcgcgcgcgaatggaaacaaatcaaacaacagctccatgacgagtcggccgagcttgatttggcttttaccttggacggctgcgaacaagcccagctcgccatgaaatcgtacgtccgccatttgcacgaactcgaagtgctttaccgcgaaacgcgccataccgaggccatgatcgcccaacagcgcgagcggctcgcggcgctggaaacggagatcgacgaagcgaaaggcgaacgaaatcggattcgggatgaaaaagagcggatctccttggagatcgttgagatggaacggacgctcgcccaaatgggagcggatgacattcgcgcggaaatcgcccgcatccaagaacgattggcgtttttgcgccaagaaattccgcgccttgtcaacgaacgggcgcgcacggaacagcgcctcatgcgcttagtcgaagagcgggaaaaaggagcgcaacgggaagagttcgcctgccagctggccgccatgtgggagcggtcgtttgccgatgaagcggcgcttgggctcgtggatcttgatcgttcacgttcgcttttggagcaggccagagaagcgaaacaacggtatgaaacagtgttaaaagagacgcgttcctcgcttttggcgcggctgaacaccgtcttcttccaagagtcgtccaacttgaccgaatatcgggcgacgttcgagcggctggcggaacaaaaggagtccgaatggatcgccgccgccccagacgacgagatggcgatgaaagcggccgattggcgggaaaaacaagaacggcatgtcatttatctcgactacaaaggccagcgtgccacgccgtttgccgtgctcgccgaggtggagcgcgacatcgccttgcagcacgagtatatgaaggagcaagaccgcgagctgtatgaggacgtcattttaaaatcagtcggccgcattttgcgcagccgcatccagcgcgccgagcggtgggtgagcgatatgaacaaactgatgggaggtctcgacacgtcatcagggctcgtgctgtccattcaatggaagccgaaaacggcggagacggaagcggagctggatacgaaagagttggtccgtctgttgcggatcgattcgcggctgttgaaagaggaagatttgcagcgggtgacgaaccatttccgctcgaaaatcgcccgcgcccgcgaattgcttgaggagcgcggccaaggcaacacactccatcaaattattaaagaagtgctcgactatcggaaatggtttgccttcaccttgtactatgaaaaaacaaatgagccgaaacgcgagctgacgaaccaccgtttttaccaattcagcggcggggaaaaggcgatggcgatgtacattccccttttcgccgcggcgtattcgcgctaccaagaagcgggcgatgacgccccgtacatcatctcgctcgacgaggcgttcgccggcgttgacgaaaacaacatccgcaatctgttcggccttgtcgaacagcttggctttaactatatcatgaactcgcaggcgctttggggcgactacgacaccgtgcccgctttgtccatttgcgaactcgtccgcccgcgcaatgcatcgtttgtcaccgttattcattaccgttggaacgggcgtgtcaaacagctcatggttgatgacaaagaatgggagatgatcaaaacgtga

SEQ ID NO: 50590 - DNA, 1221 bp, Geobacillus sp. A8; identical to SEQ ID NO: 49778

SEQ ID NO: 50591 - DNA, 1515 bp, Saccharopolyspora erythraea D
ttggaaccggtccgcgtcccgccggagatgttccgattcaccagcggagaccgagccgagctctacgtctcggtgctgcatgcctttggtgaggccaacgaacgtctcgaaaccgcgctgggactcgacgacgtccgcggtcgcctgcgttcggtcggctggctcgacgcgctggaggacagcgatctgaccagtgcgctggagcagctgcgggactggaacctggtcgacgtcatccagaaccactccgagaactaccggaccgcagccgagtacgagcgacgcaacctccagtattcccttacccgccaaggggaggcagcgctggccggggtcgtgcacgcgatgagcgtgctggcatcgagtggcgcgttgcagactgccgtgctcgatgcgatctcggaccggctgggtgatctgctggagcacggcgaaaccggctccgaccggcaggtgttcgccatcctcaccgagctggaaagtcacctggacgccctgcgcggcaacacaaagcagttcaacggcgagctccagcgtctgctgcgggccgatggcgccgacctggagaccttccacgaggtcaaggcgtcgacggtggcttacctccaggagttcgtgaccaaccttgagcatcggacgcacgccatcgccacccgcatcggccgactcgaggaccacggtgtcgagcaactgcatcagcgtgcgctggcaggcgcggagctaccgcagctttccggtaccgacccggcaccggcgtggctggaacaccggcgcgcccgttgggaaggtcttcgcgcgtggtttcttccctgtgacagcacgccgccgagggtcgagcaacttcaccgggtggcgcgccgggcgatcgtcacgttgcttcaggtgcttgaccggatcaccgagtctcgcaggcgggcgagcagcgcggtcctcgacttccgtgagctggcgcgatggttcaccgtggttcccgagcgggatctgcaccggctgtggtcgacggttttcgggctcagctccgcccggcacgcacatctcgcccatcacgacccggagctggtcagtccgtcggtttcctggtcggagtcgcctccggtcgaggtctcgccattgcttcgcacggctggcaggacggaacggttcgccaggaccgggcgggtgcgtgacgtcaaggcgctgcgggcacagcgtgccgaacgcgcgcgagccgaacgcgcgcagctcgaagcggcgtggaacctgctcgacaccggtggtgccgtccgggtttccgagttcggagaactcgatcacgggatcttcgaacgactcctcgaactgctggggcgggcgctctcgagcgcgcccgacgagtccgggacgcgacgcggcagcactgccgacggccggatcgagatcctgctccggccaccgtcggactcagccgtcgcccacctgaccacaccacgcggcgtgttcagcggcccggactatgagatcgagatcaactctcttggcgcccgagggcacgcatga

SEQ ID NO: 50592 - DNA, 1236 bp, Saccharopolyspora erythraea D; identical to SEQ ID NO: 49905

SEQ ID NO: 50593 - DNA, 3993 bp, Saccharopolyspora erythraea D; identical to SEQ ID NO: 49906

SEQ ID NO: 50594 - DNA, 1080 bp, Saccharopolyspora erythraea D
gtggcggatctgctcggcatggctcggctgcccggcgaacacaccaccgtctcagtgcaggtgctcgaccggattctgcgggaatcgcttggcgtcggtgtccatgaggtcgtgaccgagcttgtcggcccggtgggcgatcaggccgctgaccggcgtcgcgcggcgatcgaacgtgacgagttgtggtcgtggctggaaggccatccggtggtcgccatgcagccagcgctgtccgactgggtcgcggcggtgcggcgggccggactcagcggcggttcggtcacacagaccagggaggatctcgaacgtgcgctgaaggttctcgcggtgctgcccgcatccggcatcccactgccggtgttggccgaacagacactgctcgacacacacgcacttgacgacggcaccaggtgttccggcctggtgttgcgcgcgctggccgcgatctacgaccgcccgtcccccgtcgacgcatccgagcggcgggcgttgtgggagcaggcgggcatcaccgacgacgagttgtcgtcggtggtcctcgccggtggcatgcgggttgatggcgacagcgtcgttggcagggtcctccgactctgcgcggacgccggccagccgagctcgctcaccctgcgccagatacgggcaagcgagttgaccagtgttccagagcgcgtctgggtcttcgagaacccgagcatgctcgccctcgcgctcaacaggttcggcgctgcctgcccacccatcgtggtcacctcgggttggcccagcagcgccggagtcctgttcctgcgcaaactcgcggcggcaggttgcgaactgcactaccacggcgacttcgacggcgaggggctgcgcatcgccgcgcacgtcatcgccaggaccggagcacggccatggcggatgagcagcggcgactacctggccgcggtcgccgacggcccgccggtgggccggaccaccccagtaccctgggacgatgaactcgccgaacacctgacccgcatgggtacgaccgtgtccgaagagcgggtggccactactctgctggacgagctcacccagcgacaccctgcctga

SEQ ID NO: 50595 - DNA, 1671 bp, Saccharopolyspora erythraea D; identical to SEQ ID NO: 49908

SEQ ID NO: 50596 - DNA, 4095 bp, Saccharopolyspora erythraea D
gtgagcacggaaatggagctgccgaacaggtggcggctgcaccgcggcggcatcgtcaacatctggcagtacgccgagcacaccttcgacctctccggcgggcgggcgatcttccagggcaccaacggctcgggcaagtcccgcaccctggagctgctgctgccgctgtgcctggacggcgacctgcgccagctcgggtcgaagggcttcgacacggtcagcatccgcaggctgatgctcgacgagtacccgggcgggcccaaccgcatcggctacgcctggatcgagctgcgccgcgacgcccccggcggcggtgaggagttcctgacctgcggcgtcggcgtcaaggcgtcgaagacctcgcaggccatcagcgactcgtggcggttcgtcaccggcaggcgggtcggggtcaacctgcagcttgtcgggtccgaccgggtgccggtcggaccggcccagcttcgcgagatgctcggtgccgactgcgtgctcgacgaccacgccttccgcgccaagatcgccgccaccgtctacggcatgcccgcagcccgctacggcgacctgctgcacctgcaacgcacgctgcgcaaccccgacgtcgggctcaaggtcctggaaggccagctcgagcagatcctctccgacgcgctgccgccgctggacccgtcgctgatcgagcggctggcgacctccttcgacgacctcgagtcgatccgggagaacatcgtccgcctcagcagcgcggacaaggcgctgagcgcgttcctgacgacctactccggctacgcgctgggctcgctgcgcgagcgggccgaggcgatgcgctcggcgcggacgcggctgcggtcgctgcgcgacgagctggcgaagctggagaagcaggtcgcggccaagcgcggcgaccgcgagtccgcacagcgcaccgtaaccgagctggagcagcgcgagggcgagctggagtccggcatcgacgcgctgcgctcgcacccggcctactcggagctgcagaacctgcgcgaccgcgagcggctggtcgaaagcgcccgctcggcggcggtgacggcgctggacaccgcgagcaagcaccgcgcgcaggaggagcggtcggtggagtcggtgctgggaatgctgcgccggctggcgggcgacgcggacgccgccgagcaggccgcgcagcgcgccacccagcagctcacgaccgccgggctcgacggcgggctcgtcccgcgcccgcccgcggtccccaccgcccaggcccgcacctcgccggaccaggtgcgtaccgcaccggactccgacgccgaacccgcgaccatcgaccgccacatcgcaccggaggtcgacgccgacgcgctggcggccgccatgcgcgaggccgcgtcccgcaccggcgacgccgcgagcgtcgccacggagcgttcggcactgacgctggcactgcaccagcaggccgtggagctggacgcccagcaggacaaggtcgccgagctccagcgcctggcgcgccaggcccagctcaccgcgaccgaggccgcgggccggcgcaaccaggcccagcagcagctctccgacgccgccgcggtctgggtcgagcaggcgcagcgctggggtgccgggtggccggtgcccaccgcggacgatccggtacccgcgccgccgcgcgaccgggagctggtggccgaccggtcggcgacccgcgacgcgcgcgagcggacgcggcgctgggcgcggccgaagctgcacgaggcgcgcggccaggtgaccgaggtcgagcaggagctcgccgagctgcgcgagcgcacgcgcgggtgggagcaggagctcgccgagctgcgcgccggccacgagcggacgccgccgcgcccggcctgggccgacgccgaacgcgacgagagcaaggggcggccgttctaccgactcgtggacttctcgccctcgctcaacgacgacgaccgggcgggcctggaggccgcgttgcaggccagcggcctgctcaacgcctgggtgtcgctggacggcagcgtcgtcggcctggccgaactgctcgccgcaccggaaaagccggccgggtccgccaccctggccgacctgctcaccccggccgccgagccggactgccccgtgccgggcgagcacgtcgccgacctgctggcctcggtcgcgaccgacggcagcgcgggcctgtcggtgtcggccgacggcacctggcgtgcgggtgtgctctccggggcgtggagcaaggacaccgccgagtacgtcggcgccggggcccgcgagtcggcccgcgcccgccgcatcgcggagctggaggacgagctctcccagctgcgcgggcggatcgccgacgccgagcgccgccaccgcgacgccggcgagcacacctcgcggctggagcagtacctggagtcctaccccgacgacagcgacctgctcaccgcgcacgccaagctcgccaccgccctggaaagcgcccaggacgccgagcaccgcgccgcgcagctgcgcgaacagcacgagcaggccgaccagcggtggcaggccgcgcacgccgagctcgtccgttcggcgggcgaggccgacctccccgccgacacccgggcgctcgacgccgcccaccgcgccgcgtcggaggcccgcaacggcatcgacgcgctgcgcgaggcgatcgaggcgcggtgcctgccgaccctggccgaccttcgcgaggtctcgctgcaccacgacgtggcggtcgccgaccggatggaggccgagtcgcaggccgagcgccgctgcgccgactacggcgagcaggccgccgggctcgccgagctgacctccgcggtcggcggggaggcgcagcagatcgccgacaaggtgggcgacctggagcgggagcgcgcggagctgcgcagcgaactgccgcaggcgcgggagcggatcagctccctgcgggagtcctcggctaggctggagacgcagctggagaacaagcagtcccagctcgcgggccgggagcaggaggaagcatccaccaccgaggctttcggcacggcgctgcggatcccggggctgtgggcggccgccgcggtgtccgacgagctcccgccggaactcgacgacgcagcggcgctgctggtggaaagcgaccgcaagggagcatcggaaaccacggtgctcaaccgcttccaggccctccagcagtcgctgagcggcaactacgacatcagcgccggggagcagaacgggctgctcacggtcaccgtcaccggtgaggagggcccgcagccggtcgccgacgcggcgcggcgggtcagcgagcgcctcggcgagcagcgcggctacctcaacgagcggtaccagtcgatcttcgccgactacctcatccgcgacctggccgaacggctgcgcgggcagatcaccgtcgccgaggacctgtgcaagcggatgaacgaggtgctcgacggcgcccgctccagccagggcgtgcacgtgcagctcgaatggcagccgtcggcggcgctgggcgacgacatccggcagacgatcgagctggtgcgcacgccgttcgccgaccgcagcgacgaccaggacgcgctgctgcgccgggtgttcaccgacctgatcgagtccgagcgcgacagcacctccggcggctacgccgagatcctgtcccgggcgctggactaccggtcgtggttcgccttcaccgtccgggtccgcgacaccggccccgagggcaagccccgggtgcggcgcctgcgccagctctcgtcgggtgagacgcggctgatctcctacgtgacgctgttcgccgccgcggcggccttctacgacgcggtcagcgtctcggccggtggcggcgggccgctgcggctggtcctgctggacgaggcgttcgagcggctcgacgacccgacgatcgcgcggatgctgggactgctggtcgacctggacatggactggctgatcacctggccgagcggctggggcgtctcgccgaagatcccgaagatgcacatctacgacgtgctgcgaccgcgcagcgggcacgggatcgcctgcacccacaccacgtgggacggccggggtctggagcgggcggatggctga

SEQ ID NO: 50597 - DNA, 1251 bp, Saccharopolyspora erythraea D
atggctgacaccgacgacgtccgcgcgaggtgggacgtggaaccgttgcgcgggttgtgggagaaggcccgcgaggtcctggagtcgccggagcagccgtcgaccttccggctcgaactgcccgacgaggagacgcagaccgcggtcggcgaactgctcggccgcccgatgctgggctacggcacccggatcaaggtgtccactctggacgagcgggtccgcggggccggtctcggagtcgggctggcggaggtgctggaaatcctgcacggcaggccggtgtcccgcacgtcctcgatgtcctccacttcctcggtcgcggacgagccgcgtgccgcggtgcgcgcggcgctggccgagcactcgctgggcgacgcgccgtgggccgacgagtgggcccggtggctccaccagtacgggcgcgtgcccgaggacgaactcgacgtcgtcgtgcggcgtgccgccgccgtgctggctgagctggcgctcgaccgcgcccccgtcgcgtggacgtcccgcgcggacctggcagcccgcaccggtgacgcgcacgggctcgacagcggcacgacgctgagccgcgtcgtcctgcgggccgccgcgctcgcccacgacgtcgcggcacccggcaacgagcacgagcgccgcgcgctgtgggaacgctgcggcgtcgccctcgacggcgtctcggcgacggtgctgtgctggtcgctgccgctcaccggcgccgacgactggtcgcgttcggtgctccggcgcacggcggcgggtctgccgtcgcacctcacccacctcgacctccaggcggcgcccgcccggctcgtcgagcccggcacgaccctcacggtgtgcgagaacccccgcgtcctggaggccgcgctgcgggacgacatcgggcacccgctcgtctgcctgtccggccagccgacgacggccgggctcgaactgctgcgccgcctcgccgacgacggagcggtcctgcgctaccacggcgacttcgactggccgggcgtgggagttgcgggggccctgcggacccaactcggcgtcgagccgtggcgcatgacggcggccgactaccgccgggcactcgacgacgcggcccgcgaccgcatcgacctgccttccctcatcggggcgccggtggaaaccccgtgggacccggccctggcggacctcatggccacgtccgggcgcgcggtggaggaggaaaccctgcttccggccctcctggcggtccttcgccggtag

SEQ ID NO: 50598 - DNA, 504 bp, Peptoclostridium difficile P28
atggatgaagcacatcgcttaagtgcactggtgtttggggcagatacctgtatgcatttgaaaaacatcgcatcaagggatacggacagcattcacagtggggtgtatcaggaagcttctgccttccttgcactggagccgcgcacaaaggtggcaaggaaaaagcatgagcgaaagcctgcgacggattatgcactggatcggcgaatacagcgtctggagtatgaggcacagcgcgaggctgaacagaagaagataaaggaattgagtaaaaacggagaaatcatcttttctcagcttcccttacttgacaaggccaccagaaaagccctgcttggctgggtatccaaggcacttgccgcaagtgatcggcgtgccaaaacagatcaggggcagcattatcatatagaaaaggaacgggaaggcgattgtatactgcattgtgaggatggaaatctggtaatgccttgcttcaaaatcctgtttgatgaggaacagttatga

SEQ ID NO: 50599 - DNA, 1131 bp, Peptoclostridium difficile P28; identical to SEQ ID NO: 50239

SEQ ID NO: 50600 - DNA, 4008 bp, Peptoclostridium difficile P28
atgcaccggctggggctggttgatttctggtattatgtaaacgaggaattttcctttaaagacgggcacatgctgctcagaggaagcaacggttccggtaaatctgtcacaatgcaaagctttataccactgctgttggatggaaataaaagcagtgagcgtctggatccttttggtacacgctcacgtaaaatagaaaactatctgttggaggaaggcggcgaacgaacagatcgcatcggctatctttatctggaatttaaacgctcggacagtgaggtttacaaaaccatagggatgggtatgcacgcgaaacagggacgtccgcttgtatcgtggtattttgtaattgaggataatctgagaatcaacagagaagtgcagctactggatcataacctggcaattacaaagcaggtgttgaaaaaccgtatcggtgacacgcaggtcatggattcgcaaaaagaatacatggacagagtgaatcaggcactgtttggttttgaaaccagcgaggaatataaggaagctatcacattgttgctgcagctgcgctcgcctaagctgagcaattccttaaaaccaaccatgatcaatgaaatcctgagtgaatccttacagccgttgagcgaagatgatcttcgcccaatgagtgaagcgatatccaatatggataatatcaaggatcagctggatgccttaaagcaaagctatgcttctgcaaaggcggtttatcaggtgttcgagcagtacagtcatgccgtattgtttgaaaaataccatatctatcagactgtcaggcagacagccgcaaatcttcatgaagcttatcaaaaatatgaggaggaattacagcggcatcaacaggaaacaaagcagaagcaggaaaaccgtacacagctagcacaggaacaggcgctgttaacagaagaaaagctttctctggcaacagacgaccttcagcggctggtggaggattgcacaagactggctgctgagaaagaagatactatacaaaagctccagcataaggaaacccaggaagaggaaaaaagtgatcgtcttcaggaacttagagtacagcataagacacagagtgaccgatgtgagcaagccttgtctgaaatgaaggaagcctttgaccaattagatgtactgcaggaggagctgctgctggaggatcatctcctattaaaagaggagatgtttcagcatccggacactccatatgattttacatatatcggaaagcggctggatgcaaagcttcgcttacttgaggaaggactgcagctgtttaactcctatgatgttgcaaagtcacaccacaagcagctggtggaagaattagagcagcagaagcagacgaatgagcagcaggaacatctggtggcgcagcttgatgaacaatgtgaccgcatcgtggaggaatataaagaaagaatcagtcagtggtccgcaaacaatcagcatctaaagctgacggatgaggaattccacaagatgatgcatcttcttatgcagtatgaggaacagccggacttttataagctgacggatatcattcaacaaagctatcagacactatataaggaaatcattcacctgcaaattgagcaaaaggaaatggcggaaacctgtaggatgaatttggaacagaagagcgcagagctgcacatgtggcagacacaaaaggatccatctcctgcaattgctggggaacaggagcaggcacgccagcttctgaaacagcatcagattgaaagccgcagcttttacacccttctggaatttgatgagcagatggatgaggaactgcgcgcattgtgtgaagaggcattgctgcgtctgggagtactggatgcacaggtggtgcatgcgagctcccgatcattgattgaaacccttgcatcaggaagcggggatatgtatttctttacacagcgaaacgtaagggatttacaaccgtattatctgaaggggacaactcctgagcagcttgcgggtgaaatcaataccgttctgacatcccttcatatcacgtatgacggtaaactgcagctgcatgatgccatgtttcaaaccgggattgtagagggaaagctttatcaatctgtatcggcaagatacatcggagaaaatgcaagacagaaatacagagaacaaatgattctgcagttacagaaagcatgtgacatgctgaaaaaggaatatgatcaggaaatgcagaaactcacggatctggacaaacgattggagcagctggaacaggaagcatccgcttttgtaaaagaagatgatctgcatcttgccctacagcagttaaatgaggggcgaagaatattgcagcacgatattgcctgctatcatcagatggaggaacgtctgcgaagacatttggaagcgatgcagggaattgaaaaacagctgcgggaaactgcaggtaaattatcgattacgttacgccgcaatgtgtttgaacaacagaaggatggttataacagctacagaaaactgttacagctggtacaaacaaaacagccgatattcatacaatctctcgactttgtgaaaagctgtgaaacgcaaatagaagatgcctttcgggatgtttcagaattcaaagcagaaatcgatacgttaagagaactgataaagaaacaaaaccttcttctgcagcaaaaggaaaaacagctgaaggatttggggtatgaggataaacagaaacggttacagcagatcgaagaacgattgcataagctgccggatcttatgcaggaactggatacacgtttgggacagctgcaaagtcttgtagccgcaacgtcacaggatctggaacgcacaaagcaggatatcgaacatcaggatgcactggtttcaacgtattttgatgttgtgaaaaacgaagctgcactcggatatacgaatattcctttatgtgaagatggacagctgatcaaggaaatacggaatctggaaaaacagacagaagtcctaaagaaaccggaagcattgaaaatggatcttcagacagcttattacaatcatagaagtaatctgcaggaatacaatctgaccttcacaacggatgatacatgggaagaactcacagatatcagtgccagactggatatcaatgcgcgatatcagggaacctctctttcctttccagaactgcttgactgtctgcaacgtgatgttgatttacagaacaatctgcttgtagactctgaccgtcacctgtttgaggatatcctggtaaatatcatcagcaaaaaggtacgtatccgtatacaaaacagccgtgcgtgggtggataccatgaatcgctatatgaacgcaatgaataccagcagcggactgcatctgaatctgcagtggaagagtaaaaaagcggaaagtgaagaagaaatggataccagacagctggtggaaatcctgcaaaaggatgtcaaagtcgtaaaggaaagtgatttaaaacgtctgtcttcccacttccggtcaaaaattgctgccgcaagaaatctgcaaaatattgaaaacaacaccttaagctttcatcagctgatgcgtcaggttatggattatcgaacatggtttgaattcaaaatcatggcacaaaaaaccggagaagctaaaaaagagcttacgaacaataccttctatgcttttagcggaggtgagaaagcaatggcgatgtacgtgcctctattctcagccgtagccgcaaaatttgaaagtgccagagaggatgcgccgttgctgattgccctggatgaggcatttgcaggagtggatgaaaagaacatttacaatatgttcgatttgatcagcaaatttaaatttgactatattatgaattctcaggttctatggggagactacgcttccgtaaaaggtcttgccatttatgaactgtttcgaccggaaaacgcccgttttgtaactgtgattccatatgaatgggatgggcatataaaacgcatgaagggagatttatcatga

SEQ ID NO: 50601 - DNA, 1284 bp, Peptoclostridium difficile P28; identical to SEQ ID NO: 50128

SEQ ID NO: 50602 - DNA, 1506 bp, Rhodococcus erythropolis CCM2595
atggtggaagaaacgagtgcgcccgattacgccgcgtacgccgacaccaatcgactgaagctgttttcgttcacgatcgcggaaaaacgggccgagtacctctgggtacttcgtgccttcgaccatgctcgcgccaactacaccgtcctgctgcatgccggagccgtcgcgcaaattctcgagaagatcggtggatcggatccggcggccgatctgtcggcagcagaggtcactcccctgttggatcagctccatgtgtgggagatcctcgagcgcagctacgacggcacccgcgcggccacgctggccgagtaccgcaatcgccacttcgtctaccagttcggtcaggctggataccaggtctatcgatcagtcgaagacgttctcgccgcacgcctggactcggcctcgctctcgcgcctcgctctgccggacctgctcgcagacatgtccgaactcgccgaggccaaccgaagctccgacggcgacctgatcttccgcaagctcaagcgcctcgactcgacgctctccgacatggccgatcgagccgcgcacttctatctgaccctcggggacctcgtacggaccacggagatcactccgcaggctttcctcacgcacaaggacgctctgctcacgcatatgcgggagttcagctccgatctggcgcgctacgcccccaagctcaaggaagcgatcgagcacgtcgaatccaccggggtcgatcgcatgatccgcctcgccgccgccagtgacgaacgggtgttcgtcccgatcaccgaacgcgaagacgactgggctgcgcgttggcgaggattgaccgcctggttcgtctccgcggaatcggggatcagcgagtccgagcgtctacgtgagggcacgatgagcgcgatcgccgcggttctggcgctccttcgccgcgtcacggaaacccgtcgcggcggcgtcagccgcgagagccagctccggcacctcgccggctggttcgccgccacgccgtccgaagacgcagctcatgctctgttccaggcagtgttcgacctcggccgtccacgccacctctcgatggtgcatccggacgccgacatcatttctcactcacgttcgtggtgggaggcaccgccggtcgagatcgcgcgaacactcgccgaaaccggccgcccgccctcaccaggattgccgagcaaggtcgcccgcaacgacggcagcatccgccgcctacgcgaagagcagttggcagcgcaacgtacgcgcagcgccgcggcgcaatcactcgcgtcgaacggcgtctatcagcgtgaactcaacgagcaggagaccgaagttttgctgagtctgctcaatgcagcactgaccgcgcgtgttccggtggtgggacgcgtcaagagttccaccggtagtgagaacggggtgaagctgacgctcagtccctcggacggttcgaccaccatcaagaccgcccgcgggcgtatgcacctcgacggcatcgaggtcagtgttcgatga

SEQ ID NO: 50603 - DNA, 1443 bp, Rhodococcus erythropolis CCM2595
atgagagctcgcgagatcacgccccttgccctcgactcgtatcaacgcgcggcgcgggtgatcctgtccaaccacctgatcacctcgacgtacccggatcgaattgcgttgccgctcttgcgccgttgggccaccgagctgcgtgacgacctactcgaactgttcggctatcgcctcgaggtgacggagaccaccgcgcgcctgttcacggtgtcggatcgactcaacccgtcggcaccggcccgaactgcctccgagcgaaccttcgatcgcacccgttacgcctacctggcattgtgcctggccgcgttgggccgcgccgggaaccagatcacgttgtcggagttggcggatcacgtcgcggccgatgctgcacaagtcgacggcgtcgaactctccaccgatcgtgcgtcggaccgcgacgccttcgtcgacgcagtgggctggctcggcgtcagaggcgccatcgccctcgccgacggtgacgcaaacggctgggcgtccaatcccgaagcgggagaagcgctctacgacatcgaccgctccgtcgtcgtagccctgttccgtccgccgcgcgccctgcagcacctccactccatccgcggactcctggccgccgacacctcgagcgctgccgaggacgacggaattcccgtggacgcgaaagagatcggacgccgagtgcgtcgggctctcgtcgagcggccggtcgtactggccggtgaactcgatcagcacgaattgatcgccttggcgcagcccaagaccgcgtcggaagtcgaactactgacggggttggtggccgagcgtcgcgccgagggaatcgcgatgatcgatcccaccggtcgcctctccgacgtccgcttcccgagcactggaacgatcgcccaggtagctctactcctcgccggcgagattgccgaccgcgtactcgacgtcgacgctccggagctgccgaaacttccgatcccgcacgtgtcggacgatcacctgatcgaacaactcgatgccgccatcccggaggccgggatcttcgaggacctcgccgacgaggacgacgacttcgtgctgcccgccggcgaaccggccgagcccccggaacccgtcacgtacccgatgatcgacgacgactggctcgccgacaaggtcagcgagttggtggaccagttcggacgcacgttcgcagcgcaatggcaggccgatcacaacgggctgcgcaagcaggcgctcgggttgctgcaacgtctgcgcctgacgcatgcggtcgacggcggcgtactggtgttgcccgtccttgcccggtaccgcgacgtcgtggtctccgtacgcgaacgcgatcctcagatcgacttcgcggtagacaactccgcaccggatccggtcgacgaattcggccccgaatcttccaccaacggcgaactatcagaggtagagaacgtatga

SEQ ID NO: 50604 - DNA, 4176 bp, Rhodococcus erythropolis CCM2595
atgagcaacgcccgcttccgacctactcgggctggaatcatcaacctctgggattaccgagaccaggagttctcgttcgccgacggtcgactggtcctacgagggccaaacggatccggtaagaccaaggccctcgaggtcttgttcccgttcgttttcgacggccgcatcgaaccgcggcgcctcaaccccttcgccggtgaagagcgcacgatgaagtccaaccttctctaccggggccaggacagcgcgcactcctacgtgtggatggagttctgccgcggctccctcgaagatcccgagtcggtgaccgtgggcatcggcatgcgtgcaacccgcaccaacgacaaggtcacccgctggtacttcgtcgccgacggccgcgtcggagtcgacttctcgctgatcggcaacgacgatcgtcctctcaccaagaagcagttggccgaacaactcggcagcgattccatcaccgaccgtcccctcgactaccgcaccgcgatcgacgcgcgaatgttcggtctcggagtgcagcgctacgaccagctgatcaatctcattctcacgcttcgccgtccccagctcgcgaagaaccttgatccgaagggcctttcgcaagcgctcaccgacggcctccgtccactcgacgaccaactcgtcctcgaagctgcgcgttcgttcagcgatatggaagaggtcggccgcgcactcgaggggctcgcagccgcggatcaggcagcgcagagtttcatcggggtctacaccaagtacctgcgtcagcagtctcgcggagagatcgaacaggtcagcacccgcctcgcagcagtcaccagaggcgttgccgccatggacgagtcgtcgctcgcccagacccgcagccgtgaagcccgggcagcagccgaggagcgcttcaaccaggccgagcaggcactcgagaacgcgcgcgccaatgtcgaggcgttgcaacgctcgagcgcctacgaaggcaaacagcagctcgacgatctcgcccaggccgtctcgacgctcaagctctcgaccgagcaacaggcagacaagtcgaggaaggcgcaggctgcactcgcgcaacgcggcgacgaagccgacaaggctgcatcgtcggtcaagcgtgcagccgaggcactctcgcgcgccgaggacgaactgcaggcagccgccgaggacgccggcatcgtctggactcccctgcccgacggctcacgcagcgaccagatcaccacagcagtgcgtggccatgccgaggaacgtgacggcgacgtacgcgtcgtccgcactgcgctcgcgaccgtcgagaaggccgctaccgaacgaacccgggccgaaaacagctcgcgccgtggacaagagctgctcgaagcgtccaaggccgctgtgctcgaaggcgcagctgccgtggaactcgcacgcagtcagtgcgccagtgggctgcgcgcgtggtggaccgatcactcttccttgttctcagctgtcggcgccgacacgtcgctgttcgaggctctcgacgcggcgctcgccgaagtcggcgacgaggacgctccggcgctgtccgcagttctcaccgagcacaccgaggcaggcaccgagacgctgcgcgagcgacgtcgtgaggccgaagctgaaatatctgcatcacacgcctccatcgcagctctgaaatccgagcgcaaggccgtctcggcggaacacgacgacgctccgccggccttccacgcacgcaccgacaaccgcagcgatctgggtggggcaccgctgtggcagctggtgcgcttcgccgattccgtcgaaccagacgtggccacgggaatcgaatccgcactccaggcggcaaatctgctggacggctgggtctgccccgacgaaaagattcccgatcacgtcagtgagcagttcctgaccgctctgccggtcaagcagcgcccgaagggacgaacgctggccgacgtcctcgaggtcgaaggcaatgccgacgtacccgacgctcgggtacaggacattctcgcgtcgatcagtctcgtcgaggcaccgggcgactccgatgccagcgtcgcgatcggcgtcgacgggcgcttctggcagggcgtcgcgcgtggccggcacgtcaaggccgacgccgagtacatcggcacgacagcgcgggcgcgtcgacgcgaagctcggatcaccgagatcgacgcgactctggaagaacttgccgcggcagtcgatgcagccaaggcactggtgacgcagaccaacgagcagctgagccgaatcaactctgcggcaaaggaattgccgaagacaggatcgatcctccgcgcactcaaaaccgtcaccgaatccgccggtgcactccgcactcgctcggaggccacggaaaccgcgcaacgcgaactcgatgcggcgatcgccgatctggcggcgaaggaaaagcaactccgggcgacggcgtcgcagcaccggaccccgcatatcggccgtgaactcgactccctcgcggcggcgatccgtcatttcgagaagcagggcgaactggcgctgcgctgccgacgcgaacatgccaaggaagtcgaactcgaacgcgagtctcgcgaccgtctcgacgaatcacgcgccaatgcggaggaattcgccgaggaagccgccatcgccgaggagagtctgcttcagcaggtccagcgcctcgagacactgcgcgacaccctcggggccagcgccgagcagatcgacctcgacctggcaaaagcccgcgcgaagatcgaagaatgcaaggtcgaacagcgtgctgcgcgaaaggcgtacgacgctgcggtactccagatcggcacggcagagggtgcgtacaacaccgccgtcgagacgttgcgccacaccctgaccgaaacccgcagtgatgcagagcgactcgcaccctatgctcgcccggaccttctcgagttgttgggcgtcaaggaacatctgagctggccggcaagttcagcggcgtggatgagccccgatcagttggtctaccgcatccagaacgaagaccgcagcgaggacgcggcccacccgcccgtcctccccgaagacgtcgacaagttgtaccgagcgctcgaggctgcgacctcggcggtacgcgtcaccgacggagcccgcaaggcaacccgcacggcactgacctcggcgttgcaggacttcgacgcccaactcgcggcggccggacaggactaccgcctgcagtgggatgcaccggacggactgaccgtcgtacgagtgcaggacgatcagggctattcgtcgatcggtgaattcgcaacgcggatccacgatgctcgtggcgatcaggagcagttgctcaccgaatccgagcgtcgcattctcgaagatgccctgctgaccggattggctcagcagatccacgagcgcacggtcgatgcacgcgtgttgatcgcacagatgggcacggagatgcgtgagcgtcggatgtcctcgggcaacaccatcggcgttcactgggtgctcgccgacaacctcgacgacagctcgcgggcgatctccaagctgctggatcgagacgcgtcggccctcggcgtcgatgaactggctactctgcgagctcatttcgcgacccagatccgtaccgcccgcgcggcgcaccccgaacgctcgtacccggaaatcctgtcctcggcgctcgactacaggcagtggcgcgtgttctcgttcaccctcatcagcggtgagggcaaggaagaccgccttaccgtcgcgcggcacagcgcgctgtccggtggcgagcagtcggtttcgctgcaccttcctttattcgccgccgcgcacgtcatgctggactcggccgacccgcacgccccgcgtctgctggcactggacgaggccttcgccggtgtcgacgacaacggacgcagcgagctgctcggcttgagcgttcagttcgacctggatctcttcatgactggctacgacctgtggatcacgtacgcagacgtccccggctgtgcgcactacgacctcgcgcactccacggccgaacaagctgtcagcgccgcgctgctggtgtggtcgaacggtgaactactcgccgagcacgacggaacggatctggcgcgggcattgggctcgccgctacggcgccgggtgccgacaccagccgaaggtgcgttggactacgcctag

SEQ ID NO: 50605 - DNA, 1506 bp, Rhodococcus sp. P27
atggtggaagaaacgagtgcgcccgattacgccgcgtacgccgacaccaatcgactgaagctgttttcgttcacgatcgcggaaaaacgggccgagtacctctgggtacttcgtgccttcgaccatgctcgcgccaactacaccgtcctgctgcatgccggagccgtcgcgcaaatcctcgagaagatcggtggatcggatccggcggccgatctgtcggcagcagaggtcactcccctgttggatcagctccatgtgtgggagatcctcgagcgcagctacgacggcacccgcgcggccacgctggccgagtaccgcaatcgccacttcgtctaccagttcggtcaggccggataccaggtctatcgatcagtcgaagacgtactcgccgcacgcctggactcggcctcgctctcgcgcctcgctctgccggacctgctcgcagacatgtccgaactcgccgaggccaaccgaagctccgacggcgacctgatcttccgcaagctcaagcgcctcgactcgacgctctccgacatggccgatcgagccgcgcacttctatctgaccctcggcgacctcgtacggaccacggagatcactccgcaggctttcctcacgcacaaggacgctctgctcacgcacatgcgggagttcagctccgatctggcgcgctacgcccccaagctcaaggaagcgatcgagcacgtcgaatccaccggggtcgatcgcatgatccgcctcgccgccgccagtgacgaacgggtgttcgtcccgatcaccgaacgcgaagacgactgggctgcgcgttggcgaggattgaccgcctggttcgtctccgcggaatcggggatcagcgagtccgagcgtctacgtgagggcacgatgagcgcgatcgccgcggttctggcgctccttcgccgcgtcacggaaacccgtcgcggcggcgtcagccgcgagagccagctccggcacctcgccggctggttcgccgccacgccgtccgaagacgcagctcatgctctgttccaggcagtgttcgacctcggccgtccacgccacctctcgatggtgcatccggacgccgacatcatttctcactcacgttcgtggtgggaggcaccgccggtcgagatcgcgcgaacactcgccgaaaacggtcgcccgccctcaccaggattgccgagcaaggtcgcccgcaacgacggcagcatccgccgcctacgcgaagagcagttggcagcgcaacgtacgcgcagcgctgcggcgcaatcactcgcgtccaacggcgtctatcagcgtgaactcaacgagcaggagaccgaagttttgctgagtctgctcaatgcagcactgaccgcgcgtgttccggtggtgggacgcgtcaagagttccaccggtagtgagaacggggtgaagctgacgctcagtccctcggacggttcgaccaccatcaagaccgcccgcgggcgtatgcacctcgacggcatcgaggtcagtgttcgatga

SEQ ID NO: 50606 - DNA, 1443 bp, Rhodococcus sp. P27
atgagagctcgcgagatcacgccccttgccctcgactcgtatcaacgcgcggcgcgagtgatcctgtccaaccacctgatcacctcgacgtacccggatcgaattgcgttgccgctcttgcgccgttgggccaccgagctgcgtgacgacctactcgaactgttcggctaccgcctcgaggtgacggagaccaccgcgcgcctgttcacggtgtcggatcgactcaacccgtcggcaccggcccgaactgcctccgagcgaaccttcgatcgcacgcgttacgcctacctggcattgtgcctggccgcgttgggccgcgccgggaaccagatcacgttgtcggagttggcggatcacgtcgcggctgacgctgcgcaagtggacggcgtcgaactctccaccgatcgtgcgtcggaccgcgacgccttcgtcgacgcagtgggctggctcggcgtcagaggcgccatcgcactcgccgacggtgacgcaaacggctgggcgtccaatcccgaagcgggagaagcgctctacgacatcgaccgttccgtcgtcgtagccctgttccgtccgccgcgcgccctgcagcacctgcactccatccgcggactcctggccacggagacctcgagcgctgccgaggacgacggaattccggtggacgcgaaagagatcggacgccgagtgcgtcgggctctggtcgagcggccggtcgtactggcgggtgaactcgatcagcacgaattgatcgcgttggcgcagcccaagaccgcgtcggaagtcgaactactgacggggttggtggccgagcgtcgcgccgagggaatcgcgatgatcgatcccaccggtcgcctctccgacgtccgcttcccgagcaccggaacgatcgcccaggtagcgctactcctcgccggcgagattgccgaccgcgtactcgacgtcgacgctccggagctgccgaaacttccgatcccgcacgtgtcggacgatcacctgatcgaacaactcgatgccgccatccccgaggccgggatcttcgaggacctcgccgacgaggacgacgatttcgtgctgcccgccggcgaaccggccgagcccccggaacccgtcacgtacccgatgatcgacgacgactggctcgccgacaaggtcaccgagttggtggaccagttcggtcgcacgtttgcagcgcaatggcaggccgatcacaacgggctgcgcaagcaggcgctcgggttgctgcaacgtctgcgcctgacgcatgcggtcgacggcggcgtactggtgttgcccgtccttgcccggtaccgcgacgtcgtggtctccgtacgcgaacgcgatcctcagatcgacttcgcggtagacaactccgcaccggatccggtcgacgaattcggccccgaatcttccaccaacggcgaactatcagaggtagagaacgtatga

SEQ ID NO: 50607 - DNA, 999 bp, Rhodococcus sp. P27
gtgcgtggccatgccgaggagcgtgacggcgacgtacgcgtcgtccgcactgcgctcgcgaccgtcgagaaggccgctaccgaacgaacccgggccgaaaacagctcgcgccgtggacaagagctgctcgaagcgtccaaggccgctgtgctcgagggcgaagctgccgtggaactcgcacgcagtcagtgcgccagtgggctgcgcgcgtggtggaccgatcactcctccctgttttcggctgtcggcgccgacacctcgctgttcgaggctctcgacgcggcgctcgccgaggtcggcgacgaggacgctccggcgctgtccgcagttctcaccgagcacaccgaggcaggcaccgagacgctgcgcgagcgacgtcgtgaggccgaagctgaaatatctgcatcacacgcctccatcgcagctctgaaatccgagcgcaaggccgtctcggcggaacatgacgatgctccgccggccttccacgcacggaccgacaaccgcagtgatctgggtggggcgccgctgtggcagctggtgcgcttcgccgattcagtcgaaccagacgtggctacgggaatcgaatccgcactccaggcggcaaatctgctggacggctgggtctgccccgacgaaacgattcccgatcacgtcagtgagcagttcctgaccgctctgccggtcaagcagcgcccgaaggacgaacgctggccgacgtcctcgaggtcgaaggcaatgccgacgtacccgacgctcgggtacaggacattctcgcgtcgatcagtctcgtcgaggcaccgggcgactccgatgccagcgtcgcgatcggcgtcgacgggcgcttctggcagggcgtcgcgcgtggccggcacgtcaaggccgacgccgagtacatcggcacgacagcgcgggcgcgtcgacgcgaagctcggatcaccgagatcgacgcggctctggaagaacttgccgcggcagtcgatgcagccaaggcactggtga

SEQ ID NO: 50608 - DNA, 1608 bp, Candidatus Microthrix parvicella RN1
atgaatcctctggacagcgtcccgtcggcgggggaggcgcagccctccgccaaggccaccaccggcgctgatcaccggcaggccgaggcatcgccgatgccggaccaaggccccggtgcgctgcaccttcgggtgctcgatggtgaggaacgcaacaagctgagggtgctgaaagccgccacggagaccaacgcaccgatctacctggcgatcctggcggtgttcgtcgccgcccgggagcgctacgaggtcgagatccgcaccgagcgcatcgcggccgaactcaccggggcgggtatcgacgtcgaagggctggacccggccctggagcagctgcgcgactggggcaacctcaccttgacccaggacacggtccgggtctcccgcctggaggacttccgacggcgccggtcactgtggcagctgaccgcagccggtcaggcctcccacgaggcggtgcttgccgtgctcggggcatccgaccagggcggctcgctgcagcgaacactgttccgggacatccgcgacaaccttgccctgctggccgacgcgatcgaccgcgccgatgccgagcaggtgtacctgcgcctgcgcgacctggacgggtcgcttcgggaactggccgccaacgcccgcgacttccacgctgccgtggcccagctgcggcgggaacacgacgtggacccagccaggtttctggtctacaaggacctgctgatcgactacctcgagcagttcctcgatcacctgatgacccaacgtggtttggtggcccggggcgtcgaggcggtcaacgaacggggcatcgaacggttgggtgagttggcggcggcgggcgacgactctgctggattgtttgacaccggcgaccgggccgcgctgtggcgtaatcgctggaccggcctgtcggactggttcgtgtcggtcggtgatcgaccctccggggctgatgacctgaccgcggccaccacgaccgccatccgcgagctgcttgccctgttgcggcaggtcaccgaaagcgcccggcgatcgatcactcgggcatccgagctgctggtgctggcccgctggttccggcgcatcgacgaccgggccgccgccgaactgttcgatgccgctttcggcctggggcggccgctgcatctcagcgatggcgagaccgacgacgagtccgtcgccgcatcggactcgtggtgggatgcgccgccggtgaacgtgccggtgacgctgcgcgaacatgggcgccgcccctcgcccggtcgcccggcacaggccaccgactacgcgttgaccaaggcgcagttgatggccgagcatcgggcggcccagtcggccagggccgaggcggccgcgcggctgtgcgcccgaccggtggaagggcgggtgttgtctgacgccgaggcgaccatcttgttcgaactgctcgaccgggccgctcacctgcgttcggtcggcgacgagccgggcagtgacgacccggtgcgtgtcgagggcgcccaggcgacatttcgatgcgaccccgacggcatggtcatacagacccgccgaggatccctcaccatcggcgagcatcgcctgcacatcgagtcggtcggagcgacaccgtga

SEQ ID NO: 50609 - DNA, 1332 bp, Candidatus Microthrix parvicella RN1
gtgagcgctgcgacgggcctgatcgctcccttcgacgggacgacggccggaccgcgggcggcggtgcagatcgacgccggcgaactggaggacttccagcgcaccgcccgcctgctgctcggccatccgttggtcactccaacctggccaaaccccagggcgttgacgacggtgcgccgctgggaggtgccgctgcgcaacgagttctcgcgggtgctcggcttccgtctcgatgtcggtcgcagctcggcccgcctctatcggcgggcggccaccacctcggttcaccgggggcccttcacccgtaccctccgtccgctgggtcacgtcgcgtgttcgttcctgtgtctggtgctggcggcgctggaggagctgggcgaccagaccactgcgtcccgcctggccgacgccgtgctgcggttgcgctcgggcgacgacgcgttgccggttgacctcaccgtctacacacaacggagagcgttcgtcgacgcggtcacgtggctggaggaccgcggcgtgctcggcctgcgcgacggaggcgccgaccagtggctggatcacgatgccgagggtgatgcgctctatgacgtggaccgggactgtgtgtcccggctgctggtcagctcgccgagcgtgctgcggggcgttggggaggccgccgactttctggtggaacccaccgcgcccggcacggaggatcggccccaggcgctgcgccaccggctggcccgtcgactggtcgagggcccggtgatgtcgtacatcgacctcggaccggaggagctggcttacgtgcgcgagcgacggacccgtctggtccgcgacctggagcagctcaccggctgtcacgtcgagtcccgggctgagggcatgagcctggtggacgcccagatcgagccgatcaccgagtcgaagcaccgcttccccggcgggggaacgctcacccaggctgcgttgttgtggggtgccgcgttggtcgacctggcggcaaccggcgaggaggtcgccgccgagatggtccgggacccggaggttcggcccgccgtggcggccgaacgatgggtgggcgatgctgccggcgagcaggcctgggaggacatcgtcgaggagtaccggtcgaggttctcgtcggactaccgcgagtcgcccgacaagctgcgacgagaggtgagggagttgctgggccgctttggcctgctgggtgtcgaggacgacaggctgagggtgcacgcggcgctggcccgctatcgccccgacaccgaggcggagatcggcgtggccgccaggcagaacacgttgacgtcacagttgtttggagacgatcactcgtga

SEQ ID NO: 50610 - DNA, 4380 bp, Candidatus Microthrix parvicella RN1
gtgagcgagacgggcaccgaccaccaggcaaactccgatgaggtggccgatcggtggcggccacaccgggcgggcgtccgcaacgtgtgggagtacgacgaccaggtgttcagctttgccgacggacgcctgatcctccgcggccccaacggctcgggcaagtccaatgcgctcgccctgctctttcccttcctggtggagggggtgatgagtgccgacgccatggacccattcgccggcggtcgctcgatgcggtcgttgctgttgggggtgctgcgggatgacgatgcagggtcgcgcaagttccgtcacgagcagcggctgggctacgtgtggatggagttcgagcggaccgcctcgggcaatggagcgacgcccgaacacctcaccatcggctgcggcgcccgagccaccgcggcttccaccaacaccgcgtcgtggttcttcgtaaccgaccagcgggtcggcctcgacttcgagttggcgcccgacgggtcgcccctcacccggggccgcctgcgggacgagttgggtaacgccgccgtattcgacaccgccgagacctatcgggctgcggtcgatcgtgcgctgctgggtctgggggcggaccgccaccagaagctcaccaccctgatccgagtgctgcgccgtccgcagctggccggaaagctcgatcttcgcctcttgtcggaggtgctttccggcggcctgccgtcgctggacgatcgggtgctcgatgacgtggcccagagcctggacgacctcgaggccacccagcgcgacctggccgacctgaaggtcacccggtccatcgttgacgcattcgtgcccgtctacgtcgcctacctcgggggtgaggcgctgggccgatcggcggcggtgatcgacgccgcccaggtgctgcgccgggccaaccgcacggtggtcgacgccgaggccgaggcgacgcgcctcgacggtgcgatcgccgagaacgagtccaaacgccggggcgcggcactggagcgatcggctgccgacggccgccgcagcgccgtgctggagtcacccgcctaccgggatgccagcagcctggttgaggtggagggatcggtgggccgtgctgcgaaggtcaagcgcaacgccgccgagcagcgcgacgcctgcgccgggcgtgcggaggcggctcaatccgcagcgtcgacggccgccgagcgggccgccgagtcgctgtctggagccgaggctgcgctcaccgaggtcgaggactctgccgatgccgccgatatcgcctggacgctcacccgagacgaggcccgccgtcccgaccgcctggagcccggtgcgcgggtggccgagcgggcgcgccgagacgacctcaaagtggtgcgcgcagcgcttgtgcagcggaacgaggcggcccgggaccacgctcgagccgaggaggccgcttcccaggcgttgcgcgccgtcgacgaggccgatgtcgccgtagccgaggcggagacgtccacccggcagcggcgcaccgagctgagcgagtcggtcgagcggtgggtggcaggtgcgccctggttggccgaggtcgtcgatgcggcggcggagcgggaagcacgtgacccggcgtcggtcgacgcacaacctgtcgacacggcggaggttcgcgaacgactggccgcggccgtcggtacggttggggagtcaggtgcaccgtcgctctcggctgccttcagggaagccaccgacccggctcgcgttggactcatcgagcgccgcagcgccagcaagggccacatcgataccctcacggccgccgtcggttcgctggagacccaacgagacgaggtggcatcggagaccgacccgggtccggcaccaccaacctggcgcaccgaacgcgagccggggcgtcctggcgcaccactgtggcgatgctgtgattgggcaccgggtgtcgacgaccacgaccgggctcaattggaggcggcgctggacgcctccgggctgttggacgcatggattgagcctgatggggacgagcccgccacaaggacatccgaagggtcggccgactcctggttcgcctcgctcagcgacgccgaacccggggaccccaccggtctggcctcggttctggtgccgtcggtgcccgaggggtcgggcctcgacgagcaggtcgtcgcccgggtgttggcgtcgattgaactgaccgaccacggcgccatcaacagcggcccaaggcgcggggcatcaggggtcagcgccggcgggcggttcgccctgggcccgctgcggggccgggccaccaaacccgagcccgaatacgtgggggccaccgcccgagccgagcgtcgccgtcgtcgcctggccgaactcgacgccctgatcgtcgccgccgccgaggcggtcgaagtcgagattgcggtgttccagaccctggaagccgcactggtcgcgctgagggcggcgtcctcaacactgccgtcggaggacggactgttgaggtcgttgaacgccgaacgcagcgcccgatcccacgccgaggcccgccgcgaggtggccgagcgggcagaggaggccgagtcggttgccgccgggtctgccgcagcggccgagtccgaccttcagtcgacggccgcccggcaccgactggtgggtgacgacgcctcgctcgatcgtgtgaccgagttggtcgatcgatatgcgggcgccgtccggagcgctctcactatccgccggaccgccgagagcgatgccgagcgggccgatcaggatgccgaacgggcggccgaggcgacacagttgctgtccaacgccgagcgggacctggccgcggcagcggaggaacactcgacgctggcctcccgggcagcgaccctgcgcgagcgcctgggtgacgacgccgaggcgccgttggaggcgctgaagcgggctcaggccgacctggacgagatcgaggtgcgcttcgacgtgttatgggaggcgcttggcgagctgcagacctcgcgggggcgcgccggcgaggccgccgaccaggcgcgggcagcggtcgcccgtcacgaggccacgctgaccgcgcgttcggagcggctgccggtgcttcgccgtcgcgacctgttggcgctgttgctgccggaccacttcccggccgacgccccggcgcccgatccttcggagacccggcagggcgacggcgacgcggcgccgtccatcgaggccgatgccgggtcttccgcccgtcccgaccacagcgttgacgcgtcccgggggccggaagcccacgtggtgccctcggaagaactgccggtcgacgcggtggcgttcgcccggtggctcaacggacgcctcgacggtgtcgccccgacaccgcagcagcgggagcagaacatcgcggcgctggatcgggctcagaagaaggtgatcgacgagctgcatcacggctacgacgccgcgttcccacacgacgacgacctggtgaccgtcgaaatcaactcggacgccggcatggtgtcgctcgctgatctcaccgccgaactggcccgtcaggacgcagccctccagagctacctcaccgagggcgaccgggaggtgttcgaacggttcctgctcaaccaggtgtcccaccagttgcgacgcctgctgaccgacgccgacgagttcgtggccggggtcaaccaggcactggcggacgttcgcaccaccagtcgccttggcgtggacctgggctgggagctcaacaccgacgatcccggtatccgccaggcggtcaagttgttgcgtcacgataccgagcagatgggggaggatgagcgccaggcgctgcggtcgttcttcgagcgggtgatccgcgctcaacgggcggaggacccgaccgccgggtaccgggcggcgctggagaaggcgctcgactaccgggcctggtacgaattccggccgtatctccgaaccgccgacaacaagcgggtgaagctgacccgcaaccagtaccgccagctctccggcggcgagcaggcgatggcgctgcaccagccgctgtttgcggcggcggccgcccactatgaccgtgccgatcccaccgctccccgcatgatcgccctcgacgaggccttcgcaggtatcgatgaggagatgcggggcaagctgatggggctgacggtggcctttgacctggacgtcatcctcaccggccacgagctgtggggtgcctacggggaggttccgtcggtggcggtgcacgacctgctgcgccgcccacccgccgagggggtcagcgtcgtttcattgcgttgggacggtcacgagctgatcgaggacgacgagctggcgggcaccgccaccgagtcgctgttgcaggtggcacctgacgagggcctgttcgcattcgatcccgacggaacgtga

SEQ ID NO: 50611 - DNA, 1296 bp, Candidatus Microthrix parvicella RN1
gtgagcgacgaacgtcgcgtcgccgcccgggctgcactgcggggagccgagtacgggccgctgtgggtcaaggcccggcgtcggctggaacgcaacggcctcagtctggagggcaccccgctgcgcctcgatggtttggatcttgcccagcgaccggccatcgccgggctactcggcacgtcggcggcaggcgacaagccactctcggtccggcttgagaacctcgatggtcggctgcgtcggggcgccgccgccgtcggtctcgttgaatggctggaggctctcgacggcccgatccgcaatcgaccggccgaacgcgccggcgcacaggccgaacgggagacgtcctggtcgaggaccgaggcccacccgatgctggtcgaacggggcgagcttcgggcgtggattgccgaagtccgtcggagtggggcggccacccgcatggccggatcggtttccgccggtgccgagctggcgagccgggtactcgacgtggtggcggtcctcccagccagtcacatcacgctggcccaacttggggcgcagctcaccggtgacgcccacgcgctcgatcgggaccgtgctctgggccgcctggtcgattctgcgctccgggcgatatccgcggtggccgacgaggagtctgatactgggacccggggagaggtgaccagcgtcggcggggccaacgactggcgccggcgttgggcccgccaaggtgtgatctgcgatgacctgtcggtgagcacgctcgttctcaacctgccgacctcgggtaccgacctgattgctgcagtgctcagcgaccacgcgtcgtgtggtgagcccgtccggctcacgctccgtcagctggcagaggccgaactggggatcaagaagggaacgctggttcgcatctgcgagaacccgtcggtcgtcgcacacgccgccaccacgctggagggtgactcggcgcccttggtgtgcgtcgagggtcagccaaacaccgccgtgctgaggttgttggatctgctgaccgccgacggggcggtgttcgcctaccacggcgacttcgactggggcgggctgcgcatcgccaaggccatcatcgatcgttacgacgtcaatccgtggcgcttcggtgtggacgactaccttgccgctgcgccatcgggcaccttgacgctgggtccacccgccactggggtcgccgcgccttggtctccaggacttgttgaggcgatgaccgcccacaacgtcgccatccatgaggagcaggtgctcgaccacctgctcgctgatctgaccaccaggtag

SEQ ID NO: 50612 - DNA, 1467 bp, Rhodococcus aetherivorans
gtgcaacacgaccggctccggttgttctcgttcgcgacggccgagaagcgggccgaatacctctgggtgctgcgtgctttcgacctcgcccgcgccaactacgtggtgctgctgcacgccgccgaggtcgcggcgatcctcgagcggaccggctcggcggatccggcggcggcgctgtcggcccaggacgtcgcaccgctgctcgagcagctgcacgcctggggtgtgctcgagcgcagctacgacggcacccgggcggcgtcgctggccgagtaccgcaaccggcactacgtgtatcagttcggccgggccggttatcacgccttccgggccgtggaggatgtgctgcgggcgcgcggcgaggacgcgtcgctgtcgcgtctcgcgctggcggatctgctggccgacctgaccgagctggcggcggcgaacgcggccggggacggagagctcatctatcgcaagctgtcgcggctggacacgacgttgtcggacatggccgagcgggccgcggggttctatctgatgctcggtgacctggtgcgcaccaccgaggtcacgcccgagtcgttcctggcgcacaaggatgcggtgctggcgcacatgcgcgagttcagcacggacctggcccgctacgcaccgaagctggcggccgcgctggcacgggtgcaggagacggggatcgaccgcatgctggggttcgccgccgcgcacgacgagcgggtgctgctgcccgcacccgaacggcaggcggactggcgagcccgatggcgcggcctcgagcggtggttcgtcggcgccggggacgtgccgagcgagtcggagcggttgcgggagggcacgatgagcgcgatcgcggcggtgctggcgctgctgcgccgggtgacggagacccggcgcggcggggtgagccgcgagtcgcagctgcggcacctggccggctggttcgcggccgcgccgagcgaggagtcggcgcacgcgctgttcggagcggtgttcgacctgggccgcccgcgtcacttctccgccgtgcatcccgacccggagacgatcccggtgacgacgtcgtggtgggaagcggcacccgtcccgatcgcccggacgctggccgagaccgggcgcaccccgtcggcgggggcgccggcgcgggtgcagcgcaacgaatccgggatccggcggttgcgggagcggcagctggcggcgcagcgggcgcgggccgaggcggcgcgatccctggcggcgggcggcgtggacgagcgggagttgtccgagccggagaccgaggtgctgttgagcctgctcgacgcggcgctgtcggcgcgcgttccggtcagcggcaccgtgccgggggcgacgggcacgcagaacggggtgcggctgacgttgagcccggccgcggagggcacggtggtacgcacggcgcggggccggctgcatctggacgggctgcgggtgagcgtgcagtga

SEQ ID NO: 50613 - DNA, 1371 bp, Rhodococcus aetherivorans
gtgagggcccggcggatctcgccgctcgaccgggattcgtaccagcgggcggcgcgcctgatcctgtcgcaccatctggtgaccgcgcagtacccggaccgggccgcgctgccgctgctgcgccggtgggcgacggagctgcgggaggacctgctcgagttgttcggataccggctggaggtgaccgagacgaccgcgcggttgttcaccgtcgcggaccggctcgatcccgggggcggcgcgcgcacggtcaccgaccggcccttcgaccgtcgccggtacgcctacctggcgctggcgctggcggcgctgggacgcgccggcggacagatcacgctgtcggaactggccgagcaggtcgcgtccgaggccggccaggtgcccggggtggagctggccaccgagcgtgcgaccgaccgggacgcattcgtcgacgcggtggcgtggctcgccgcgcggggggcgataacgctggcggacggcgacgccggcggctgggtgtcggatccggaccggggtgaggcgctctacgacatcgaccggcccgtggtggcggcgctgttccggccgccgcgcgcgctacagcacctgcgctcggtgcggggcctgctcgccgccggtgacggccgcgacggggaccggatcgcggacaccgccgaggtggcacggcgggtacggcgggcgctggtgcagcgaccggtggtgtacgccgaggaactcgacgacgacgcgcggctgcagctggcgctgccacggacgaccgcggggatcgagctgctgacggggctggtggccgagcggcgcgcggagggcgtcgcgctggtcgattcgtcggggcggatgtcggatctgcggttcccgggggtgggaacggttccgcaggtggcgttgttgctggccggggagatctgtgcgcgggtgtcggatccggagtcggtgccggtgcggttgccgaggccggcggatgcggaggcggaactcgaggcgggactggacgcggcgattccggcggccggggtgttcgcgtcgctggccggtgatgccggcgccgggccggcggacacgacaccggcgcagcagccggcgccgacgcatccgctggtcgaggacagctggctggcggagacggcggcgaagctggtcgacgagttcggccgtaccttcgccgcgcagtggcaggccgacccggcgggcctgctggaggcggcggtgacgttgttgcagcggcaacggttggtggcacgggtgccgggcggggtgctggcgttgccggcgctggcccggttccggggagtggtggtgacggtgcgcgaacgcgacccgcgcctcgcgccggccggtgaggattcgaacgaagcggagatgtcgtga

SEQ ID NO: 50614 - DNA, 3046 bp, Rhodococcus aetherivorans
gcgggccgcggccgcggcgacggacgcggcggccgcggtgggccgcgccgaggacgcactcgccgcggcggcgcgggatgcgggtgtggagtgggcgccgccggccgaggacgcgctgggcgagcagatcgcggtgacggtggcggcgtgtgcggaggagcgggccgcggatgtgcgggcggtgcgggcggcggtggcggccgcggagggcgcggcggcggcgcgggtgcgggccgagacgaccgccgagcggggccgggcgcagctcgagtcggcccgggcggcggtggccacggcggacgcggtggtggagctggcccgcgcggaggcgtcgaacctgttgcgggagtggtgggtcggtcaccgggacacgtggtcggtgctcggcctgccggaggagctggtcgaggcgctggccgcggcgatcgcggcggccggcgacgacgaggccgcgacgccggcggcggcgctggccgagcgcacggccccggtggtcgaggagttgcggttccgcggccgcggcctggaggcggagatcacgcacgcgcgggagcggatcgcggtgttgcgggccgaacgggacctggtcgaggccgagcgcgacgacgctcccccgtcgttcccgatgcggccgaccgggtcgtcggacccgtcgggggcgccgctgtggcggctggtgcggttcgcggacgacgtgagcgcggaggcggccgcgggactcgaggccgcgctggaggcggcgaacctgctgacgggctgggtgtgctgcggtgcgggggacgtgcccgcgggggcggtcgcgctgatgccggtgccgccggcgcagcgccccaccggccggacgttggccgacgtgctggtggtggagccggacaccggggtgccggccgagcgggtgcgggcggtgctggcgtccgtcgcggtgcgggatgcggtgacggacgagaccggcccggccgtcgacgagcggggcggctaccgccagggggtgcagctgggtcggcacacgaaggcggaggtcgagtacatcggggccaccgcgcgggcccgtcgccgtcgcctgcgggtgaccgagctcgacgcggagatcgccgcggcgcagaaccggatggcgggcgcggaggcggagcgggcggagctcgacggacggctcgcgcagctggagcgggccgcggcggcggtgccgcgcaccggcgcggtgctggcggcgctgcggaaggtcagcgagtgcgcgggtgcgctgcgcactgccggggaggcggcggccgcggcggaccgggacctcgatcaggtgatcgccgagtgcgccgtgaaggagcagcgggtgcgctcggtcgcggcccggcaccgggcgccgcacacggcccgcgagctcgagcatctggcggcggcgatccggttcttcgagtcgcagggccaggcggtgctgcgggcccggcgtgagcacgtcgccgcggccgagcgggcgcgggaggcgcaggtgcggcgcgacgacgcccggctggcggcggaggagtccgccgagcgggcggtgacggccgaggagtcgctggggcagcaacagcagcggctggggacgctgcgcgaggcgttgggtgccgacgcgcagcagatcgacgcgcagctcgcgcaggcgcgcgagcggatcgaggcggcgcgggtggagcagcgcgccgcgcgccgcgcgcacgacgacgcggtcgagcggctcgggaaggcggaggcggcgcacgtcgcggcggagcaggcgctgcggtcggcgctgaccgagacgcgggccgacgccgcacagctggcgccgtatgcgcggccggatgtgctgtcgctgctgggaatctcggaggagctgcggtggccgtcggcggcggcgtggccggcgccggagcaggtggtggaccggctcgcccgggcgggcggggacgtgcctgcggtgcccgcggaggtgggggcgctgtacgcggcgctggcggcggcgacggcgacgatcaagggcggggacggtgcccgcaaggcggcccggtcggcgttgacgtcggcgttgcaggagttcgacgggcagctcgcggcggccggtcaggactatcggctgcagtgggacgcgccggacgggttgacggtggtgcgggtgcaggacgagcaggggttttcgtcggtggcggagttcgcggtgcggatctcggcggcgcggcgggatcaggagctgctgctgaccgacgcggagcggcgcatcctcgaggatgcgctgctggcggggctggcgcagcagatccacgagcgcaccgaggacgcgcgggatctcattgcccggatgggggcggagatgcggcagcggcgcatgtcgtccggtacgacggtgggggtgcggtgggtgccggccgatcatctcgacgatcaggcgcgggcggtgtgccggctgctggaccgggaggtctcgacgctggggccggcggagctggcgagcgtccgggcgcatttcgcggcgcggatccgggcggagcgggcggcgcatccggagcggtcgtatccggagatcctggcgacgacgctggattaccggcggtggcgggtgttcgcgttcgggttgatcggggcggacggcgcggaggatcggctgacggtggcgcggcattcggcgttgtcggggggtgagcagtcggtgtcgctgcatctgccgttgttcgcggcggcgcatgtgatgctggattcggcggatccgcaggcgccgcggctgctggcgctggacgaggcgttcgccggggtggacgacaacggccgggcggagctgctcgggttgagcgtgcagttcgacctggatctgttcatgacgggctacgacctgtggatcacgtatgccggggtgccggcgtgtgcgcactacgatctggcgcattcggtggccgagcacacggtcggggcgacgttgctggtgtggtcggagggcgggttgctcgccgagcacgacgggtcggatctggcggcggcgctggggtcgccgggcacgcggcgggtgccggcgccggtggagggggcgctcgagttcgcgtag

SEQ ID NO: 50615 - DNA, 1515 bp, Rhodococcus equi NBRC 101255 = C 7
gtgagcgattcaggtgacccgcgcgcgtccgccgcggacgtcgacttcgccgtgcgcgaggaccggttgcgactgttctccttcaccacggcggagaaacgcaccgactacctgtgggtgatgcgggcgttcgaccacgcgcgtgccaactacgttgtcctgctgcatgccggcgaggtcgccgacattctcgcccgtatcgccgacgacgatccgtcgggtgctctcaccgccggtgagatcccgcccctgctcgaccagttgcacacgtggggcgtgctcgaacgcagctacgacggcagccgcgccgcgacgctcgccgagtaccggaaccggcacttcgtgtaccagttcagccaggccggctacctcgcgttccgggcggtcgaggacctgctgggtgcacggctcgaggacgcgacgctctcccggctcgcgctgcccgacctgttgtccgacctcgaggaactcgcgcaggcgaaccgctgcggcgacggtgatctcatctatcgcaagctcgcgcggctggattcgacgctcaccgacatggcggcccgcgccgcccagttctatctgatgctgggcgatctggtgcgcacgacggagatcacgccggaggccttcctctcgcacaaggacgcgctgctcagtcacatgcgcgagttcagttccgacctcgcgcggtacgcgccgaagctcggtgccgcgatcgagaacgtggaggcgaccggcatcgaatcgctgatcacccgtgccgccgcgagcgacgaccgggtgttcctctcccgcgaggaacgcgaatccgattggcgggcgcggtggtcgggcctggcgcagtggttcgtcgcggccgccgggccgagcgagtcggacaggctgcgcgagggcacgatgagcgcgatcgcggcagtgctctcgctgctgcgccgcgtcaccgagaccagacgcggcggcgtgagccgcgagagtcagttgcggcacctggccggctggttcgccgcaaccccggacgaggaatcggcccacgcgctgttccagctcgtcttcgacctgggtcgccctcgacacctgtcgatggtgcacccggacgcggacatcattcccgagtcccggtcgtggtgggacgccactccggtggagatctcccgcacgctcgccgagaccggccgggccgcccagcccggcatgccgtcgcgcatgcagcgcaacgaaggcagcatccgccgcctccgggaggaacaactcgccgcccagcgggcgcgggcgatcgcggcgtcgtcgctggcggcttccggagcgtacgaccgggtgctcgacgagcaggagaccgacgtcctgctcagcctgctcaatgccgcactcaccgcccgggtgccggtcaccggaaccgttcccagctccaccgggtcggagaacggcgtcaagctcacactgagcccgcacggggaatcgaccgtcgtgcacaccgctcgcggcaggctccacctggacggactgcgggtgagcgtccgatga

SEQ ID NO: 50616 - DNA, 1413 bp, Rhodococcus equi NBRC 101255 = C 7
atgaggaaccgttccgtctccccactcgacctcgattcgtaccagcgggccgcgcgggtgatcctctcgaatcaccttgtgacgcagacgtatcctgatcgcctcgcgctgccgctgttgcgccggtgggccaccgagctgcgcgacgacctgctcgagttgttcggctaccgactcgaggtcaccgagaccaccgcgcgcctgttcacagtgacggaccggctcgaacccggcgcgcccgcccgcaccggcaccgatcgccccttcgaccggcatcgctacgcgtacctggcgctcgccctcgccgcgctcggccgcgccggcaaccagatcaccctgtcggaactggccgatcacgtcgcatccgaggccacgcaggtcgccggagtgacactgtccaccgatcgcgcggcagaccgggacgcgttcgtcgacgccgtcggctggctcgccgcgcgcggcgcgatcgtcctcgccgacggtgacgcgggcggatgggcgtcgaatcccgatgcgggagaggcgctctacgacatcgaccgctcggtcgtggtggcgctgttccggccgccccgggcactgcagcacgtgacgtcggtgcgctcgctgctcaccggtgagccggcgcccctcgacgacgacatcaccgcctaccgacccaccgacgcgcgcgagaccgcccggcggatgcggcgcgccctcgtcgagcgtccggtcgtgtacgccgacaccctcaccgacgacgagcgactgcagctggcgctgccgcgcaccgccgccgacgtcgaggatctcaccgggctcgtggccgagcgccgcgccgagggcatcgcgatgatcgatccgtccggtcggatgtccgacgtgcggttcccgagcaccggcaccatcgcacaggtcgcgttgctcctggccggcgagatggccgaccgggtcctcgatctcgatgctgccccgctcccccggcacccgctgccgaccaccgatcaggccgagctgatcgagcggctggactcggcgatcccccgatcggggatcttcgagcagttggccgacccgttcgagtcggccgagtcagcggagtcggcgggatacgccgccgacgaccgtgacgacccgatcgaacccgcccgctacgcgctcctcgacgacgactgggtgaccggggccgtcgacgaactcgtactccggttcgggcgcaccttcgccgcgcagtggcaggcggaccgcaacggcttgcgccgcaacgccgtcgcgctcctcgatcggttgcagctcgtccgcagcgtcgacggcggcgtactcgtgctgccgccgatcgcccggttccgtggcgtcgtcgtcaacatccgcgaccggagcgcccagtccgagttgttccacgaaccggtctccgccgagaagcactcctag

SEQ ID NO: 50617 - DNA, 4173 bp, Rhodococcus equi NBRC 101255 = C 7
atggcatctgcgcgtttcaagccgacccgcgccgggatcatcaatctctgggactaccgcgaccaggagttctcgttcgcggacggccggctggtgctccggggcccgaacggttcgggcaagacgaaggcgctcgaggtgctgttcccgttcgtgttcgacggccgcatcgagccgcggcgactgaacccgttcgcgggcgaggagcggacgatgaagtccaatctgctgtatcggggccaggattcggcgcactcctacgtgtggatggagttcgcccgcgggccgcaggacgaccccgaggccgtcaccgtcggaatcggcatgcgcgcgagccggcagaacgacaaggtcacccggtggtacttcgtcgccgacggccgggtcggcgtggacttctcgctcctcggcgacgacgaccggccgttgacgaagaagcagctcgccgaacagctcggcagcgacgcgatcaccgatcgtcccgtcgactaccgcgccgccatcgatgcgcggctgttcgggctcggcgccgaacggtacgaccagctgatcaacctgatcctgacgctgcggcgtccgcagctggcgaagaacctcgaccccaaggggctgtcgcaggccctcacggacggtctgcgcccgctcgacgagcagctcgtgctcgaggcggcccgctccttcagcgacatggaggaggtaggccgcgccctcgagggtctggccgccgcggatcaggcggcgcagagcttcgtgaccgtgtactcgaagtatctggcgcagcaggcccgcacggacgtcgaacaggtggcgcgacgcctcgaatcggtggaccgcgcccggtcggtgctcgacgcggcggtcgcgctgcaatcgtcgcgacaggaggagcgactgctcgccgaggaccgcttcaccgccgccgagcgcgccctcgagcaggcccgcgccgacctcgacaccctgcaacgctcgggtgcctacgagggcaaacagcagctcgacgacctcgcggccgccgtggcacagctgaagctgtcgaccgagcagcaggcagacaaggcccgcaaggcgcaggccacgctcgaacagcgcaccggcgaggcaacgcgcgccaccgaatcggtgcggaccgccaccgcggcactggtacgcgccgagaccgaactggccgaggccgccgagcaggccggcatcgcgtggaccccgctgccggagggctcgcgatcggatcagatcatcgccgcggtccgcgggcacgccgaggaacgcgacggcgacgtccgcgccgtgcgcgccgccctcgccaccgtcgagaaggcgaacaccgaacgcgaacgcgcggaccgggccgccgacaaggggcgcgaactgctcgaggccgcacaggccgcggtcgccgaagccgaggcgacggtggagctggcccgggcggattgcgcggcggcgttgcgctcctggtggaccgagcattccgccgactacgccgcgatcggcgtgaccgcggacctgttcgcggcactggacaaggcgctcgcgcaggccggcgacgacgactcccccagcctgagcaccgtgctgcacgagcacgtcgaatccgcgctcgacgagcagcgggcccgccgccgcgaggccgccgccgcgcaggcggccgcgaccgcccggatcgcggaactgcagaccgaccgcaagcacgtcgccgccgagaaggacgacgcccctgcccgattcgcgtcccgcaccggggaccgcagcgagctgcccggagctccgctgtggcgtctcgtgcgcttcgccgacgacgtcgaacccgtcatcgctgcaggcgtcgagtccgcgctcgctgccgcgaacctcctcgacgggtgggtgcttcccaccgacgatgcgccggccgacatcgagtccgagcagttcctcgagccgctgccggaagaccgccgcccgcagggcgcgaccctcgccgacgtgctcgccgtggaaagcgataccggagtgcccgaagatcgggtccgggcgatcctcgactcggtctcgctggaccgcgacggcagcgcccgcgacacgcacgtcgggatcggagtcgacggacggttctggcagggcatagcgcggggccggcacgtcaaggccgacgccgagtacatcggcaccacggcgcgcgaacgtcgccgcgcccagcgcatcgacgaactcgacgccgagatcaccgcggcggaggacgcccggaccgccgcccgcgcggtcgaaggcgacgcgaaggcactgctcgacacgctcgcgggcgccgcgaagtcgcttccgcgcaccggtgccgtcctcgccgcgctcaagaagctgaccgaagcggccggagcgctgcgaacccggtcggagtcgaccgagtcttccggccaggaactcgaccaggccatcgccgatcacacggcgaaggagaagcaacttcgcgccgtcgcggtcgcgcatcgggtgtcgcaccacgcccgtgacgtcgatgccctcgccgcgtcgatccggcacttcgagagccagggcgaacagctgttgcgctgccgccgggagcacgagaaggaactggaactccaccgtgaggccgaggaccggctcgaggaggcccgcggcaacaccgaggagttcgtcgaggaggcagcggtcgccgaggagaactacgcgcagcaggtctcgcgcctcgagacgctgcgcgaggcgttgggagcgagcgccgaacagatcgatgccgatctcgaggaagcgcgggcgcggatcgaggtatgcaagaccgaacagcgggcggcacgcaaggcctacgacgcggcggtcgagcagatcggcaaggccgagggtgcgcacaacgcagccgtcgaaggactgcgcagcgcgctcaccgagacccggaccgacgccgaccgactggcaccgtacgcgcgacgtgacctcctcgacctgctgcgggtcgagggcgagcacacctggccgcagagtgcggccgcgtggctcaccccggaccagctcgtctaccggatcgtcaccgagggcgatccggacgcaccgatcctgccggccgaggtcgcggcgctctatcgcgcgatggacgccgcgaccgcgtccgtccggaccagcgagaacgcgaagaagtcgacccggtcggcgctcaccgcggcactgcaggacttcgacgcgcaactggccgcggctggtcaggactaccgcctgcagtgggacgcgccggacgggctgaccgtcgtccgagtccaggacgatcagggctactcgtcgatcggcgagttctcgacgcggatcgcggcggcacgtcaggaccaggaggtcctgctcaccgactccgagcggcgcatcctcgaggacgcgctgctgaccggcctcgcccagcagatccacgagcgcaccgcggacgcccgtgacctgatcgcccagatgggtgccgagatgcgcgagcggcgcatgtcgtcgggcagcacgatcggcgtgcactgggtactcgccgacaacctcgacgacacctcccgtgcagtgtccaagctgttggaccgcgcgcccgcggcgttgagtgccgacgagctggcgaccatccgcgcccacttcgcggcgcaggtgcgcatcgcccgggctgcgcacccggagcgctcgtaccccgagatcctcgcgtcggcgctcgactaccgccggtggcgggtgttctcgttcacattgatcggcggggacggcagcgaggaccgtctcaccgtggcgcggcacagcgcgctgtccggtggcgagcagtcggtatccctgcaccttccgctgttcgctgccgcgcacgtgatgctctcgtcggccgatccgcactcgccccgcctgctgggcctcgacgaggccttcgctggtgtcgacgacaacgggcgcagcgaattgctgggtctgagtgtccagttcgatctcgacctgttcatgaccggctacgacctctggatcacgtacccgggcgttccggggtgcgcgcattacgacctggcgcactcgacagccgaacagagcgtcagcgcggcactgctcgtctggtccggcggcgacctgctcgccgagcacgacggcagcgatctcgcccgggccctggggtcaccgctgcgccgccgcgtccccgccacggcggacggtggtctggagttcgcggacgcgtag

SEQ ID NO: 50618 - DNA, 1491 bp, Geobacillus thermoleovorans B23; identical to SEQ ID NO: 50217

SEQ ID NO: 50619 - DNA, 1197 bp, Geobacillus thermoleovorans B23; identical to SEQ ID NO: 50218

SEQ ID NO: 50620 - DNA, 4122 bp, Geobacillus thermoleovorans B23; identical to SEQ ID NO: 50219

SEQ ID NO: 50621 - DNA, 1221 bp, Geobacillus thermoleovorans B23; identical to SEQ ID NO: 50515

SEQ ID NO: 50622 - DNA, 1557 bp, Halomonas sp. PBN3
atgggagcccgcttggactacacccctttcagctatgtgactgccgaaaaggctgagctctatcgccgggtgatgcgtgccttcgttgaagcgaagtcacacttcctggtgcatctgcgccccgaggatgtccaacagcagattggcgaggcggagctggccagcgtgcagtcggccctgactcagctggtcacctggggcaacttggacgcagagcgcgacaatgctcgggtgaccagcgtcgaggactactatcgggctctctacgtttatcagatcacccgccagggcgaggccgtggaggcggccctggcgaccttcgagcaggagctgggccgccgcggcgccctgcagagcgtggcgctggaggatatccgtacccgcctgcgtgcgctgcttaccctggcccagagcgatacgccctcggccaccgagagccagctgctactgcgtgacctggccggggtcttcgctgacctggccgagaacgcccgggcgttcatgaccgggctgaaccgcacgctggaggggcagggcagcgatgtcgacgccttcctgctctacaaggagcgggtgatcggctatatcgagcgcttcctgggggatctgaccaccgcgtccggcgagatcgccgagctgattcgtgccctcgatggcatcggcgatgcacaagcgccggtggcgcggctgctgcgccaggccgccgaacgcgagctcaccgatctcgcgcccggggagtctgcggacgacgatgaacgtgccaaggcgttcgccgaggcgtggcgtcgctggcacggccactgggaaggtctgcgtgcctggttcctcgaccaaccggggcgtcaggcccaggcccgcctgctgcgcagcagtgcccgccgcgccgtgacccagttgctggaaatggtcggccggctcaacgagcggcgtatggcgcgcagcgaccgttccgcggactttcgtaccctggcacgctggttcctggagtgtaacaacgacggagaagcgcatcggctgtggcgaaccgccttcggcctgacgccggcccgccacctggtgatcgatgccgagaccgccgaggcgtggcggcaggctcctgtgccggcgagcatgccctgggccgaggccccgggcatgcaggtgcaggcgcggctgcgtgccaccggcagctatcagaaggccggggctccccccaagctgcgtagccgtgcgcgagagcgcgagctgctggcccgccagctagccgaggaggccagcgcggcacgggccgctcggcgtcagctggtggagcgccgcgccgagcgcctttcggagctcggcgagctggatgatggcgccttccgcctgctgctcaacctgctgggcgatgccctggcggcgagccccggcgatgactcgccggtgaccaccaccaccggcgacggcagcctgcgcatcactctgacgccgctgggccccgagacaatcgccaccctgcataccgaggccggcatgctgacaggccgtgactaccgcctggagatcaccgacctggaggaggacacatggaggagttga

SEQ ID NO: 50623 - DNA, 1290 bp, Halomonas sp. PBN3
atggaggagttgagcgatgccctgacgcgtcagcgccaggaggagcagcgccgtgccctacgcgccctgctggcaagaccgctgatccgcagcgatgaccctgccttcccgctcattcgtcgccatgcggccaccctgcgtgactggctggcccgggagaccggctggcacctgcagagtgagcgtgacttcgtgcgcctgcacaagcgcgcgactgacctcggcgataccacgcgtccggcgaccgtcggccgcggcacacagcgcaagaccttcaaccgccgccgctatgcgctgttctgcctgctactggcggatctcgagcgcggcgatgcgcagatcaccctggggcgcctgggggaggggctggatcaggcggtcgatgatcctgccctggccgagcgcggcctggccttctccctggaccagcaggaggcgcgccgggacctggtggtggtcgtgcgcctgttgatggcgcttggggtgctggtgcgcgtggccggtgacgaggagcagttcctgcgtcgtggcctggagggtgacgtgctctatgatgtggaccgccggctgctggctgccctgctggtcaccgcccgaggcccttccctggtcgccctgaacggcgccgatgccgagcttgatctcgagcggcgtctgcacgccctgagcgagaccttcgtgccggacacgcccgacgggcgcaatcgcgagcagcgccatcgcctggcccgccggctcctggatgacccggtgatctatttcgattcgctcgatgatgacgagaccgcctacctgaccaatcaacgtggccccctgctgaggcgtctgcagcaggccacggggctggtggccgaggtgcgcgccgaggggctggcgctggtggatcccgaaggcgagctcaccgacgagaagatgccggcggagggcaccgaggggcatctggcgctgctgatggccgagcgcctggccgagagtggccccgacggtgtgacgatggaggaggccgaaacctggatcctccagtggcagaccgacttccgtcgctactggcgcaagtcagcctgtgaaccgggtgccgcccatggcctggcacgccagaccctggcgcgcctggcgtcgctgggtcttgtccggcgtcaggcgccgtcccggtcgctgggcgacggtggccgtatcctgccgctgccggcgctcggtcgcttccgggttcgtgctccatcgctgcccgatgccagcgaacttcctcgtcatgcccaacccgatctgtccgagtcccttacagatgactga

SEQ ID NO: 50624 - DNA, 4155 bp, Halomonas sp. PBN3
atgaacgaacttcccgaaccgcagagtccccgttggcagcccctgcgctgcggcctggtcgagattttctactacgacgaggaggtcttccacttccatgatgggcgcctgctgctgcgcggcaacaacgggaccggtaagtccaaggtgatggcgttgacgctgccgtttctcctcgacggccagctccttccctcgcgagtggagcccgatggcgacagcgccaagcgcatggagtggaacctgctggtgggtgagtaccaggaacgcctgggctacacctggctggagttcgggcgcctgggggatgaggggcccgagaccttcacggtgggctgtggcctcaaggcggtggcggggcggccggtccgctcctggttcttcaccaccccccaacgcgtcgggcgggacctcttcctgatcgataacggaagaagcgtgagccgtgagcggctcggccaggcgctgggcagcgtggggcagctatatgatcgtgctgcggactaccgacgggccatcgacgagaggctctttcacctgggcgagcagcgctatggcgccttgctcgacctgctgctgcagctgcgccagccgcagctggccaagaagcccgacccgaatcgtctctcccaggcgctcagcgatgccctgccgccgttggggcgtggcctgatcggcgaggtggccgaggcctatcgcagcctggatgtctaccgcgaggagatccaggggctggaggagacggcgcgcgccgtggaagccttcctgggccactaccggcactatgccggtatcgcggtgcgccgtcgggccgacttcctgaccgctgcccacgccgaatacgagagggtgcgcctgcagttgggccgcgatcgccaggcccatgaggaggcgcgggggagtcgcgaggcgctgggtgagtcccgcgagctcctcgccgagcagcagcgggagctggcggcacgccaacgcaccctggaggccagcgacgccatgcgctcggcggaggcgctgcgcaatgccgacgagctggctcgccagcgccgcacccgcgccgatgaggaaggccggcggctgggccgggagcgtgacagtgaccggcgagccgaggcccgcttgctggaggccgaagcgtccttgaagggcggcgtcgcgaatctggaggcgcgccgcgatgaaagtgctgcactggccgatgcggcgggtgtgggcggcgaccatcgtcgagaaatcgccacgcggttatccgcggaaacgggcgagcaggtgcttcccaatgcccggggtgtggagtcgctgcagcatgcgctgcgagacctgcatcgtcgccgcgcggagggggtgacacacctcaaccgccgcctcgatgaggtcgacaaggccgagcgagccttccaccgggtggaggatgaggcgcgtcgggaagaggagaccctggcgagtcgcgaggaagagtgccaggacgcgaccagcgcacgtgttgaggcggccgagacccttcagaccgactggcgtgaacaccttgccgccctgaaggaactggcacccgaggatcccgaggcgatgctcgccgagctcgcaccctggtgcgatcacctgagcggtgatgaccccgccgagtcagggctctccatggcgcgggatgcccggcgcgaggcgctgggccagcaacggcatacgctggaacagcggcatcgagagctgggcgtcgaacgcgcagaactcgaggcggagcatcagcgtctggcagcgggggaggcacgcgtgccgccggcgcctcatacccgtggcgagggcagccgtgaggctcgtcccggcgccccgctttggcaactggtggactttcagacaggcctcgaggcgagacagcgtgccgggctggaggcggctctggaggcctcagggctgctggatgcctgggtgctgccggatggcgagctgctcgcccccggcacctgggacacgctgttaacgccatttgccgatggtgccatgcgaccggcagaggagagcctgaccactgctctttgccccgaccttcccgagcactctccggtgagccagcgggtggtcaaggcactgctggccggtatcggcctgggtgcctccgacaccgttgcctgggtgagcaccgacggtgcctggcggttggggccgcttggtgggcagtggggcaaggacgaggcggtctatatcggccacgccgcccgggaggcggcacgtcggcgcaggatggcagagatcgcccacgccttggaggggctggccatagaggtcgccggcatcaccgccgagctcgagcacctcgatgcgtgtctcgaggtcatcgatcaggagtggcagggtcgtcccagtgcccaggcgctgcgtgatgcccacgccgccgaggcggcagcgcggcgcgctcgggatacgcaagccgcgcgtctggagcacgcccaggccaggcgggaagaggcccgcgaggcgctggaggcccagcgcggtgagctgtatatcgccgcagaggatctgcgtcttcccgccgagcgcgagcccctggcccgccttcagtccgcgctcaatgactaccgctttgccatcaatgaactggtacaggctatcaccacctggcagcaggcccggcagcgccatggcgaactgagggatgaacgccagcgggcacgagaagtgctggaccagggcgagcgggagtttgccaaggccgaagagcaggcgcgagaggcggaggtgcgtcgcgataccctgcgcgacaccatgggggccgaggtgcaggagctggagcgccagctggcggtcatccagcagcgcagcgaggcgttggccaccgagcagcgtgagctcgcctcacgcttcgagaccctgctcggcgaggtggcacgcttcgccgagaaggtgacccaaggcgaacagcgtctgggcgagctggatgagcgccgggctgagcggatcgctgacttccgggccctggtggaggaggggcttctgcgggtggccgccccggagcgcttcatggaccaggaggcgcctacctcttgggcggcggaccccgcggtgcgcctggcgcgggccgccgcccaggccaccgccggcatcgccgccgacgacgagagctggcatgcccaccaggggcggctgcacgaacatatcaagttgctcaccgacgtgctctcccgcggcggtcacgactgcatcgccgaagcccgggacgacctgctgttggtgcgtatcgtcttccaggggcggcgtcaggatcccgatgccttgtatcgccagctcaatgacgagatcagccaacgccaggcactgctcaatgcccgggagcgggaactgctcgagaactacctgatcgatgaggtggcaagccacatccaggagcgcatcaccgacacagaacgtcatgtgcgggagatgaacggcgagctggagagccggcccacgagcaccggcatgcgcctgcgtatccgctggcaaccattgtccgaggggcagagcgccggcggcatgacagctccggcggggctagaggacgtctgtcagcggctgcggcgccaggcgctggacgcctggtcggcggaggatcgccaggtggtgggggacttcctgcgccggcggatcgaggaagcacgggccagcgacgagggcggcgccctgcaggagatcctcgagcgcgccctggactaccgcttctggcatcgcttcgtggtggagcgtcatcagaacggccagtggcgacccgcctatggcccggcctccgggggcgagcgggccctggtcatcaccctgccgctatttgccgccgctgccagccactatggcagcgcccatgagcaggcaccgcgtctggtgatgctcgacgaggtgttcgcgggaatcgatgacgatgcccgcgccaagagcatggggctgctggcccagttcgatctggatgccgtgatgacctcggagcgtgagtggggctgctacccggatgtgccggggctcgccatcgcgcaactggtgcgccgcgaaggggtcgatgccgtgcatgtcacccgctggaggtgggacggcaagcgccggacgagagatgaggtgcccgccagtcaggcgctgcgagaggttgcggaacctgcggaaacaataacgccgggcggtatggacagcctattctag

SEQ ID NO: 50625 - DNA, 1263 bp, Halomonas sp. PBN3
gtgaccagtgacgtcgaccatgcccgcctgcggcggctgctgggcggccccgagcttgcccgcttacgccagcgcctgagaggcaagctgctgcgcgagggcggcggccgcctgaccatgagccaggccagtgacagcgagcgtgccaccgtggaacgcctggtggggcggccacctcggcgggggaagtcgctgagcgtggatctcgaggcgctctctcgtgccctggcccgggctggcgtggcgcaggacctacggcatgcactggaggcgctggatggcccgctggtcgatcaccgagccgttcgcgaggagtcccgcaggcgctggagcgaacttctggacacttatcatcccgaggccgagcggctgggggtgagcagctggctggaggatctgcgccgcggcggccagctcaagcgcctggccggcggcagcgaagggcagggcagtcatctactcgaacaggcgatcactgtactcgagcgactgcctgcacagggcctgacgctgagtaccttagccgccgaatgcttgggtgatgcccatgccttggatgccggtcagccggtgtcggcgctggtgcgacgcgccctggcccggcattggcgtggtggggtggcgttggacaagccggatgagcgttcgacctgggcccatgccggcgtcctgctgggcggtgatatcaccagcgcggtgctgaccctgggcctgccggtgcgggacgagagcggcctggaggcggcacttgcgcattactatcggcttgccgagccctcctggctgacccttcgccagctgctgcgccatccccccgagtgggatgtcgaggggcgcgatgtctacgtctgcgagaatcccgctgtagtggccgaggcggccgagcgactgggtaccgacagctcgcctctggtggccacctggggacgcccaggcgctgccgtgttgaccctgctcgaacaactggaggctgccggtgcctgcttgcactaccacggcgacttcgactggcccggcatcggcatcgccaatgccctgctggcgcgcttttcgatgcggccctggcgcatggcggcagcggacctggaggctgacgcccatctcgcgggaaagccactagaaggcaagcccctggatgccctctgggaccctcgactgagtactgctatggagctgcgcggccaggcgctgcatgaggagcagctgatcgagacgctcttggacgatctgcgcctacggggggatcacacagccacggggtag

SEQ ID NO: 50626 - DNA, 1473 bp, Enterococcus cecorum DSM 20682 = ATCC 43198; identical to SEQ ID NO: 50504

SEQ ID NO: 50627 - DNA, 1122 bp, Enterococcus cecorum DSM 20682 = ATCC 43198; identical to SEQ ID NO: 50505

SEQ ID NO: 50628 - DNA, 4059 bp, Enterococcus cecorum DSM 20682 = ATCC 43198; identical to SEQ ID NO: 50506

SEQ ID NO: 50629 - DNA, 1242 bp, Enterococcus cecorum DSM 20682 = ATCC 43198; identical to SEQ ID NO: 50507

SEQ ID NO: 50630 - DNA, 1557 bp, Streptomyces sp. GBA 94-10
atgcgcagggttccgccggagatgttccggttcaccacgggggagacggccgacttgaacggggccgtgctcgaggctttcggggtggccggcgagcacctggagaccgcgctcgggctcgacggcgtacgggagaggctgcgtgcggtgggctgggtctcggacctccaggacgaggaactgcacgagacgctgaaacggctggtgaagtgggaactcctcgacgtggttcacaatcacgcccagaactaccgcacggccgaggagtacgagcggcgcaacctgcactactcgctgacccgccggggggaggccgcgctcgccggggtgcgacacgccctggaggtgctggcctccacaggggcgctgcagaccgcggtgctggaggcgatcaccgaccggctcgacgagctgactgtgctgtccagtgaacccgccgcggccgaccggcggatcttcagcaccctgcgggagctggagggccatctggagggcctggtggagaacaccaaggccttcaacggccagttgcagagactccttcgcgccgagggagtggatctggacgtcttccgtgaggtgaaggccgccaccgtcgcgtatctccaggagttcctggtcaatctcgaccggcgcggcgagacggtggccgccgccgtggcccgcgtggaagagcgaggcatcgcggtgttgcgtgagcgggccctgcgcggcgccgagctgcctccggcaccgggagaggatccggcagccggctggctggagagccggcgggcgcgctgggcggggctgagggcctggttcctgccgaacgacggggcgcgcccccggatcgagcagctgcacgacatcgcccggcgcgcgatcgtctcccttctccaggtcctggagcggatcaacgagtcccggcgccgcccctccagtgccgtgcaggacttccgggagctcgcccgctggttcgctgcggctcccgaggaggaggacctgcaccggctgtggtcggcagccttcggcctcagcccggcccgccatgcccaccttgcccatccggacccggaactgatcccctcgtcccattcttggtcccaggcgccgccggtacaggtgtcggcgctgctgcggaccagcggacggaccgaacgcttcactcgtacggccagggtgcgggacgtcacggcggtcagggcggaacgcgccgagcgggccagggccgaacgggcggagctggcacgcgcctggcaggcgctggagacggacggcccggtacggctctcctccttcagcgccctcgactccgtggtcttcgaccgtctcctcgacctgctggggcgggcgctggccgcccggccggacgcggacggccgacgacgggccacgaccggggacggccgggtggaggtggcgctgtcgccgccccccgacgggcgcaccgctgtactgcgtaccgtgcaggggacgatggcaggaccggactacgtcatccacgtcacggccgcgggcggggcgaaagccttcccggcagcccgtgcggccacgggacaggaggccgcaggatga

SEQ ID NO: 50631 - DNA, 1314 bp, Streptomyces sp. GBA 94-10
atgagcaccctcgccaaccagctggcctccgccgaacgggaggaggtcgcccgtgccatccgcctcctgctggcccgcccgctgctcactgaggcagccgatccgaccggtttcgatctggtgcgccgccgccgcgacccgctggcccgttggttcgactacacctgcggctggaatctggtcgtggagccccgccggggctacgcccgcctcaccaaggtccgtgccgaccccgatggctcccgccccgctcgccgggcgcgttccggccgggccccgttcgaccgccgacggtacgtcctgctgtgcgtgaccgccgcggagctgctgtcgatgccgatgacgaccatcggcatgctcgccgaccgcgtcgtccaggccatggcggccgaccgcgcgctggcggggttcgacccggtccgcaggccggagcgcctggcgttcgtcgacgtcctgaaggtgctggagtcgtacgacgtgctgcgtgcggtggacggcacgaccgagacgtacgtcgactccgcggaggcgaaggtcctctatcgcgtggacaacacactgctcatgcggttgcccgccgcaccggtcggcgcctcccggctcgccgtgcccccacaggaggtgcccgcgcggttcgaggacctccttgccggcctggtaagggagcgccgctacggaggcgctactgccgacgggacggccgacgacacgcacgcggagatcgccgcgaccacggatgctcagcgcaacctgcggctgcgccattcggtgctgcgccgcctcttcgacgaccccgtgctctaccgagccgacctcgccgatgacgagctcgcttacgtcacctctttgaccggacgccagatcctgcgccgctctgtcgaacaggccggcttcctcctggaggaacgggcggagggctttctcctcgtcgacccggacgccatcgccaccgacgtccgcttccccgacgacacctccacagcccgagtcgccgcgctactcctcctcgcaccgctctgcgccatgcccgcgggcctgctgcccgagcagctggccgaggccggagcggagctgctgcgccgcttcccgggttgggccaaggcctaccagtcggaggaaggcccggcccgccttgccgacgacgccgtacggatcctgctcgacgtcggcctggcaggcagggcccgagaccgtgtcatcgcgcgaccggccgcgtaccgctaccgcctgacggagaccaccggcccagctccgaagaacgatccgccagccgtgaccaccgctggcagcgccggagaaggagacaagcagtga

SEQ ID NO: 50632 - DNA, 4134 bp, Streptomyces sp. GBA 94-10
gtgagcgtgacggaactcccccttcagcgacggcccgaggagaccttcgagccgtcacccgttcacgaggcggataccggccgcggacgctggcagccccatcgcgcgggcattctcaacgtctggcgctactacgacgagaccttcaccttccaccagggtcgcctgctgctgcgcggtcagaacggcaccggcaagtccaaggccctggaactgctgctccccttcctcttcgacgccagcctccgccccaaccgcctctccacgttcggcggttcggagcgcacgatgcactggaacctgctcggccagggagcgtccggcaagacccgtgtggggtacgtgtggatggagttccgccgcgtcggagacgacggcaccgagcactggtccggctgcggagcccgcctgcacgcgagcgtgcacaccaccacggcgcacgccgactacttcaccaccaccgcccggatcgcccatcccgacggggtccacctcgtcaacgacaccggacagcccctgaccaaggcggccctcgccgaagctctgcgcgaccgcggtgaggtgcatccgtcagccaccgactaccgcaccactgtgcggcgcgaactcttcgcgggcatgggagagcagcggtacgagtccctgctctccgccttgctccagctccgccagcccaagctgtccgaacggctcgacccctccctcttgtccaccctgctgtcacgggcactgcccccgctcggcgaaggagagatcactgagctcgccgagggcttcgagcgcctggaccggcagcgggaccacctcgaccggctcgacgccgaggtggcggccgccgagaacgtcgcctcccggcagcgcgcctacgctcgtcgggtcctgcggtccggtgcggcgtcgctgatctctgcgaccaccgagatggacgacctcacccgcaacgcccgtgtcagcgccgaggagtacgagaaggcgtgcgaggagcgcgcctccaccctggccctgcgagaggagctggaactacgggcgcacgcgctggacgagatcgtcgaagggcttcgggagagcgacgcctaccagaagggggaggagctcgaccggcttcgccacgacaccgaggatcaggtcgcggccgccgccgagctgcgtaccgccgcccggtccgccgagaccgaggcggaggaggaccggaagcacgccgacgaggtcgcgggccacgcccgctcgcgcgacgagcacgcccgcgcgaccgcggacgaggcgcaccgctcggcccgggccgcaggcatggaggccattcaccacgaggtgaagacgattctggacgcggaaggggaggtgaagtccctcggcgacgggacggcgaacaccccggtcaggacggggagcgggcggtccgatgctcctggcaccgctgcccgtcgtctgctccggggcgcggtcaccgcccgacgggagcagatcgccgacatcaccgacgcgatcgacgcccacgaccgggcggtacgcgaccggggaaccgccgagggcctgctggaggaggcccgaacccggcttgcggacgcgatcgcccaccgcgacgcggccgccaccgctggagacaacgccctcgtcgcccaggcggaacggctgctcgcctgggcccgggactgcacggagatgcgcatccccgacctcgatgagctgaccgccagggcggccgttgaggcagacgtgcgtgagctggtcgaaacggtcgcacgaccgctggaggaggagatcaccactgagcgggccggagtcggcgccgcgcaacaggggttgaagcaggaacgtgacctgctcgacgcgcggaggcgcaagctcagcggcgagaccgatctccggcccgtcgctccacccacccgcaccaccgtccgtacggcggcggcgggcgcgccgctgtggcagctgatcgccttccacgaggacgtcccgctcgccgtacaggccggggtggaagcggcactggaggcgtcgggcctcctggacgcatgggtgagcgcatccgaagggctcacccttcctgggcacgacacccgtgtcgaggtcggcctcgccacgaccgcccccggctccagcctgctggacgtgctgaggcccgaggaggacattcccgtaccggccggcacggtgacccgcatcctcgccggcatcgcgtatggcaccaccctgcccggtggtcaccctgcggcagtctcctccgacggcgcctggcgcctcgcgccggccacgggttcctggagcaagccggagcccgcccacatcggagccctcgcccggcagcgggccaagcagcgtgagatcgccgaactgaccgagctgatcgccgagaaggacgcctccctggccaccctcgccgaccggctgcgggaactcggcgcccgcgccgcccggctggcggaggaccgcaccgcccggcccgatcaccgggaactcgacgcctgccgacgggactgggaccgggccgaggagaaggtggccgcccgggacgacgccgtgcgtgacgcgaccgagcatctggccgcacgcgagggtgacgtggccggcgcgctgcgcacgctgagccgcagggccgccgaacacggactgcccacggaccgcgaccggctgcgcgaactcggccgcgacgtggagagcttccgcgacctcgccgatgcctggacggacgcccgcatcgacgcgatcgcggccgctgaaagggctagtgagacggccgcacgggcggaccggtcacgccttcgcgcggagaagcagaccgccgacgcggtcgctgcggaagcgaaggcggctggtatgacggcacgcctgaaggcggtggaggagacggtcggcgcggactaccggcagatcgtcgcgcgcgttgcggagacccgtgccgaacgggtccgctgcggcaaggaagcccgccaggcagccgaactcctcctgggcctcgaaggccgcatcggagagctgcgggccaccagtggccaggacgccgaccggcaggcgaaggcagtcgaggcccgcgacggcgcggcgcggcggttccggcacctgtgtctggtgggtctggccgaggacgcgggcgtcgtacccgaactcgacaccggggacggtaccaaggccactctggaggccgcgcgcgccatggcggcaaggtggccccaggtcccgcatgccccgcgccacctcggcgacgccgccacacgcctctccgaagccgtccacgaggcccgccgccacctcggcgtccgcgccgacctggagctggagcccgacgacgacatccagctcttcaccgccaccctggagggcgttcgcgtcggggcgaccggtctgctcgccgcgctcgcccaggagcgtgaccgcagccgcggcgacatcagcaccgccgaacggcgccttttcgaccagatcctcaccggtgacatccgtcggcacctcgccgcccgcatccgccgggccggcgaactcgtcgctcacatgaacgggcacctggagggggtccgtaccgcttcgaaggtcgccgtccagctcgtctgggacgtccgcccggacctccccgacagcacccgcaccgcccgccagctgctcctgaaggaccccggtcgggtcaccgagtccgaccgggaggccctacacgccttcttccgtgcccgcatcgaggaggccaagggcagcgacaaggccgcgagctgggaggaacacctcggcgaggtgctcgactacaccgcctggcacaccttcaccgtccgcctcgaccgggcggacgggagcggctggcagcccctgaccaagcggctgcacggcgcgctctccggcggggagaaagccatcgcactgcacctgcccctgttcgccgctgtcgcagcccactacgaggacgtgcccctggccccccgcccgatcctcctcgacgaggtcttcgtgggtgtcgacaccgtcaaccgcggacaggtcttcgccctgctcaccgcactcgacctggacctcatgatcacctccgaccacgagtggggaaactacagggaactgcccggcatcgccgtccaccaactcctgaccgacggcgacgacgccgtcaccagcgcgcgcttcgtctggaacggcaccggaatggaggaaggatga

SEQ ID NO: 50633 - DNA, 1329 bp, Streptomyces sp. GBA 94-10
atgattttccgagaccaccccgtgtccggcgggacgacctctcgggagcatttcgcctcgggcgacgagaccctccgccgccccgaactccatcccgtctggcagacggtccacgaccgtctctcctccggccgccccgtcacacgcgtacgcctcggactgctggacgagacccagcgcgaagctctcgcggacctcctcggcctggaccgcctgccggacccccggccctccgtcgcgctggcccgcctggaggaggccgtcaccgaactctccggccgcacggtacgagaagtcgtcgccgagctcgtcggcccactcggcgacagagccggtgaacgccgccgccaggagggcgagcgcgccggtctgtggacctggctggctggtcacgacacggtccgggcccagccggcgctcgccgactgggctgcgtcctgtcgagccgcgggactggtcggcggctcgacggaacgcacccgtacgctgctcacggacgcgcttaaagtactcgtcgagctacccggccaggccgaacccctgcccgtcttcgccgcccgagtcctgaacggccacgcgcacgctctcgacgacggcacatccgtctccaccctcgtcctgcgtgccctggcgactctgtacgacatcgcaccgccgcagtccgcggcggaacggcgtgctctgtggtcccgcgccggcgtcgccgacgacgagctgtccgccaccgtcatcgccggggggctgcgccctctcggcgacggccttctcgcccgtgtggcccgcctgtgcaccgaggtcggccaggccgccagcctgaccctcgcccacgtcaggagcccgggcgagctcaccctgcccgccacctctgccccactcgtcgtccacgtagtggagaaccccagtatcctggccctcgccctccgtcgcttcggctccaactgcccaccgcttgtctgcacgtccggctggcccaacagcgcggctgtccagctcctgcgcctactcgcggaccgaggcgctgctctccgttaccacggtgacttcgatggcgaaggcatccgcattgccgcatacgtcacggagaaaacaggggcgcgcccctggcgcatgacggcggcagactaccgatccgcgatcgcccgcaacgcgcatggtcctcgaccggggcgcatcaccggagcaccgtgggatcccgagttggccgaagccatggcggagcacgacatcgccgtggtcgaggaactggtagccgatgtgctgctggaagatctcgctgccgcggcttgccagcagcacccctccggcgatctgtacgctccaggttattga

SEQ ID NO: 50634 - DNA, 1557 bp, Streptomyces sp. PVA 94-07
atgcgcagggttccgccggagatgttccggttcagcacgggggagacggccgacctgaacggggccgtgctcgaggctttcggggtggccggcgagcacctggagaccgcgctcgggctcgacggcgtacgggagaggctgcgtgcggtgggctgggtctcggacctccaggacgaggaactgcacgagacgctgaaacggctggtgaagtgggaactcctcgacgtggttcacaatcacgcccagaactaccgcacggccgaggagtacgagcggcgcaacctgcactactcgctgacccgccggggggaggccgcgctcgccggggtgcgacacgccctggaggtgctggcctccacaggggcgctgcagaccgcggtgctggaggcgatcaccgaccggctcgacgagctgactgtgctgtccagtgaacccgccgcggccgaccggcggatcttcagcaccctgcgggagctggagggccatctggagggcctggtggagaacaccaaggccttcaacggccagttgcagagactccttcgcgccgagggagtggatctggacgtcttccgtgaggtgaaggccgccaccgtcgcgtatctccaggagttcctggtcaatctcgaccggcgcggcgagacggtggccgccgccgtggcccgcgtggaagagcgaggcatcgcggtgttgcgtgagcgggccctgcgcggcgccgagctgcctccggcaccgggagaggatccggcagccggctggctggagagccggcgggcgcgctgggcggggctgagggcctggttcctgccgaacgacggggcgcgcccccggatcgagcagctgcacgacatcgcccggcgcgcgatcgtctcccttctccaggtcctggagcggatcaacgagtcccggcgccgcccctccagtgccgtgcaggacttccgggagctcgcccgctggttcgctgcggctcccgaggaggaggacctgcaccggctgtggtcggcagccttcggcctcagcccggcccgccatgcccaccttgcccatccggacccggaactgatcccctcgtcccattcttggtcccaggcgccgccggtacaggtgtcggcgctgctgcggaccagcggacggaccgaacgcttcactcgtacggccagggtgcgggacgtcacggcggtcagggcggaacgcgccgagcgggccagggccgaacgggcggagctggcacgcgcctggcaggcgctggagacggacggcccggtacggctctcctccttcagcgccctcgactccgtggtcttcgaccgtctcctcgacctgctggggcgggcgctggccgcccggccggacgcggacggccgacgacgggccacgaccggggacggccgggtggaggtggcgctgtcgccgccccccgacgggcgcaccgctgtactgcgtaccgtgcaggggacgatggcaggaccggactacgtcatccacgtcacggccgcgggcggggcgaaagccttcccggcagcccgtgcggccacgggacaggaggccgcaggatga

SEQ ID NO: 50635 - DNA, 1314 bp, Streptomyces sp. PVA 94-07
atgagcaccctcgccaaccagctggcctccgccgaacgggaggaggtcgcccgtgccatccgcctcctgctggcccgcccgctgctcactgaggcagccgatccgaccggtttcgatctggtgcgccgccgccgcgacccgctggcccgttggttcgactacacctgcggctggaatctggtcgtggagccccgccggggctacgcccgcctcaccaaggtccgtgccgaccccgatggctcccgccccgctcgccgggcgcgttccggccgggccccgttcgaccgccgacggtacgtcctgctgtgcgtgaccgccgcggagctgctgtcgatgccgatgacgaccatcggcatgctcgccgaccgcgtcgtccaggccatggcggccgaccgcgcgctggcggggttcgacccggtccgcaggccggagcgcctggcgttcgtcgacgtcctgaaggtgctggagtcgtacgacgtgctgcgtgcggtggacggcacgaccgagacgtacgtcgactccgcggaggcgaaggtcctctatcgcgtggacaacacactgctcatgcggttgcccgccgcaccggtcggcgcctcccggctcgccgtgcccccacaggaggtgcccgcgcggttcgaggacctccttgccggcctggtaagggagcgccgctacggaggcgctactgccgacgggacggccgacgacacgcacgcggagatcgccgcgaccacggatgctcagcgcaacctgcggctgcgccattcggtgctgcgccgcctcttcgacgaccccgtgctctaccgagccgacctcgccgatgacgagctcgcttacgtcacctctttgaccggacgccagatcctgcgccgctctgtcgaacaggccggcttcctcctggaggaacgggcggagggctttctactcgtcgacccggacgccatcgccaccgacgtccgcttccccgacgacacctccacagcccgagtcgccgcgctactcctcctcgcaccgctctgcgccatgcccgcgggcctgctgcccgagcagctggccgaggccggagcggagctgctgcgccgcttcccgggttgggccaaggcctaccagtcggaggaaggcccggcccgccttgccgacgacgccgtacggatcctgctcgacgtcggcctggcaggcagggcccgagaccgtgtcatcgcgcgaccggccgcgtaccgctaccgcctgacggagaccaccggcccagctccgaagaacgatccgccagccgtgaccaccgctggcagcgccggagaaggagacaagcagtga

SEQ ID NO: 50636 - DNA, 4134 bp, Streptomyces sp. PVA 94-07
gtgagcgtgacggaactcccccttcagcgacggcccgaggagaccttcgagccgtcacccgttcacgaggcggataccggccgcggacgctggcagccccatcgcgcgggcattctcaacgtctggcgctactacgacgagaccttcaccttccaccagggtcgcctgctgctgcgcggtcagaacggcaccggcaagtccaaggccctggaactgctgctccccttcctcttcgacgccagcctccgccccaaccgcctctccacgttcggcggttcggagcgcacgatgcactggaacctgctcggccagggagcgtccggcaagacccgtgtggggtacgtgtggatggagttccgccgcgtcggagacgacggcaccgagcactggtccggctgcggagcccgcctgcacgcgagcgtgcacaccaccacggcgcacgccgactacttcaccaccaccgcccggatcgcccatcccgacggggtccacctcgtcaacgacaccggacagcccctgaccaaggcggccctcgccgaagctctgcgcgaccgcggtgaggtgcatccgtcagccaccgactaccgcaccactgtgcggcgcgaactcttcgcgggcatgggagagcagcggtacgagtccctgctctccgccttgctccagctccgccagcccaagctgtccgaacggctcgacccctccctcttgtccaccctgctgtcacgggcactgcccccgctcggcgaaggagagatcactgagctcgccgagggcttcgagcgcctggaccggcagcgggaccacctcgaccggctcgacgccgaggtggcggccgccgagaacgtcgcctcccggcagcgcgcctacgctcgtcgggtcctgcggtccggtgcggcgtcgctgatctctgcgaccaccgagatggacgacctcacccgcaacgcccgtgtcagcgccgaggagtacgagaaggcgtgcgaggagcgcgcctccaccctggccctgcgagaggagctggaactacgggcgcacgcgctggacgagatcgtcgaagggcttcgggagagcgacgcctaccagaagggggaggagctcgaccggcttcgccacgacaccgaggatcaggtcgcggccgccgccgagctgcgtaccgccgcccggtccgccgagaccgaggcggaggaggaccggaagcacgccgacgaggtcgcgggccacgcccgctcgcgcgacgagcacgcccgcgcgaccgcggacgaggcgcaccgctcggcccgggccgcaggcatggaggccattcaccacgaggtgaagacgattctggacgcggaaggggaggtgaagtccctcggcgacgggacggcgaacaccccggtcaggacggggagcgggcggtccgatgctcctggcaccgctgcccgtcgtctgctccggggcgcggtcaccgcccgacgggagcagatcgccgacatcaccgacgcgatcgacgcccacgaccgggcggtacgcgaccggggaaccgccgagggcctgctggaggaggcccgaacccggcttgcggacgcgatcgcccaccgcgacgcggccgccaccgctggagacaacgccctcgtcgcccaggcggaacggctgctcgcctgggcccgggactgcacggagatgcgcatccccgacctcgatgagctgaccgccagggcggccgttgaggcagacgtgcgtgagctggtcgaaacggtcgcacgaccgctggaggaggagatcaccactgagcgggccggagtcggcgccgcgcaacaggggttgaagcaggaacgtgacctgctcgacgcgcggaggcgcaagctcagcggcgagaccgatctccggcccgtcgctccacccacccgcaccaccgtccgtacggctgcggcgggcgcgccgctgtggcagctgatcgccttccacgaggacgtcccgctcgccgtacaggccggggtggaagcggcactggaggcgtcgggcctcctggacgcatgggtgagcgcatccgaagggctcacccttcctgggcacgacacccgtgtcgaggtcggcctcgccacgaccgcccccggctccagcctgctggacgtgctgaggcccgaggaggacattcccgtaccggccggcacggtgacccgcatcctcgccggcatcgcgtatggcaccaccctgcccggtggtcaccctgcggcagtctcctccgacggcgcctggcgcctcgcgccggccacgggttcctggagcaagccggagcccgcccacatcggagccctcgcccggcagcgggccaagcagcgtgagatcgccgaactgaccgagctgatcgccgagaaggacgcctccctggccaccctcgccgaccggctgcgggaactcggcgcccgcgccgcccggctggcggaggaccgcaccgcccggcccgatcaccgggaactcgacgcctgccgacgggactgggaccgggccgaggagaaggtggccgcccgggacgacgccgtgcgtgacgcgaccgagcatctggccgcacgcgagggtgacgtggccggcgcgctgcgcacgctgagccgcagggccgccgaacacggactgcccacggaccgcgaccggctgcgcgaactcggccgcgacgtggagagcttccgcgacctcgccgatgcctggacggacgcccgcatcgacgcgatcgcggccgctgaaagggctagtgagacggccgcacgggcggaccggtcacgccttcgcgcggagaagcagaccgccgacgcggtcgctgcggaagcgaaggcggctggtatgacggcacgcctgaaggcggtggaggagacggtcggcgcggactaccggcagatcgtcgcgcgcgttgcggagactcgtgccgaacgggtccgctgcggcaaggaagcccgccaggcagccgaactcctcctgggcctggaaggccgcatcggagagctgcgggccaccagtggccaggacgccgaccggcaggcgaaggcagtcgaggcccgcgacggcgcggcgcggcggttccggcacctgtgtctggtgggtctggccgaggacgcgggcgtcgtacccgaactcgacaccggggacggtaccaaggccactctggaggccgcgcgcgccatggcggcaaggtggccccaggtcccgcatgccccgcgccacctcggcgacgccgccacacgcctctccgaagccgtccacgaggcccgccgctacctcggcgtccgcgccgacctggagctggagcccgacgacgacatccagctcttcaccgccaccctggagggcgttcgcgtcggggcgaccggtctgctcgccgcgctcgcccaggagcgtgaccgcagccgcggcgacatcagcaccgccgaacggcgcctcttcgaccagatcctcaccggtgacatccgtcggcacctcgccgcccgcatccgccgggccggcgaactcgtcgctcacatgaacgggcacctggagcgggtccgtaccgcttcgaaggtcgccgtccagctcgtctgggacgtccgcccggacctccccgacagcacccgcaccgcccgccagctgctcctgaaggaccccggtcgggtcaccgagtccgaccgggaggccctacacgccttcttccgtgcccgcatcgaggaggccaagggcagcgacaaggccgcgagctgggaggaacacctcggcgaggtgctcgactacaccgcctggcacaccttcaccgtccgcctcgaccgggcggacgggagcggctggcagcccctgaccaagcggctgcacggcgcgctctccggcggggagaaagccatcgcactgcacctgcccctgttcgccgctgtcgctgcccactacgaggacgtgcccctggctccccgcccgatcctcctcgacgaggtcttcgtgggtgtcgacaccgtcaaccgcggacaggtcttcgccctgctcaccgcactcgacctggacctcatgatcacctccgaccacgagtggggaaactacagggaactgcccggcatcgccgtccaccaactcctgaccgacggcgacgacgccgtcaccagcgcgcgcttcgtctggaacggcaccggaatggaggaaggatga

SEQ ID NO: 50637 - DNA, 1329 bp, Streptomyces sp. PVA 94-07
atgattttccgagaccaccccgtgtccggcgggacgacctctcgggagcatttcgcctcgggcgacgagaccctccgccgccccgaactccatcccgtctggcagacggtccacgaccgtctctcctccggccgccccgtcacacgcgtacgcctcggactgctggacgagacccagcgcgaagctctcgcggacctcctcggcctggaccgcctgccggacccccggccctccgtcgcgctggcccgcctggaggaggccgtcaccgaactctccggccgcacggtacgagaagtcgtcgccgagctcgtcggcccactcggcgacagagccggtgaacgccgccgccaggagggcgagcgcgccggtctgtggacctggctggctggtcacgacacggtccgggcccagccggcgctcgccgactgggctgcgtcctgtcgagccgcgggactggtcggcggctcgacggaacgcacccgtacgctgctcacggacgcgcttaaagtactcgtcgagctacccggccaggccgaacccctgcccgtcttcgccgcccgagtcctgaacggccacgcgcacgctctcgacgacggcacatccgtctccaccctcgtcctgcgtgccctggcgactctgtacgacatcgcaccgccgcagtccgcggcggaacggcgtgctctgtggtcccgcgccggcgtggccgacgacgagctgtccgccaccgtcatcgccgggggactgcgccctctcggcgacggccttctcgcccgtgtgacccgcctgtgcaccgaggtcggccaggccgccagcctgaccctcgcccacgtcaggagcccgggcgagctcaccctgcccgccacctctgccccactcgtcgtccacgtagtggagaaccccagtatcctggccctcgccctccgtcgcttcggctccaactgcccaccgcttgtctgcacgtccggctggcccaacagcgcggctgtccagctcctgcgcctactcgcggaccgaggcgctgctctccgttaccacggtgacttcgatggcgaaggcatccgcattgccgcatacgtcacggagaaaacaggggcgcgcccctggcgcatgacggcggcagactaccgatccgcgatcgcccgcaacgcgcatggtcctcgaccggggcgcatcaccggagcaccgtgggatcccgagttggccgaagccatggcggagcacgacatcgccgtggtcgaggaactggtagccgatgtgctgctggaagatctcgctgccgcggcttgccagcagcacccctccggcgatctgtacgctccaggttattga

SEQ ID NO: 50638 - DNA, 1059 bp, Streptomycetaceae bacterium MP113-05
atggcttccctgacacattcccccgctccgctcgccagtccggccagcagtgccgactacgcacccttcgcccacctgaccgcgcccaacgccgtcctctaccgcgcggtgatgcgcacgttcctggccgccaaggagcggttcgcggtgcatctgcggccggaggacgtgcacaccgggatggcggccggtagccggccgacggacccggaggcggtggtgaaggcgctggacgccctggtcgggtgggggaacctgcgggccgacccggacaccgcgcgggtgacggcggtggaggacttctaccgcaagcggttcatctaccagctcacccgggccggtgaggcgaccgaggcggcgctgggcacgtacgacgaggtgctggggcggcgcggtgagctgcaggcggtcgcgctgcacgacatcgtcacgcagctgcgggcgctgttggtgatcgcggcggagggggagcccgacccggcgaaggcgcacgtcgcgctgtcggtgctcacggcacggttcaccgacctcgcggacaacgcccgcgcgttcatggggtcgctgcagcgcaccatcgacctgcacgacgtggaggtcgaggcgttcctcgcctacaaggaccggctgatccagtacctggagcggttcatccaggacctcatcaccctcggcggacggatcgcggcgctcatcggcgaactggaggcgcaggggcgggtcgggccgctgctggagctggccgccgtccgggaggccgccgacgccgcccccgaggacgccgcacaggccgaggcggcggcgcgggagaggtgggccgcgcggtggtcggggctggcggagtggttcgtgtcgggggaggggcgcgagtcgcaggccaggctgctgcgcgggcgggccctcaactccatcccgcagctcctcgccgtcgtgcggcagttgaacgagcgccgcgccggacgctccgaccggtcggccgacttccgcgagctggcgcgctggttcgcccacgcgccggacgacgacgcgcggcaccgcctgtggcgggggggggttggcccg

SEQ ID NO: 50639 - DNA, 1278 bp, Streptomycetaceae bacterium MP113-05
atgaccgggcgtcttaccgaagtcctggacggccagcgtgaagccgacctgcagcgggccgcgcgcgccctgctgaaggaaccgctgctcaccgccgacgggccgcacgccgacgcgttccggctggtccggcggcacgccgccgcactgcgggagtggttcgagcgcaacgccggctgggccctgcgcacggacgccgacaccgcccggctgcgcaagacgcccggcgtcctcaccgacagcacgcacccggcacgtgaagtgggccgtgccgccctgccgttcacccggcgccgctacgtcctgctgtgcctgacgctggccgcgctggaacgcggcgagtcacaggtggcgctcgggcggctcgccgaacaggtcgtgctggccgccgccgaccccgaactcgccgacgccggcatcaccttcaccctcgagcgtcgcgacgaacgcctcgacctcgccgccgtcgtacgtctcctgctgcgcttcggcgtgctgcgccgggtggccggcgacgaggaggcgtacgtcagcgggtccggcgacgtgctgtacgacgtccggcggcgggtgctggccggcatgccggccaccctgcgcgggccgtccctggtcgagtcgcgggaggcggaggcgcggctggcggagatgaccgcgcagagcgccctggacagcgacgaactgcggttccgcacgatccgctggaagctgacccgccttctccttgacgagccggtgctctactacgacgacctggccgacgacgaactcgcctacctcacccgccagcgcgggttcctcaccgcacgcatcggcgaactgaccggcctggtcgccgaagtgcgtgcggagggcatcgccatggtcgacccgctggacgacctcaccgacgtacggatgcccgaacagggcacgcacgggcacatcaccctgctcctcgcgggccacctggcacaggccgggcggcccgtcgaggcggcggaactcgcctcccgggtgagggaactggccgccgaacacggcagtttctggtccaagtcggccagagaaccgggagccgaacccgaactcgtcgcacaggcactggcgaaactggtggcgctgggactcgtcgagcgcacggagcggggcgtcgtcccccggccggccctcgcccggtacgcggtcggcgagcccgtggtccgggaggcgaaagcagcccccggccgcagctccgcccgccgcgcagcccgccgcaccgccgcaccgctcggcacgacacagaaggacgaagcgtga

SEQ ID NO: 50640 - DNA, 1540 bp, Streptomycetaceae bacterium MP113-05
gctgctcgccgccctgtggccggccctgcgggagcacacggaagccgaacacacggtggagggcgagcgggtggagaccgcccgcgccgaggcgctcgtcaccgaactcgccgagcgagctgccgaagcagcccggctcgccgccgccgcggacgaacaccacgccaccctgggctccaccgtcggagccgccgtcgccgaactccagcagcgactcgccgagacggcggcccagctgcgcggctgccaggacgcgcagcggcgcgcacagcaggagatcagcgacgcgaccggccgctgcggtcacgccgagggacgcatcgaacggctcggcgacgacatcggcgagacgaccgccgcccgcgaacgtgccgtcgccgggctgcaacggttcaccgccacggggctgctggccgtcgctctccccgacaccgaggtacccggcaccgacgcaggcgcctgggcggccaccccggcggtcaacctggcccgcgccgtcgagtcccggctgtccgacgtcgacgactcggacgcggcctgggaacgggtgcagaaacgcctgagcgaggagttcggcagactgcaggacgcgctgtcccggcacggacacaccgcgaccgcccgtccgagcgaggacggcatgcgggtcgacatcgtctaccagggccgcgagcgggccgttcccgagctcgccgaggccctggcctccgaggtcgccgaactcacccgcatcctgtccgcgcacgaacgcgagatcctggagacccacctgattaccgaggtcgccggcaccctccaggaactcatcggcgcagccgagcgtcaggtccgggccatgaacaccgaactcgaggaacgcccgacctcgacgggcatgacactgcgcctggtgtggcgggcgtcccgccgcgcaccgcaggggctggcgcaggcccgggagcggctgcgccagtccgccgacgcctggtcgccgcaggaccgggccgcggtcggcgcgttcctccaggaacagatcgcgcgccgccaggccgacgacagcaccggcagctggctcgaggacctcaccgccgcactcgactaccggtcctggcacgagttcggcgtcgaacgccaccagcacggcaagtgggtaccggccaccgggcccgcctcgggcggcgaacgcgtcctcgcggtgtcggtgcctctcttcgccgcggcgtcctcccactacgcgagcgccggcggcgcgcacgccccccgcctggtcaccctggacgaggcgttcgccggtgtggacgacgactcgcgcgccaagtgcctcggcctgctgcacgccttcgacctcgacgtcgtcatgaccagcgaacgcgaatgggcctgctacccgcaggtccccggcatcgccatcgcgcagctgtcgcgcgtcgacgacatcgacgccgtcctggtcacccggtgggagtgggacggcagcgagcggcggcgcggcacggaacccgggccggattccctcccggttcccccgccgggcgacgccggggaaccggcggtcccgtga

SEQ ID NO: 50641 - DNA, 1030 bp, Streptomycetaceae bacterium MP113-05
actcgacgccgtggacgcgatcctccgccgctccggcgtcagcccggagggcctggccgccgcggtggtggctctcaccggcgcagtccccctgcgtgcggaggtacgggacgcacaggaccgggcgtgggagaccgcctaccaccccctggacacgctggacgccgaactgggcgactgggccgtgcgggtccgcaaggacggcctcgtcagacgactcgcatccacaccggccgccgccgggcccctggtggacgccgccgtgcgggtcctgtgcgcgctgcccgtcacgcctcccacgtcacgcgccacgttcgccgcacgacacctatcccacgcccacgccctggacgaggggacgccgctcgccgccctcgtcctctccggaatccgcgctctcacgaccttccccgacggcaccggcgccgagtggcggagagccgcctgggcgtcggccggactgctgaaggacgacgtgtcctcgaccgtcctctgcctcaacctgcgcggcaccccggctctcgactggatggccgacgtgggtgaacccgccgtgctgacactgcgcgcgctcacccgcggcccgtcggcgtccgtcgtgccggcagggcggaccgtccacgtgtgtgagaacccggcggtgctgtctgccgccgccgatcgcttcggccgggcctgcccacccctggtgtgcctccaggggcagccctccgctgccgcgctcaccctgctgcgtgcgctgtcggcgcagggagcggagctccgttaccacggcgactttgactggggcggcgtacgcatcgccaccgcgctgcgccggagcgtgccgtggcacccgtggcgctacacggccacccactaccgggtcgcagtggccggagtggccgagccccgagagctgtcggggacccctaccgccacaccgtgggatccggcgctggccgaagcgttcgccgagcaccgcatccgggtggaggaggagatggtgctcgacgatctgctgtccgacctggcaggagtgcccgcctga

SEQ ID NO: 50642 - DNA, 1755 bp, Streptomyces niveus NCIMB 11891
atgacagcacagactcccggccacgaacccgtcgactacggacccttcgcccacctgaccactccgaactccgccctgtaccggcaggtgatgcgcacctttctggccgccaaggagcggttcgcggtgcacctgcggccggaggacgtgcacgccgccatggcggcggggagcagaccggccgacgtggagccggtggtgaaggccctggacgctcttgtcgcctggggcaatctgcgtgccgatccggacaccgcgcgggtgacggcggtagaggacttctaccgcaagcggttcatctaccaactcacgcgtgccggtgaagcggccgaggccgccctgggaacatacgacgaggtgctggggcggcgcggcgaactccaggcggtcgcgctgcacgacatcgtcacgcaactacgggcgctgctcgtgatcgcgtcggacgacgaacccgacccggccaaggcccacctcgccctgtccgtgctcacggcacgcttcaccgacctcgcggacaacgcccgcgcgttcatggggtcgctccagcgcaccatcgacctgcacgacatcgaggtcgaggcgttcctgacgtacaaggaccggctgatccagtacctggagcggttcatccaggacctcatcaccctcggcggccggatcgccctgttgatcggggagttggaggcgcagggcagggtcggtccgctgctgggcctcgccgccgcccgtgaggccgccgacgccgcccccgaggacgccgaacacgcggaggcggcggcgcgggagaagtgggccgctcgatggtccgggctcgcggagtggttcgtatcggcggagggacgcgagtcgcaggccaggctccttcgtgggcgggcactcgggtcgattcctcaacttctggcggtggtaaggcaactgaatgagaggcgggccgggcgttccgaccgctcggccgacttccgcgcactggcgcgttggttcgcgggtgcgccggacgacgaggcgaggcaccggctgtggcgggtggcgttcgggctgtactcctcccggcacctcacggtcgacgcggacaccctcgccgaacgggccgccgagccggagccggcctcgaccccgtgggccgaggcccgaccgctgcggatcagcccccaactgcgccgcaccggcagctacgaacggcgcggcaagccccgcagagtggcggacaggagcgaggcgaagcgcaggctcgctgagatcgccacccgccaggcggaacaggcgggcgcggcacgggcccgcctcgccacaggcggcccgatccggctgtcccgcctgggagaactcgacccgctcgccttcgagttgttcctccgcctgctcggcgacgccctctccacctggcggccgggcatgacaaccaccgcggccaccagcggggacggctcgatggagatccggctgaccgcgctcgacgacggctcgacggccgaagtacgcacgcccgacggggtgttcagcggaccggaccatctggtcgacatcatcgagctcaccgagaccttcggcatcggagtcctgggcgggcggggcggagtggctgtcgcgtccgccggtcaggagggggcgggcgcggccgggcccggaccggcgcccgcgcgtggactcgtcccgcggcaggagggcctcccgcggcacgtacctgccgcgccgcgccgttccgccctccagaaccccgtctcgtacacctcccgggacacgcaggaggagcggtga

SEQ ID NO: 50643 - DNA, 1245 bp, Streptomyces niveus NCIMB 11891
gtgaccggacccctgaccgaggtcctggacggtcagcgtgaggccgacctccggcgggccgcgcgcgccctgctgaaggagccgttgctcacggccgacgggccgcactccgacgcgttccggctggtgcgccggcacgccgccgaactgagggagtggttcgagcgcaacgtcggctggacactgcgcaccgacgccgaggccgcacggctgcgcaagacgccgggcaccctcaccgacgccacccacgccgcacgcgagaccggccgggccgccctgcccttcacgcgccgtcgctacgtcctgctgtgcctgacgctggcggcgttggaaaggggtgagtcgcaagtggcgctcggaaggctcgccgagcaggtcgtcgtggccgcgtcggaccccgaactcgtcgccaccgggatcacgttcaccctggaacggcgggacgagcgcctcgacctcgccgccgtcgtgcgactgctgctgcggctcggtgtgctgcgtcgggtggccggcgacgaggaggcgtacgtcagcggatcgggagacgtgctgtacgacgtacggcggcgcgtactggcagggatgccggccgtccggcgcggcccctccctgatcgaggcccaggacttcgatgaacgcctggtggagatgacggcgcagaccgcgctcgacagcgacgagctgaggttccgcgcgatccgctggaagctgacccgcgtcctcctcgacaacccggtgctgtactacgacgacctgaccgacgacgaactcgcctacctcacccggcagcgcggtttcatcaccgcgcggatcagcgaagtgacggggctggtggccgaggtgcgcgccgaggggatcgccatggtcgaccccctggacgacctcacggacgtacggatgccggagcagggcacgcacgggcacatcaccctgctgctcgccggacacctcgcgcgggccgacgggcccgtccaaccggcgcgactggcgtccctggtgcgtgaactggccctggaacacggcggtttctggtcgaagtcggcgcgagaaccaggatcggaaaccgagttggtggagcaggcacttcagaagctggtggcgctggggctcgccctgcgtacggaacggggcgtgctgccgcggccggccctcgcgcggtacgcggtaggagacccggtcgtcaaagaaccggcgcccgcccggccgaccgtacggcccggcacgaccgcgaagaacgaaaggtga

SEQ ID NO: 50644 - DNA, 4152 bp, Streptomyces niveus NCIMB 11891
gtgaaccccgccttgactacgctccccacccccgcgcccggccggtggcggcccctgcgcgtcggactcgtcgacctgtttcactacgacgtcgaggagttctggttccgcgacggccggctgctgctgcgcggcaacaacggcaccgggaaatcgaaggtgctcgccctcaccctgccgttcctgctcgacggtgacctctccgcgtgccgcgtcgagcctgacggcgacccgggcaagcggatggagtggaacctcctcctgggcggcgaacacccgcatcccgaacggctcggctacacctggatcgagttcggccgactcgacgagaccaccggcgaggcgcatttccggacgctcctctgcgggctcaaagcggtcgccggacgcggaatcgcccgccactggttcgcggtgacggaccagcggaccggcgcgggactcgacctgctcgacgccaccggtacggccctgtcccgggaccgtctggcggaggcgatcggcgcccgcggcatggtgtacgacaccgcgaagacgtaccgcagagcggtcgacgaagcgctcttcggtctcggcgagcggcgctacggggcactggtcgacctcctgatccagctgcgccagccacagttgtccaagcgtcccaacgaagcggccctttccagggcgctgacagaggcactgccgccgatggaccaggcggtcgtcgccgacgccgcggaggccttcagatcgctggacgaggagaaggacgagttgcgggcggcccgcgaggcggagcaggcgtcctcggggttcctggaccactaccggcgctacgcccgtatcgcctcccggcgccgggcccggctgccgcgcaccgaacacgcccggtacgagaacctccagcgtgaactgctcaaagcgcagggcgaccgccaacaggcccaggaggaccggaagaaggccggggaaagggtggcggccctcgacgagcgggccgctcggctgagcgcccaggacgccacactgcggaccgggcccgagatgcgcgacgcccgcgcgctcgaccgggcggcggccgacgtctcccgcacggcgggggaactggcgcgcgccgaggcggaccgccggacggcggccgaaacccacacccgggccttgggacgactcgccaccgccggcaatcggctcaccgccgcgcaggagacgctggagaccgtccaggaccgcctggccgagaacggcgcagcggtccggctcgatactcctcggacccatggcgcccccgaagccgccctgcgcagggaggcggacgagacgacggcacgcaggcggcgcgccgtcgaacatgtcgaggaactcatcacgcgggccgagcggaccggggaggcgcgcagggccgcccagttgcgtgccgacgaggccgaagaggaggtcctgcacagcggggagcggctggccgaggccgaggagagcgtcgccgaggcgggccgggcactggtcaacgccgcgcgggaacacctgtcgggctgtgtggagttgcggattcccgggctgcctggagtcctcgacgccgtccagaactgggcgaccactctgcacgggccgcacccggcacgtgtggcggcggccgaggcccatcgcacgctcgcgtcccacctggccgaccgggccgccgacctggcccatcgcgaggcgggtagggcgcagcgacagcggctcgcggcagaggagctgaccacgctcgaagcgggcgggcagcgcggtccgtccgctccgtacacccgcacgcccgatgtgcgggagagggctctcggcgccccgctgtggcggctcgtcgatttccgctcccacgtcaccgagtccgaacgcgcgggactggaggcagcgctggaggcatcggggctcctcgacgcctgggtgcggccggacggttccgcagtggccgcggacggcgatgacgtgctgctcgaccccttgaaccagcccggcggagagctactcggcagcgtactgtgccctgcggtggaccacgcggacgcgggggccgccgccgtgggggaaccgaccgtcgagcgactgctcgccgcgatcggactggccggaaaggacggcggcacgacggaagcggttcccgggggctcaggcggcaacgacacctgggtctccacggacggacggttccgcgtcggtgcgctgaccggaagctggaccaaggacagcgcacagtacgtgggagagggcgcgcgggagcaggcgcgccgcgcccggatgcgcgaactgcgcctcaccctggcggcgttggaggcggagcgggagcaactggccgaagagctgcgcgcgatcggtcggcggcgtggcgtactggaggccgaactcgccgcggtaccgggcgacgacgacctgcggcatgcccacgcccgcgtcacggccgcggccgacgcgatccaccgggcccgtgtgcggcacggtgagcgggacgccgatctgacccgcgcgaccgcggacgccgaacgtgcggcggccgaactcaccgggaccgcggcagacatgaaccttcccgcgcggatgaccggactgggctccgtacgccaggcgctcgccgaccgcaccgccctcctcgcggcgttctggccggcactgcgtgaacgcgccgaggccgagcatgccgtcagcggcgagcaggcggagacggaccgggccgaactccgggtttccgagctcgcggagcgcaccacggaagcggtccgcctcgccgccgccgcggacgaacagctcaccaccctccgctccaccgtcggagccgccgtcgccgaactccagcggcgactggaggagacagcggcggccgtacgcgactgcgtgcgcgaacagcggcgggcccaggacgacttcggcgacgcggaccggcgtgccagtcacgccgagggacgtatcgagcggctggtcgaggatgtcaccgaagcgaccgccgcccgcgaacgcgccatcgcggcccttcagcggttcgtctccaccggactgctggcggtcgcccttcccgacgccgccgtaccggacggcgacggcggggcgtgggcggcgaccccggccgtcaacctcgcccgcgccatcgagtcccagctctcctccacggacgactccgacgccgcttgggagcgcgtgcagaagcgtctgagcgaggagttcggcaggctccaggacgcgctgtcccggcacggccacaccgccacagcccgtccgagtgaggacggcatgcgggtcgacatcgtctaccagggccgtgaacggcccgttcccgaactcgccgaagctcttgccaccgaggtcgccgaactgacccggatcctgtccgcgcacgagcgcgagatccttcagacccatctgatcaccgaggtcgcggggacgcttcaggaactgatcggcgccgccgaaagacaggtgcgggccatgaacaaggaactggaggagcgcccgacctcgaccggaatgaaactgaggctcgtgtggcgggcgtcccggcgcgccccgcagggactggcgcaggcgcgtgagcggctgcgccagtccgccgacgcctggtcgacccaggacagggccgcggtcggtgcgttcctccaggagcagatcgcgcgccgacaggccgacgacaacgccggcagctggctggaagacctgaccgccgccctcgactaccggtcctggcacgagttcggtgtcgaacgccatcagcacggcaagtgggtaccggccacggggcccgcctcgggcggtgaacgggtactggcggcgtccgtgcccctcttcgccgcggcgtcctctcattacgcgagcgcgggcggcccgtacgccccacgtctggtcacgctcgacgaagcgttcgccggagtggacgacgactcccgcgccaagtgcctcggcctgctgcgcgcattcgacctcgacgtcgtcatgaccagtgaacgggaatgggcctgctacccccaggttcccgggatcgccatcgcgcagctctcccgcgtcgacgacatcgccgccgtcctggtgacccggtgggagtgggacggcagcgatcgacggcgcggcacggagcccggcgggcccgtcgccggtcaggagcgggccggtgtcgaggacggcaccggagatcaggaatccctgtggacatga

SEQ ID NO: 50645 - DNA, 1380 bp, Streptomyces niveus NCIMB 11891
gtggacatgaatccctcggagatcccgccctcaccgaccgagcgtggggccggctcccggaaaccggtggagcttgcgagaccggcggacgtcacgggcgcgagcccgcccgcggcgccgcgggggcacgacgccgggcagatcgacgccgaacgcctcggccgactgctcggcgaccccggcctcgcctggctcgtggaacgcgcccggcaccggatggcgcgcggccgaccactcacgggtaccgtcgccctgtcacacccggatgagacccaacgccgcgctgctgagggcttgttgggacgcgcaccgcaggccggccgctccctgaccgtacgcctcgacaccgtggacgcgatcctgcgccgctccggtgtcagccctgacggactggcgcccgccgtggtggcactcaccggccccgtcaccccgcacgcagaggcgcggcgcagcgaggagcgggcatgggcggaggcatacgccccgctcggcaccctggacggcgagctgggcggctgggccgggcggatacgccgggacggactcgtacggcgactcgcacgcacaccggaagccgccggacctctggtggacgccgctgtgcgggcgctgcgctccctgcccgtcgtacccccgacctcacgcgcgaccttcgcggcgcggcatctctccggtgcccactgtctggacgagggaacaccgctcgccgccctcgtcctgtccgggctccgcgcactgacgggattccccgacggtgccggtgccacctggcggcgggaagcatgggcgtcggcgggcctgctcaaggacgacgtgtcgtcgaccgtcctctccctcaacctgcgaggtaccccggccctcgactggatggccgacgcgggagagcccgcggtcctgacgctgcgctctctcacccggctcacgtcgacccccgccgtcccgacgacaggaaccgtccacctgtgtgagaacccagccgtgctgtccgccgccgccgacaccttcggcccggcatgcccgcccctggtctgcctccagggacaaccgtcggccgccgcgctcaccttgctgcgcggtctgtccgcgcggggagccgaccttctctaccacggcgacttcgactggggcggtgtgcgcatcgccacggcgctacggcgaagcgttccgtggcggccgtggcgctacaccgccgcccactaccgagcggcggtggtcagggtggccggggccccggacctggccggctcacccgcggagactccgtgggaccccgggcttgccgcggctctcgccgaacacggtgtacgtgtcgaggaagagacagttctcgacgatctgctcgcggacttggagaagcggactcgtcgagatccaccgtga

SEQ ID NO: 50646 - DNA, 1500 bp, Bacillus sp. 17376
ttggatgtgacgatgaagaaggtggtcgaggccagttatttgacggcggattcggctgcgcattaccggacaattttgcgttatttttaccatcagcatgaaaggatgcgggatttcatttcccctgaggaaattttggagtatatgcgctccattgctgtatttgcggattatcaggaggagcagctgcatcagcagcttgcacagcttgtgaagtggaataacttgattgccaggcaggatatgaccaatgcgaagacggttgaggaatataagaagaagcgattccgttatcagtcgacgccttatacaatcgaaatcgaaaggatgcttatagtacttgaaaaaaaggttggtgacaccttccaggggtcattggagcggtctcagtttgaccgtttgttgcagtctttgtcgatattgcagcaggagctcgagggcagtcttgcgaaaaaggctgaggaatacatgcggatttgggaggatgtcttccgctacttccagacgatcaggtccagcacggctgattacattgcatacataaacagtgaacagactgatcaacggatgcagactgaagctttccttgtctataaaaatcaattcacgacctatttgcgtgacttcattgtttcattacaaaatacgtcgctgcaaatcaaagaacggcttgatgaactgtctccggataagttggggttatttttcgataaactggttgaacatcggcagtcgattccgagacttgaggatgtcagttcgtctgttgaggagtggcggactgaatacctggagtattggggttcgttgaggcagtggttccttggttcgaatttgcagcagagtgagctggatgtactgcaatggcagacgaatgaaatgatcaggagaatgactcgatatgttcagcgtataggggaaagacagcagcacttccgcagccgtaaaaatgattatttgcacctggcaaaatggtttgtcgatacggatgcactcgaggaggcccataaactatcctctgttgtgtttggggcgatgacgatcaagcatcttcagcttgatgaggtgagtacagataatttgcataccgaaacctgggaagaaaatcctgttatggttccgctgaagccgcggacgaatcgctaccgtgaaaagacgaagccgggttcaatggtatcgaatgaggagaaaaagcgtcttcaacgcgagcaatatctggctgaacgaaaacaggagcaagtactgattgaaaaatatatagatgagggtgtcataaaactatctgctgtttcaaaagttgaaccatttgtcaggaaggttttgcttgggtggataggaaaatcgatggcaagcaagaatggcaaagtcaagacagattatgggatggtcgtgaaggtgacaattgaccgtgaaaagatgattcttcttgatgcagaggatggaactctgaagatgcccgatgtgctgttcacctttgaaggagagggggaatccagatga

SEQ ID NO: 50647 - DNA, 1167 bp, Bacillus sp. 17376
atgatcaagcttgaacaaaccttagaatttgatgaaaaggcgattctcggaatggatttattgtttaatcactactggattctccgcagcgagcagccagagtggtatcagctcgtccgtgaacgggagaaggtactgagacgctatatcaatgagaagttcggattgcgcctgattgtccatcagcattttatcaagcttgaaaaaatcccggttgagccggaacgatggatgggcatccaggaattccaggaaccgatggattatgctgttttttgctgtgcgctttccttccttgagggcaagtctgtagatgagcaattccttttatcggaacttagccaggaaatccaggcggattatcctggtgaccttccccttgactggacgctttatactcatcgaaaatcgctgatccgcgcaatcaaggtgctgatcgattttcagctgatcaggaccattgatggagatatcagccgatatgaccataatgaagaacaagaggtgctgtatgaggcaacggtctatagccggtattttatgcgcacctatccagatgattttacaagctataagcactggaatgagctcttaaatgaagattggaggctgaaccaggaggacgaaagaaggaagcgggtataccgcaaactgttcttctcacctggacttcaccgcattgatatgcaggatccagactttttatatatccggaatttccgcaatcgactgtccgaggatatcgaaaaccatagtgattataaattgcatgtttataagaacaccgcttttttgtcaacagatgaatcgcggcaatatcagaacttatatcctgatgcaaaagcatcgacggatctgattctgcaattttcaaagcatttgcatgattaccctgaaaagtacattccgaaagaaaatggagagattgtcctgactgagggggaaatggatggaatcatccttgaacttcgaagtcagttcgagcggggatggtcaaaatattttcgtgaaaaagcgaacagtggcatcaggaacgaactacttgaggcgatgaaagactggatgatggcagaagtcgagaaagaaagttcattaattaaaataaaaccgctattgggtgtgcttgccggagcattcccggctgattttgaagggagcgaggagtaa

SEQ ID NO: 50648 - DNA, 4113 bp, Bacillus sp. 17376
atgaagggtacaagatgggtgatgaaccgtgcagggttactcaatttctggtattacgatgaagaagtgttccactttgagcaaggcaagctactgcttcgcggctcgaatggttctgggaaatcagtgacgatgcaaagtttcctgcctgtactgctggatggcaaaaagtctcctgaccgcctggatccctttggttcgaaggcgcgaaggatggaggattatctccttggtgaaaaggaagtcgtcgaccgtgatgagcggacaggctatttgttcatcgaatataaaaagcaggggtctgagcagtatatcaccactggaatagggatgcaggcgaagcggaataaaggaatcaagtcctggtatttcctcttgactgataaccggaggataggtcatgatttccagcttgcccagcagcacacaggtgaaaaagttccgctttcagcgaaggaattggagaaccggattggccagggtggctatgtagtccattcgcagcgggagtacatggatcttgtgaataagtatgtctttgggttccagtctatcgatgcttatgaggacttaattaagttgctgatccagctgaggagtccaaagctgtcgaaggatttcaagccaacggtcatctacgagatactggaatcagctctgcctcctttgactgatgatgagctgcgcactctctctgacacaatcgaaagcatggaccagacgcagcagcagctggaacagcttcatcgagagtctgaatcgatctacagactggaagcggcatatgatacgtataacaaatatattttagccgaacgggctgagcaatggcagaaggcactgcaaaggagcaatactgccgaaacaaaagtgaacgagtatatatcccagcaacaacagcttgatcaggagattgtcagactaaggattgagcttgaaaagtttcagcagcaaaagcatattgctgagcaggagagcaattcgcttaagcatcatgaggtttggtcactggaggagaagaggaaagacaagcttgatgaatcggcagtaatcgcgaatgagattgctggactgcaaaagcggtgggatgaaaataataaaaaactccgcggcgaatatcagaaaaaacaggctgctgaagatgagctttttcaatatgatcaaaaggaaagagaacttttggccgagcttgcacttgacgcggatgcaacagcctttcaccagcatgaggtgaatgtctcggattatgtacggacaaaggaaattggatttgattttaccgtctggcaaaaagaagcgaaagaccatctggccttgcttggggagctggagaaactcgctgttgaagctgtgaggctaggtgatgaccaaaatcaccttcagcgacaatcatctgagaagaaaaaagaaatcgatgagttgcaaaaggaactggaccattatcaaacgtggttcgaagaggaacaccaaaagcttgaaagtaatgtatttttctggatggaaaaacatccaaagctgctctactctaatgaacttcgccagggaatcgcacgtgcattgcagggattgtatgagcgtaatcgctatgatgatgtccgctctcaattgtatgtagccatccataattatgaagctgaagtgaagagggatgaggctctgacaaagagtcggattcagcaaaaacagaatgatatcagtgaagcagaggcggaattgctgcgaataaaaacccagaagatgcttgagcccgaacgagcaacaggtacggaaaaacaacgggagaaactattgaatgaaaataccgcctttctgccattttatgcagcagtcgaatttcaggagcatgttacagaggagcagcgggaacgcctggaggcagcgctgatgaaaactggaatccttgatagcctgatcactgatcaaacgttttcacctgtggaggatgctgttctggctgctgatccacgcctgcttggctacacgcttgctgactatttgatgcctgacttggatgttgacagtcctttgactgaggaattggtggaccaggtgctgcggtccattccgctggagaatgatgggacaggattccatatcgatcaagacgggtcgtattcaattggctgcatgagaggacatgctccattagggggtccttcgaaatatatcggaaggacgtcaaggaaacggcatcagcgtgagttgatccagacttggacagaaaagatccaggaattgtatcgggaacttgctggattgaaagttgaactcgagcacttcaattctgaacttgaaaagattgatacttggaagagagagataccagatgacaaggtacttttagatataaacgagcaaattttatcaaagaagcatgagttaaagaatgaaagggaaatgctaaaccggattgatgcagactggaagcgagtttatgacaaatatacagaagtaaagcgggttttacgtgataaaggggtccagctgaatattccgttgacggttgatgatcttggaagtgcattgtcagctgggcaaagctacattgattttttacatgagttgaaaaataatgacgtgaaagtttcttctgtcaaaaagcttttacaaacctcgttggagcgaattgatgagcttgagggtgagcttgatgaactgaggggtgagcagggcaggaaggaaagccagcttggtaaaatcaaggcaatgatacagtcgattaacctgcagttgcagcttaaagggattgatgaagtcaggagcaggatccaggaagtccagtatcagcttaatgaggctgagaaagaaattgaccgaattagaagtgatttgcctaaagctgagtcggatcagaagcgcaatcaggaaaagcttgacgaggctcaaacagatttgtcattttggaagcaaatgaccgaagtatgggcaagaatggtcgaagcagagaagaaacgaagttactttgacattgaaggtagagatcctgctcagatttttgcgcagtttgatcctatttttacgaaacatgagcggccgaaattatcggaacagctgacgaaagtctttttaaatgaacaggcacatttgacggaataccgaatgtttgaatatccggaagatactgagattccatcctggttcaatgataacctggcagagaagtacgagccatttatgaatgaatggaaccagttgaaaggccggcgcttaattcagatggaatacaggggccagcgtgtcagtccgtattatgtatcttcagagctgaagaaggaacttgaagaacagcaaggctggcttgatgagcaggatcgcaggctgtatgaggacattattttaaacagtgttggaattatcctgcgaaatcgcatccagcgtgcccagcaatgggtgaaagagatggataaaatcatggcagaccgtgataattcatcaggacttatcttttcaattgcctggaaaccgctgacagcggagtcagagcaggaaatggatacaagagatctggttcagcttttacaacgaaacagcaagttcttgaatgaagaagatttgcagcggatcacgaagcacttccagtcaaggattgccaaggcgaaggagctgattcagctgcgcaatgaaggatccacgcttcaccaggttttgaaggaagtgctggattaccgcaaatggttcacattcgttctttcgttcagccgggtgaatgaacctaagcgtgagctgacaaataacgcattcttcaagttcagtggcggtgaaaaagcgatggcgatgtatattcctttgttcacggctgcctattccagatacaaggaagcgggagaaatggcaccatttatcatttcacttgatgaggcgtttgcgggtgtcgacgagaataatatccgtgatatgttcgaggttgtagagcagctcggcttcaactatatcatgaattctcaagccttatggggtgattatgatacgatttcaagtctttccatatgtgagttggtccgaccgaagaatgctgattatgtcacggtcatccgctatcaatgggatggtaagcagaagtcgctggtaatcgatgaggcacctgaattggaggaactggtgacaaatgaataa

SEQ ID NO: 50649 - DNA, 1278 bp, Bacillus sp. 17376
atgaataatagattgcaagtgttccgagacgaacctggtttccggaagctatttggcttgttccgggacaagttcagatctcttggcagagtcgggggtttcgtcagtctgaaaggtttcaaggaagcagaggtcgaatcaattgccggcttccttggcctttctgcggttgagttgattgataaagggcgtgttggtcttggccagtttgaaagagaacttgccaagacgggtttttcagaccttaccctcgtggagatattggaagaaattttagaggaaccgattttatcaaaaaagcaagaaacggagaataatctaaagcttgaaaatgaatttgtaaatacattaaagctggacattcctgaagtgggttggtggctggaatggattagtgagagaagcccggatacaaggtggatttggtcactttatcggcaggatgaaattatgctttcaggaatgataagagaggtctctattgcttttttgtcgctgccgaaacagggagaacttgaacgcctccccttctttgctcagcggacaaccgggaatccgcattattttgatatctctgagtcgggcggaagattattgctccattttctaacggtaaataagaaaactagtgaagatcccgaatacctttttccaaaaagcactgaggaaatcaatgacctactcgcagaatatggcttgttaagggatgacttgtggaatttcgtgacccttcaaggaatggttgcttactaccagggtgaaatccacccagtctggaatgcagctgtccaaacccgaacagtactgaatgttccgatgaaagaattagccaaacttgaaactatcaagcctgcctctggccgaatggtgtggattgttgaaaattcgagtgtggcttctaccatcatggatgcagtccctgatgctgctgtagtctgcacacatggacagttgcgagcagcaagttggagactcctagataaattggccgaggaagaatgcacattattttattctggcgacctggatccagaaggagtccagattgcggatcgattgaagaaaaggtatcaagaaaagttggttttgtggaggatggatccattagcatatgagagtagcctctcaaatgaggatattgccggaaggattgcaaagcttgatggtgtgtcatcggaagaatggaaagacgtcgttatgatgatgcgcgaaaagaaaaaggcaggatatcaggaagcattggtagatgttcttatagaagatattaaacaggcttaa

SEQ ID NO: 50650 - DNA, 1491 bp, Geobacillus sp. MAS1; identical to SEQ ID NO: 50217

SEQ ID NO: 50651 - DNA, 1197 bp, Geobacillus sp. MAS1; identical to SEQ ID NO: 49776

SEQ ID NO: 50652 - DNA, 4122 bp, Geobacillus sp. MAS1
atggcgaatccatgggtgcttcatcgtgcggggctgattaatttttggtattacgacgagcagtattttcatttcgctgacggtaagctgctcttgcggggaagcaacggggcgggcaagtcggtgacgatgcaaagcttgatcccggtgcttttagacggcaagaagacgcccgatcgcctcgatccgttcggttcacgggcgcggcgcatggaagactacttgcttggggaaaaagatgtcgtcaatcgcgatgagcggaccgggtatttgtttttggaatataaacggaaagaatccgaccaatacgtcacaacgggcatcggcctgcgcgcgaagcggcaaaaaagcctcgatttctgggggtttgtcctctttgacaaccgccgcatcggctatgaccttcagttgtataaacaagaaaaaacaggtgaaaaaatcccgctgaccaagcgggagctggccacagcgctcggcgcgggcgggacggtcgtcgagacgcaaaaagactatatggagctcgtcaataagcatgtgtttcgctttgaatcgcttgaggcgtttcaagaattgatcgagctgctcattcaactgcgcagcccgaagctgtccaaagactttaagccgaccgtgatttatgaaattttggaaagctcgctgcctccgttgaccgacgacgagctccgccatttatcggacacgatcgaaaacatggaccaggcgaagcagcagcttgagcagctcgaacgcgacgagcgggcgttgaagcgtctttgcgatcaataccgcctttacaacgaatatatgatcgccgaaaaggcgacagaatacgtaaaagcggtcaagcaagctgaacagctcgctgctgcacaacaccgccttcacgatgaagaagagcaggcgcgaaagacgcttgatgagcttgatgagtccatcacccgcctccgccgtgaagaagacgtgctgcgttcacgtgaaatcgacttggctggccacgaagtgttccagcaagcggagaagtatgaacagttgaaatcggagagggagcgtctgcaggagcggtgggagcggcacgagcagacgatcgcggaaaaagaacggctggaacgccaacatcgccgccgcctcgatgaatcggaagcgcggctggatgaccttgaacggaaacttgaagacgagttggcgcagctgcgagcggatgcggaagaaggagccttttctttgcatgaaacgaacgaagacgattttcaccgccatcgccaaaagcaacaagagttttcgtttgccgcttggaaacaggaagctgaccgccatatcgagcagctcgaggagttggcgcgcctttggcgcaggcatgacgatgtgaaacgacgctatgaagaagcgagcaccgaagcgggcgagcggcggcaggaaatggacgaatggcgtcatcagcaacagaaatgggaagagctgctcgagcaggagaaagagcggtttgaacaagccgtgcttgcctgggtcgagcaaggaggaatcgacgtttccgaagcggacattcaggcgtttttgcgacaaatgggcgccctctatgagctgtattcgctcgatgatctgaagcgcccgttcgttcaagcgtattacgatgccgtcggtaagaaaaaggatgagaaatggcggctcgaacatgacatccgtctgttggaagagaaacgggcagaacgtgaggccgaactgcgtcaatggcgggaacaacgcgaccctgaacccgaacgggatgaacaaacgacagccgcccgcttggcattggaacgggaagggattccgtttgtcccgttttatgccgcggtcgaatttgtcgacgatgtgcctgacgatgtgcgcgagcggatcgaatcggcgctttcgcacgctgggttgcttgacgccctcattgcggcccgcgatgtcgacgtcgactgcgaccgtgtgctcatcccgaaaccggttcatatggtgcatacgttggccgattatttgcgcccagatgcggatgcccctgtgtcggcggagcggattgacgaagtgctccgaagcatcgtgatcaccgatgcggaacaaaaaggcggcatgacgatcgacgaaacaggacgctattcgctcggccttgtccgtggccatgcgccgcggagagcgcgggcgatgttcatcggccgtgcggcgcgggagcggtggcggcttgagaacatcgcggcgctggaagccgagatcgccgctgtgggacaagagatcgaccgtctaagcggtgagcatcaggcggtgggagcggccatccaagcgcttgccgactggtttgtgtccttcccatcggaccgcgatgtgcgcaccgcgtttgaggaagggcaagaagcccgccgccaagccgaaagcaaagaacgggaatggaagcggcaagaagaaaaagccgccctcctcgcgcgcgaatggaaacaaatcaaacaacagctccatgacgagtcggccgagcttgatttggcttttaccttggacggctgcgaacaagcccagctcgccatgaaatcgtacgtccgccatttgcacgaactcgaagtgctttaccgcgaaacgcgccataccgaggccatgatcgcccaacagcgcgagcggctcgcggcgctggaaacggagatcgacgaagcgaaaggcgaacgaaatcggattcgggatgaaaaagagcggatctccttggagatcgttgagatggaacggacgctcgcccaaatgggagcggatgacattcgcgcggaaatcgcccgcatccaagaacgattggcgtttttgcgccaagaaattccgcgccttgtcaacgaacgggcgcgcacggaacagcgcctcatgcgcttagtcgaagagcgggaaaaaggagcgcaacgggaagagttcgcctgccagctggccgccatgtgggagcggtcgtttgccgatgaagcggcgcttgggctcgtggatcttgatcgttcacgttcgcttttggagcaggccagagaagcgaaacaacggtatgaaacagtgttaaaagagacgcgttcctcgcttttggcgcggctgaacaccgtcttcttccaagagtcgtccaacttgaccgaataccgggcgacgttcgagcggctggcggaacaaaaggagtccgaatggatcgccgccgccccagacgacgagatggcgatgaaagcggccgattggcgggaaaaacaagaacggcatgtcatttatctcgactacaaaggccagcgtgccacgccgtttgccgtgctcgccgaggtggagcgcgacatcgccttgcagcacgagtatatgaaggagcaagaccgcgagctgtatgaggacgtcattttaaaatcagtcggccgcattttgcgcagccgcatccagcgcgccgagcggtgggtgagcgatatgaacaaactgatgggaggtctcgacacgtcatcagggctcgtgctgtccattcaatggaagccgaaaacggcggagacggaagcggagctggatacgaaagagttggtccgtctgttgcggatcgattcgcggctgttgaaagaggaagatttgcagcgggtgacgaaccatttccgctcgaaaatcgcccgcgcccgcgaattgcttgaggagcgcggccaaggcaacacactccatcaaattattaaagaagtgctcgactatcggaaatggtttgccttcaccttgtactatgaaaaaacaaatgagccgaaacgcgagctgacgaaccaccgtttttaccaattcagcggcggggaaaaggcgatggcgatgtacattccccttttcgccgcggcgtattcgcgctaccaagaagcgggcgatgacgccccgtacatcatctcgctcgacgaggcgttcgccggcgttgacgaaaacaacatccgcaatctgttcggccttgtcgaacagcttggctttaactatatcatgaactcgcaggcgctttggggcgactacgacaccgtgcccgctttgtccatttgcgaactcgtccgcccgcgcaatgcatcgtttgtcaccgttattcattaccgttggaacgggcgtgtcaaacagctcatggttgatgacaaagaatgggagatgatcaaaacgtga

SEQ ID NO: 50653 - DNA, 1221 bp, Geobacillus sp. MAS1
gtgagcaccgtcaaagaagcggccgcctttttccgctccgaacagggctttaagcggctgtttgtcgaaatgaaacgcaagtacgagtcgctcggccgcgtcggcggcgcggtttcgttgcagtcgttctccaaggaagagcgggagtcgatcgccgcctttttcggcaaagacgtctcccgcgtctttctctccgactttgaaaaacagctcggacagacaaggtttgcgggtgttggactcgtcgaactgctcgaacattatttcggcgtcccgcttatgtcgaacaaagaacggcgccaggcagaggcggaagagcgggagcgttttttcgcgcgccttgcagaggaacatcattggttcgcggccgtccgcggccaacgcttcgtccaaacggcgtacgaagccgaccgcggcggccttgaggccgccgtccgccttgtcggcgccgccctctgccgcctcccgctctcttcatatatgcgcctcccgctctttgcccagcaagtggccagcgacccgcacgcgttcgatttgtccactcttcctgggagattgttgttgtccgccttgcaagcgacgacaccaggccagtgggatgtggcgtccgtagagagtgtcaatgaactgttgcagtccgtcggcctgctccgcgaagatattttgaactttgtcacatgcgccaacatccttgctgaaaccgagggcggcccgcatcccgtcttctccgccgcctcggagacgaacacggcgctgaacatgccgcttagggacgttttgtcgcttgttggcgcccatcccgcccgcggcaagacggtgtacattgtggaaaacgccggtgttttttcgacgttgcttgacacccgcgccccgcttgtcagcacgaacgggcaaatgaatttggcgacgatgaagctgctcgatttgctcgcggcctctggcgccaagctgtattattccggcgacttcgatccggaaggattggccatggcagagcggctgcttgaacggtatggacaggccgtcacgctctggcgcttttccttggacgattatgcggccgccaacccagtcgttgaactcacacccgagcgcctcgccaaactcgcatccgtcacatcggaaccattgcggccggtgaaagaagccatcgggcgaaagaaaaaagccgggtatcaagaggcgatcattgggaggttgacaggggatatcaacgggtag

SEQ ID NO: 50654 - DNA, 1986 bp, Frankia sp. CcI6
gtgctggtccaggcctgccagactcggccgtcgcttcagccaccgacgaccccgcagactcccgtcttccccagcagtgtcactggtagccggtcacccgccgttcacgcggtagcatggtgggcgatactgggcggtgtgacgagcgacggacagaccgggccggcagccggcggtgatgcgccgccccggcagccgttcgcgcacctgagcgcccccaacgcggacgtctaccgggaggtgctgacgacgttcgcgcgggcgcgggaccggttcatcgtccacatgcgccccgaggacgtgatcgcggatctggggcggccggggcagaccgagtcgatcgtcgccgcgctggacaagctcgttgagtggggcaacctgcgggccgacccggacaccggccgggtgaccacggtggcggacttccaccgggcgcgctacctgtaccagctgaccccggccgggcaggcggccgaggaggcgatcgccgtctacgaggtggcgatcggccgccggggcgccctgcagtcggtggcgctggaggacatcgccgcccagctgcgcgccctggtggagatgacggccggcgacgccgccgatctcgacccggcgaaggtacacctgctgctgctggggctggcggagcggttcaccggactggccgacaacgctcaggcgttcatgacgtccctccgccgagtgatcgacttctcggacggtgacgtggacgcgttcctcgcctacaagcaacggctcatcgactacatcaaccggttcatcgccgagctggcgaaccggggcgcggagatcgccaccctgctgggtcaggtcgagggggccggcgtcgaacgcctgctgctactcgcggcccgtcgggaggcgaccgacgccgtgcccgacgtgcccgaggtatccggctccggggcatccggctccggggcatccggctccggggcatccgattccggccggaccggagccgggcgaaccgacgctgagcggattcggaccgcctacgacgccgcggtcgccgcggccctggacggctggcgcaaccgctggcgcggcctgcacgactggttcgtgtcggcggattcacgccgtccctcccaggcacggttgttgcggggcgcggctatcaccgcgatcacccagctcatcgataccgtcgccgcactcaacgagcgccgtaccggccgttcggaccggtcggcggacttccgcacgctcgctcgctggtttgccgaggctcctgacgacgcggcggcccaccggctgtggcgggccgcattcggcctggcctcggcccggcatctcaccgtcagccaggagaccgtcgccgcctggcaggaggacgagccgacaccgaacacgccgtggcaggatgcgccgccgatgcggatcagcccgcagctacgccggaccggttcctacgagcggcgcggaacgccgaaccgggtcacggaccgcgcgcggcagcggcggctgctcgccgagcaggccgcgcgggaggcggagcaggccgcgtccgctcgggcccggctcgccaccgacgggccagtgctgctgtcccagctcggcgtcctggaccggcaggcgttccggctgttcctcggcctgctcggggacgcgctcgccgccaggctggcgggcgataccgaggtggagaccacgtccagcgacggcacggtcctgatccgcctcaccctcgtccccggcgggggggtggcgcggatcgagaccgaggatggcgtcctggacggcccggaacacaccgtcgagatcgtcgacctggccggtgcggcatcgcgtccggcggcctggaacgacctgaacgacctgaacgactggagcgactcgaacgacaggaatgaccgaaaccggcaaaacgatctgaatggccggatggacggcctcgctccggtcgtactcgccggtgggccggaccggctcgagctgctggagaccggacgggtgtccggatga

SEQ ID NO: 50655 - DNA, 1269 bp, Frankia sp. CcI6; identical to SEQ ID NO: 49804

SEQ ID NO: 50656 - DNA, 4332 bp, Frankia sp. CcI6
atgagcacctcgacccgcatgcccgcgacaccggcaccggcctcgattcccgcaccggcaccggcgtcggcctcgattcccgtaccggcccgggaggaccgctggcagccgctgcgcgccggcctggtcgacctcttctactacgacgtggaagagttccacttccacgacgggcggctgctgctgcggggcaacaacggtaccggcaagtcgaaggtcctggcgctgacgctgccgttcctgctggacggcgagctggccgcgcaccgggtcgaaccggacggtgaccgcaacaagcggatggaatggaacctgctgctgggcggccggcatccgcatcccgagcggctcggctacacctggctggagttcggccggctgggcggtgacggcatccccgagtaccgcacgatcggggccggcctgaaggcggtcagcgggcgcggcatcgtccggcactggttcttcgtgacccgccagcggatcggtccgcagctgtccctggtcagcccgacccgggtgccactgaccagggacaaactgaaagaagccgtcgacggccacggcgcggtgtacgacaccgcgtcggactaccgccgtgccgtggacgaagcgctgttcggtctcggcgggcaccggtacgaggccctggtcaacctcctgatccagctacgccagccgcaactgtccaagaagcccgacgagaagctgctctcccgggcgctcaccgaggcgttgccgccgctggaccccgcgctcgtggtcatcgtggccgaggcgttccggggtctggacgaggaacgggagacgctgcgcgccctcgccgaggcggaaacggctgcgcaggcattcctgacccattaccgccggtacgcccgagtggccgcgaagcggtacgccgcgccgccgcggcaggcgcacagccgctacgagcagcacgggcgggatctcgccgaggccgacgccgcgcatcaggcggcggtcgaggccctgacggccgcgcagcaggcgctcaccgaggtggaggaggcgaaggccgcactgaccgcccggcgggacgcgctgcgggacagcccggagatgcgcgacgcggcggcgctgcggggcgccgaggaggatgccgggcggctcgcccggttcgccgcccagcgggagcgggacagccgggccgcggccgaggctgccggcgaccggaagcgccggctcacgggtgcggaacgcacggtccaggccgacgcggcgggcttcgacgccgcggtccgggccgccgggctggcggccgaggccgccctggtcaccggccggcacgccgcggtactcaccgagctggacggcggggaaccgccgtaccgcgacgcccggcgatccgccgaggccctggtcgggcagcagggcaccgccgtgaaccgtctcgacgggttgctgcgcgcggcggccgacgccggcgtggcgctgcgcgcggcccgggacgacctggaccggatcactgccgagcagcaggccgccgccgagcggatcgcggcggccgaggacctgaccgcccagcgcggggcgggcctcgtcgtggcctgcacggcctacctggccggctgcgcgtacctgcggccggccgacccggacgccgcgctggcggccctggccggctgggtggacacactcgacgggtccaacccggtcgccaccgcggtggacggggcggcgcggctggccaccgccgacctcgggcgccggcaggccgtcctcgacggcgagcagacggccgcccggcgggaactcgaacggctcgccgaggagatcgagcggctggcggccggtggccacgactcgccgccggccccgcacacccgcgacgagcacgggcgggacggccgggacggcgccccgctgtggaaggtcgtcgacttcgtcgacggcgtgcccgacgagcaccgggccggaatcgaggcggcgctggaggccgccgggatcctcgacgcctgggtcggcccggacgggcggctgcacgaccccgtcagcgacgacgttctggtcacgcccgggcggccggcgccggggggtgggctggccgcggtgctcacgccggcgatcgaccgcgacgacgcacgcgcggcccggctgagcgacaccgcggtcgccgccgtcctcgcgacgatcggcctgcgcggcgggcccggcccggccggcggctccttggtccacgggccggcggccaacgggacgacggccaacgggacgacggccaacaggacctcgggcaccgagacctgggtcaccgtggacggccggttcggtaacggggtcctgaccggcggttggcgcaaggaaaccgccggctacatcggtgagggtgcccgcgaggcggccaggcgggtccggctcgaccacctgcgcgccgatgcgacccggatcgagctacggctcgaagagctggccgcggccgccgcggagctggccgaccggcagctctcgctggccgccgagcacggggcccggccctccgacggcgacctgcgcgaggcgcacgcgcagctggccacggagcacaaggccaagcggcggatcgacgcccagcaccaggaggcggccgctgtcgcggcccgccggcagcaggccgcgggtgaggcgcgggcggcggccgaggagttcgccggcgacgtgcgcctgcccgcggagccggccgcgctggccgacgtccgggacgccctgggtgactaccgggcggagctggccgcgctgtggccggcggcggaatcgctggaccggtcccgccgcgcggcgaccgaggcggaacacgaactcaccctcgcgctggaacgccaggaacagaccgccgaggcggtcgccgaggcgcagacgcaggccgacgcggccgccgaacgtcaccgggtcctggtcgagacggccggcgccgccgtcgacgaactgttccgcaaactggccgccgtcgacaccgaactcgaccggtgcgggcagcgggagaagcaggcccgggccgccgaacgggatgcgctcgacgcccggggccgggctcacggccggcgtgagacgttgcgggaggcgatcaccaccgccgcggccgaacgcgaggcggctgtcgcgaggctccgggcgttcgcggccaccggcctgctcgcggtcgccgtcccggacctggagatcccggacccggctgccggctgggcaccgtaccccgcgatcacgctcgcccgggcggtcaacgccgccctcgacgacgtcgacgacaccgaccgccggtgggagctggcgcagcagcgggtgtcggccgagcacaaggttctcaccgacgcgctgtcccggcacggccactcggtcgggatggtcgtctccgacggcgtgatcgtggtcgacgtcctgttccagggccgcaagcaggacatcccggccctggtcgccgcgttggagacggagaccgggcagcgggcgatgctgctgtccgcgaaggaacgcgagatcctggagaaccaccttgtgaacgaggtggccggcgccctgcaggaactgatcagcgacgccgagggccaggttcgccggatcaacacggacctcgcgcagcggcccacgtcgaccggcatgcggctgcggttgcagtggcgggtcgcgcgcagcgcccccgaggggctcggcgcggtgcgcgaccggttgctgcggcagacggccgacgcctggagccccgccgagcggaccgccgtcggcgcgttcctccaggaggagatcaaccgggagcacagcgcggacaccaccggcggatgggccgagcagttgacccgtgccctggactaccgcgactggcacgagttcgctgtgcagcggttccaggacggtcagtggcggccggcgagcggtccggcgtccggtggtgagcgggtgctcgcggcgtcggtgccgctgttcgcagctgcctcgtcgttctacgactcctccggcaaccggcacgcaccccgcctggtcgccctggacgaggcgttcgccggagtggacgacgactcgcgggccaagtgcctgggtctgctcgccgcgttcgacctcgatgtggtgatgaccagcgagcgcgagtggggctgctacccgcaggttcccggcctggcgatcgcgcagctgtcccgccgggacggcatcgatgccgtgctcgtcacgccgtggcggtgggacgggcacgagcgcacccgcgtcgaccggccggtgccctaccagcccgagcggcccgaccaacccgaccagccccagctactcgaccagcccgaccaacccgaccagccccagccgctccgtccggcgcagagcggcaacaccgagcccctgccgttcgagtga

SEQ ID NO: 50657 - DNA, 1305 bp, Frankia sp. CcI6; identical to SEQ ID NO: 49806

SEQ ID NO: 50658 - DNA, 1566 bp, Brevibacillus panacihumi W25
atggagaaaacaagatcgattcgtacctataaagccgtcacagaagccaagtacctgtccgtagaaaacgcacagcgctatcgggccatcttgcgctatttctatgaagagcaacagagactgcgttactggttaagaccggaagaaatccttcaagcggtcaaagaaagaatagagcccagcgatgcttcttcttacaacgaagatttactacagctggatttgcaacaattgcatgattggggcaatttgcaacggaagcagtccggaaaggtgaataaaatcgaggattttaagaaaaagcggtatcgttatcaggcgaccccttacacgatcaagtttgagcgtttgattgaggatttggaggagatgggggatgcgtacggcggctccctggaggtcacccaatttgaaaagctggtagaaacgcttcgctggctgacaagactggcccgtgtctctttccatcgaccaggtgagcgcccaaggtacgagatggaagattggagcaacgaaaagctttatgattggtggacggaattgtatgagcagtttcgtaaggtgaccaacaatgcaagagattatatggcgagcctagacagcgtacaggtagaagatgcgatgatgaccgaacaattcctcctgtacaaggacaaggtgacagactatttgaggcggttcatgatggggctgcagcgcagttcatatcagattgaagggctgctggtacaggtagaccgcagactgttgcaagatctcttgcaccgggtagcaagctacgaggtttcgatccctcgcttcgaacagacggcttggactaaggaagactatacagcacgtttttttgagcagtgggaagggatttggcactggttcttgggagacggaagcggtcggggcagtgatctagaagatctgcagcgcgaaacaaacgaggcgatacgcagaatagcgcgctatgcgcagcgaatgggagagcggcaatccagtatgcgaagccgcagagcggactatctgtatctcgccaaatggtttgcatcccatgaagaagtggagccggcccattgtttgtccgcagccgtattcgggatcacggagatgcaccatttctgggtggaaggaccgaagtcaacggaggacatttactgcgaaatttgggacatgccagcatccgactatgacgtgaagccgcgcatcaatggttatcgggagaggacaagaccgagcaagattgatacaaaagatgagcagaaagaagccatgctcgccgcctacttgcaacagaaagcacagcggcagagcagattgaacgaattatttgccgcagatcgggtaagtttgcgggatttgccaatcgtggagccctttgtgcggcaaaccttgctcggatggatcggaaaaagcatggcgtcaccggcacgagaaggaaaaacagatgacggcagaagatttaggctgacggagatggggactggggagcgaatcagactgcagtgtaccgatggcgtattggaattgccggatttcgtgttgtactttctggatgaaagcaaggtgaagagatga

SEQ ID NO: 50659 - DNA, 1224 bp, Brevibacillus panacihumi W25
atgagtgaacagcaggctactgataccaggtatacatcccgatttgatgatttggcaagacaagcggcctgggaactgctaagaaggctatggatcccgagaagcgatattcttgtttaccaggcagttcgcgaccgtgagatggtgctgcgttcctttttcaatgaaaaactgggctttcgccttttaatccactacgaatttgtcaagctggagaagtttgtaagcagaggaatccgcccgtggatggggttgcctggcttgctggaagtgcgcgactacgtgtttttttgcttgttgatggcgtttttagagacgaagagcgtagatgatcaattcctgctctcagacatatgtgaggaggtcaaagcatcctatccggggcaagatgttgtcgactggacaagctacgaacaacgtaaatcactggttcgggtcttgcagctcgctcgggaatgggagctactcgtagtcgtagacggtgacgatttagggtttacagcttcagagcaagcggatgtgctttatgaagccaccccgttggtcaaatactttttgcgagcgtatccgcgcgatctgatgcagtttgagacagctgaggatttcatgcggatagtggagtcagaaaacgaaacgctggcccgcaggcaccgcgtgtacaggcaacttctgcttaccccgggagttcgggaggaagagctggacgacggagattggacgtatctgcggaatcagcgaaacgtgattgcccgtgactttgatgagacagtatccatgtcgttggaactctacggacatgatgccatgctggtgcactatggaagaagccaaagcttaaccttgtatccagatgcgagagcgattagcgatgtcgtctacttttttgccagagcagtacgcggtcaaatcgatatgggagaactgcagcgtcaaaaggacggctgtattctgctcacgcccgtcgatttcgggaaccttctcgttcaatgtcgtaccgactttggggatggttgggggaaagcgttgcgggacctgtctgacaaacagctggccaaactcttactggaagagatggaggcgtggggattggtgcagcgtcatgaacaggaggaactcattcgggtcatgccgcgactgggtagaatcatggcccgttacccgaaggattacgagaaaaagttgaaaaatgaaggcggtggtggaacagatggagacacagaataa

SEQ ID NO: 50660 - DNA, 4287 bp, Brevibacillus panacihumi W25
atgaaggcggtggtggaacagatggagacacagaataagatcaatagatggcagttgtccagagcgggtctggtcaatttctggtactacggcgatgaaagctttgattttgcggacgggaaactgttgcttcgcggaacgaacggttccggaaaatcggttacgatgcaaagcttgcttcctgtcgtactggatgggaagaaaagcccggatcggctggatccctttggctccaaggcgcggcgcatggaagattaccttttgggagaaaaagaggtcactggtcgggatgaacgcaccggttatctttatctggaattttgcaaaccgtacaccgcgcaatttctgaccataggcatcggcctgcgggcaaaacgaaacgcacaaatggacttctggggattttccatccaggacaaccgaaggatcgggaaggatttctatctgtaccggaatgtgtataatgccgagacgcaggagcaggagcgaatccctttagcgaagagagaattagagcgcgagatcagtcagggaggcagagtggtgttttcccagagcgattacgcggagatggtgaacaagttgctgttcggattctcttcggcagacagctatgaagatttgatcaaattgctgattcaactgcgcagtcccaaattgtccaaggatttcaaaccgacagtcatctacaacatcctggaaaattctctgcctggcttgtctgatgaagagctgaggccgttgtcagatgcgattgagtccatggatcgcaccaagctccagctggaacaattggagcgagatcacaagtcattggcgcggattgccaaggactacaccgagtataaccgctttatctggtttgacaaggcgaagggactggcagatgctgtacaggctgcacgttccgcacaaaggaaagcccaggagtatcgccagcttctcgtgcgtgaagaagaagaactgaccaggctgcaatccgaacaagaagcacttgcgttggagcagttgactctgacagcggaacacgatcgtctgaaagagaatgattttgccaaagctgaagcggaacaggtcgaagtggatggccagctgaagagggaagaatcacggctgactgccaaaaggaaagagtccgatgtcaagcgggagaaggtcagccagctccaccggacaatagatgacatccagctgaaaatgaagcaggccgatgccgatatggctgatttgctggagagtatggaggatgctgtcggggagaacgaatttccggtacatgaagtagctcgcggcgagtttgaacgggcgcaagcgggctactcgatggaactttggcaaaaagagtcccggcagtatcgcgatcagctgcagcaaacgctggatcaggctgtcaaaacggcagaagcggaacgaaatcgtctggaagcggaacgcgcgctgggagacgcccaaaaaatggtggatgagttgcagcgtgaacaagataagtgggaacgtgtcgtagaagaagaaaaggatgggctcattgccaacttacatcagtggcaaggtgaggcgcaggagttaaagctgtctgttgaggctgttagagaaaccattcggcgcattaccaagtttgaagcttcggatcgttacgaaatagtcagggaaccgctgaaccaatcctatcagcttttccggcaaaagattcgggatcagctcgcggatctgggaaggaaagtcgaggatacaaagctggaccgtcaaaaggcagaggctgaactccacatctggctggcgaaaaaagagcctgaaccgccgcgtcatgaacagacagaggtggcgagaacgtggctgacaaaccaaggcatcccctatgtgcctttgtacgaagcggtcgaataccgtccggaggtgcctgaagaaacgagggccgcgattgagtccgccttgaaggaagcggggctcctggatgcgctgatcattccgcatacctatctggatcgtcttgatgtgtgggcggatcagatcaaagacagggtgattgtacctgagccgcaactgtttgcccacaccatcagcgaatggttgacgccttctccagtggaggggctgggtgtaggcaaagaagatatcgaagcagtcctgcagactgtaatgacagaaaaagcaggcgggtcatccgtagctgcttatgtcactgcgagcgggacttatggtatgagtgtattgagcggtaatgctcctgttatcgaaaaatcagtgtttgtaggaagggaggcacggcgcagatatcgcgacgaacagctggcattctggaggaaaaagatagaagaatttgatctggagctggaacgtctgggaaaagatgtgcaaggaatggagaaccgcttggacctccttgggcaggaatatcagcagttcccgtcgggccatgaccttctatcggctttgcaggctgtcgaacagatccggcagcgtctggtgatctggcaagaagaagtgcagaaccgcaatcgaaaagttcgtgctgccgtggaaacgctgtaccgggagcgggaaaagctgaagcaaggcgcagacggattgaccattccgctggacgaagatatacttcgtcaggcacttcgctccatgcaggattatctggaagacctgcgtcaattggagacggcttaccgcgagaaactgaatttgactgatcggcttcgtgtcacggaagggctgcatgaagatgcgatctatgactgggatcggctgcgcggcgaagaaaatgaactgcaaatgggtgtagaacagctgaaccagcgccttcagtcgatcgatcggatgctagcttctcagggagcagaggagattcgtgcaagaattcgttactgcaaggaaaggttgagagaacttcctgaattgatgacagccacggctggagcgataggaaacgccagggcgaaatgtgagcaatacaaggagaatcaagtggaggccgacaaaatggccgaggttcgtcaacatttgcagacggcctggtggaaagtattttccgatgaatacgccttaggcctttggcgttacctggatttattccaggaggaagctgccgcagaaggcgtgcagcaccagctcgatgatttcgcgattcgcgtggtaaaaaagcttcagccggcgatggcggaacgggagagggagtattataacaatcaactgcagagaacgtttgaaaatgaacgacagattcatttgctggagtatcagccgacacttgattacgtgcatgaatacaagggagaagcggctggggagcaacatgccgaagtataccagttgacacatctctggaaagagctgaagaccagatcaagacggagaacgattttgctggagtacgaaggcaagcgatgccatccctatgatttgcaggaaaaactggaacacgagattcagatgcatcgcctgtatctgacagcagaggatcgcaaaattttcgaggaagtgatcctgcaaagcgttggacgtgtgattaaacatcgcatccatcgggcggaaaaatgggtcgagcggatgaatgaattgatgtcccagcgtaatagttcgagcggacttaccttctcattgaagtggcttcctcgggcagcggaaaatgagttgcaaatggataccgccgatttggtggaattcctacgcaaggaccctgccttgatgagggagcaggatatcgagcgcatcaccaaccatttccgctcccatatcgacagggccaagcgggatatcagcggggccgcagagggcagcggagaaaccctgcatcagattatgaaaagaatcctggactaccgtcattggtttacgtttaagcttttccacaaacgcgaaggagagccgaacaaagagctcacagaccgccttttctttacctttagtggtggcgagaaagcgatggcaatgtatataccgctcctgtctgcagcgtactctcgatacttggaagcagattcgcttgcaccgcggatcatctctctcgatgaggcctttgcgggagtggatgagaataacatccgggacatgtttgagcttgtggaacaattgggtttcaactacatcatgaattcacaggctttgtggggagattacgacacggtctctcgcctggccatctgtgaattgattcgtcccaaaaatgcggacgtcgtcgcagtcgcccgatatttgtgggagggcggcacgttgcatgtgatgaacgaagaatggacggattggggagattccgaggttgcagtcagcctggaggaagatactgatgacgaagaatga

SEQ ID NO: 50661 - DNA, 1389 bp, Brevibacillus panacihumi W25
atgacgaagaatgaggaccggcagcttcgtcatcaggcagacagctattttcgctcccgatcgcaaggctatgaccgcctgttcaagggattgcttcggaagtatcgcagtctcggtcattttggcgggaagctgacgttgccccgactgtcactggaagaagcggatgttttgacaggtctgctgaacaagcgttttgatccgggatcagacggaatcatacgggtctcagatgtggaaagcggatttgcgaaaacaaaatatgcgcagcttgacttgctttccatcctagagggatatttcggggaaccgattgtcagcaaaaaagaggagcagcttttgcaggaacgtgagtgggacctgttttgggcagacttgctggagaccgtcgcagaagagccttgttcaaaggcgcaaggctggatacaggcgctagccaaacatcagggcacgggcgctctggcagtcagccagtggtggagtgcatctgcggaagaacttcgggaagctttgctgacagtcgtacgagctgtccgccatcttgatcggatggcggacggcgaatatatccgtctggctgtgttggcgacacaagtgacgggtaatccgcacggtttcgatatgcaaacacagttaggaaaattgctgctttatgcaatttgttatatattggaaaaggttggcccatccaatgcggaagaaatgacgcaaattttgtacgaatgtcagattctcagagatgatctgtcttcacaggtcgctattagcggaattgtggggcaaaacacgagggggcgtgggtatctcggaagcgaaaaggaggtctacggcctgccacttcgcacggtagtcaaatatgcaggatttgaaccgtatttgatggagggtggggtgaagcgggtttggattgtagaaaatcccgctgtgttctcctcgattttggatcgttgggagcatgattatccggaagaggctctgccgccattggtctgttcctcgggccagttttccctggcggtgctcgccttgtgtgaccgcctggcagcagctggatgccagatgttctactctggcgattatgaccccgagggttttcaaatggctatacgcttgtggcgccgttatggagacgaacatgtggcgttctggcgataccaggaagaggattatacatcgaaggtgcaagaaatcccgatcgaagagagaagatggaatcagctgcggaagcttgtcgaggacgaagggagcagggacttgcctgccgatctggtaaaaaccatgcaaacggcactgcgggagtataaaccagtatatcaggaggcgttgctggataatctctacctggacatcaagacggcgttggtgacgagaatagttgagagagcgtag

SEQ ID NO: 50662 - DNA, 1557 bp, Streptomyces albulus PD-1
atgcgcagggttccgccggagatgttccggttcaccatcggagagaaggccgacctgaacggagccgtcctcgaggccttcggcgtggctggcgagcacctggaaaccgccctcgggctcgacggcgtacgcgagcaactgcgggcggtgggctgggtcgcggacctcgccgacgaggagctgtacgacgcgctgaaacggcttgtcgggtgggggctcctcgacgtggtccacaaccacgccgagcactaccgcacggctgaggagtacgagcggcgcaacctccactactcgctgacccgccggggcgaggccgcgctggccggcgtgcggcacgccctggaggtcctcgcctcgacaggtgccctgcagaccgcggtgcttgaggcgatcaccgaccggctcgacgaactgaccgtgctgtccggtgaacccgccacggctgaccggcgcatcctcagcacgctgcgggagctggagggccatctggaggcactggtggagaacaccaaggcgttcaacggccagttgcaacgactcctccgagccgagggtgcggatctggacgtcttccgcgaggtcaaggccgccaccgtcacctatctccaggagttcctggtcaacctcgaccggcgcggcgaggcggtcgccgaggccgtgggacgcgtcgaggagcggggcatcgccgtcctgcgcgagcgggccctgcgcggcgccgagctgccaccggtgccgggggaggatcccgcagccgggtggctggagagccgtcgggcgcgctgggcgggactacgggcctggttcttgccggacgacgggacacacccccggatcgagcagctgcacgacattgcccggcgcgccatcgtctccctcctgcaggtactggagcggatcaacgagtcccggcgccgctcctccagcgccgtgcaggacttccgggagctggcccgctggttcgcggcggcttccgaggaggacgatctgcaccgcctgtggtccgccgccttcggtctgggctcggcacgccacgcccatctcgcccacccggacccggagctgatcccctcgtcccggtcctggtccgaggcgccgccggtggaggtgtcggcgctgctgcggaccagcggacggacggagcgcttcacccggaccggcaaagtgagggacgtggaggccgtgcgggccgagcgcgctgagcgggcccgtgcgcagcgggccgaactcgcccgagcctggcaggcgctggagctggacggccccgtgcggctctcctccttcggcaccctggatcccgccgtcttcgaccgcctcctcgacctgctgggccgggctctcgccaccgccccggacgcgagcggtctgtggcgtgcgacgagcggcgacggccgggtagagatcgtgctggcgccgccccccgacacccggaccgccgtactgcacaccgagaaggggacgctcgcagggcccgactacgtcgtccacgtcgtcgccgcgggcggaacggccgcgttcccggcaccccacaccgccacgcgtcaggaggccgccggatga

SEQ ID NO: 50663 - DNA, 1314 bp, Streptomyces albulus PD-1; identical to SEQ ID NO: 50485

SEQ ID NO: 50664 - DNA, 4158 bp, Streptomyces albulus PD-1; identical to SEQ ID NO: 50486

SEQ ID NO: 50665 - DNA, 1362 bp, Streptomyces albulus PD-1; identical to SEQ ID NO: 50487

SEQ ID NO: 50666 - DNA, 1533 bp, Mycobacterium avium subsp. hominissuis 10-5606
atgaagcttggcgacacatcggtcgccgagctccccgacgatgcccgccgcgccctgacctatcttgtggtgcccgaatccgatgagtacatcgcgattatggcggtgctggaatcctcaccgtcggatttgacccccgccgaggtcaccgcggcgttacgtgaccgcggcaccgatctggacgcccgggtcgtggaggttcggctggaaaagctgcgggagtgggctgtggtgtcggcgcgctcggatcaaacgcacgtgcgccgtgtccaggacctgctgcggcggaacttccgctacaccgcgacccgacacggccggcaggttcaacggttctacgagacggtgttggcggataccacggtgatgcgcgaaattccgctgcaatccctcaacgcggtcgtctccgcgctggaggcgctggctggcgccgatgcaccgccggatcaacagtgggcgcgagcgcgggtgaacgaggtgttcatcgcccaagacaacctggatgcgtcgctggtcggcgcggaagacaccctcatgggcttggctgaccgattcgatctcgatgatgcacacactgccgagctgaagtcgctgctcgtcaactacgcccgacgggtggcaatcgaattggaccgtggctccgaccgcgcggcgattgcgctgcgggcactgactccgcgtttcaccgagctggcgcagctcaccattgaagggtctgccgcctctgatctgatcgggagggatttgctcgcggcatctaaaggcggcgatgtgcgcgactggcatggcctagtcgcatggttcgatccgatgtctggtcgcgcagcacggttccagtcgcggatggtgatggcgatcccgacatttcacgccaatctgcgacggttgcacaccgccggcgagtccggcacgtctcgcgcccgcgccctgcttttggcccgcggctgcctgcatccgcacttcggtccgcaacttttccttgccgccctcggcgatcacccctggcgcaaacttcacggcgaagctgacgatccgggagccgggcgcacgccgccctggcgtgatgggcctcaagtgccggtgcctcccgggctccgcacacacggtagagcaggggttcgcggtcgcgctccagcaccaattgacgacggccctgcgcgcgcagcggtcgcgagcgagcgtcagcgacgcctggcgcttcaccgtcagcacttgcgcgagatcctttccaccgcacccggatcaacgttgtcggatggcgctgctcgggtggcattcgcggccctgcgggcggcgttgcgccaaacgcccagccgtggtcgtcgacgtgctaccaaagacgggttggcttgcaccgtgttttggaccaaaaccacaacggggttattgcgagcaccccggtggcgagtgtggctacccgggcgggagttcgtgttccattctcctgcagaacaacccagccacccccatgctgtgggggccgatccgggcggttctgcggaaatccgcctcgagggggcggtggtggcgtga

SEQ ID NO: 50667 - DNA, 1236 bp, Mycobacterium avium subsp. hominissuis 10-5606
gtgacgaagccgcatacggcccggctggcgatcgcgcccgacgcggagacagaagtggccaccgcgttgcggctgttagcccgtcaaccatggttgatcgccggccgcgacgatgcggccatcagcgctgttcgccgcaacctcatcggaatgcgctcagtgcttaacagactgggctggcggctgattgtgcaacgcgacgtggttcgcctcgaaaagtcaccgccgacgcgtgcgcgcctagccgattgggcagtgcaggcccccaatccgctcacctgctcgtgggtgttcctacttgccgcggccgcggaaagtctgccgcaccaggtcactatcggccaactcgttgaagccggcaaagccgccgcggccgaagccagcatccctcttaccgccagccgcgccgaacgacgcgcaatcacccgcgccgttcacgaactggccgatcgcggagtcatcgaggaaaccgacggtcagatcgactcctacctcaacgacgacaacgcaccggttcttctgaccatcttccacacccgactgctgcacctgatcgccaacttcgacccaaccaccgacccgtcactggacccggggcgctggctggacaatgttgcgcgtgaacccgacgtcggccggcggatgcggcgccgactcgtcgatgacacctgcgtgcataccatcgatctcgacgaggcggagtccgactggttgtcgcgacgcctgcgtagtgatgatggcgcaccattagcggccgcgttcggtttggcgatcgaacggcgcgccgaaggtgccgcgtttgttgttcccgacgacgcgtttcgctggcctagtgagctcgggcaagtcccgtttccggccgctgggatcatcccccacgtggccatgttgctggcggatcacattgcgatcaaaggacaaactggggggccgggtcccggatggcgcggcatgccgcgcgtagcagtcctcgctgaattgacccgccttgccgagcaacaaaccaccggcaaaggcggttggcccgccgagcgggccgctgaccccgccggcttgctcaccgacgtgcagcagttgctgaccggcgtcgggctactgcggatcgtcgactgctgctggtggttgtcacccgtcatgggccgctgggaaccacccccaaccgcaccagccccaacgccagaccgtgaattcggcacaaagtatcgaccagaaccttgcggtggagaacccagatga

SEQ ID NO: 50668 - DNA, 2727 bp, Mycobacterium avium subsp. hominissuis 10-5606
atggcgatcgccagcgaccacgaaacccggcagacgaacgccgagctcatggtcaggcaacatcgcagaaccgttgcgcccgtccagcaggatgcctcgcacaagtcgcagcaggccgaccaggccgaccagcacgcagacaacgctgcccacgagcgtgaccgcaagaccgaacgagccctcgacgccgcatcgactgctgtgcaggagatctcacgctgggcttcggccaacgccgacctgacggccaccccggagtcggatgcgctcgatgccgacaccatcacccagaccgccgccgcaggtcctgccgcgctgctgggctcggcatcagattggaaggactcagcgcgcaacattgcggccaaaaccgccgccgaactacggcaaaccgccaaagcctatggacagcaggcggatacgaagcacgccgcggctaccgatgcccgccaccgcgccgaggaactgcgcgccggtcggatgatcccgcccccgcggccgccatgggccggcgatgccgacgaagacgcgttcgcttacgccctgcaatggaaaaccggcaccgataggcgactccaggcgctggttgaatccgcgctggaatccgcaggtcttctcggcgcgactctcaccgaggatggcggctgggctcacccctgggctgtgaccgcgaccacaccgcgcgctgcccacagcctgaccacactcatcgaggccgattcacagcaccggctcgccgcagcggcgactgatgtccttgaacgcattacactggtggacaccgcctctgcggctctttcagatgtccccgctgtcattggaaccgatggaagcttccggttcggtgtgatctgcggacgggcccccggcgccgatgattccgccacgcttcccgagccgagccacatcggggccgcacaacggcgcgccgccgcattggcggaagccgaaaggctcgacgacaccgccgatcatctcgacagcgaagccgcagccctagagcaggcggccgaggagctgcgtgaccacgcgacccgaacacaggcgcgggccgagtccttcccgagcctcaaggaactcgcgaaggcagaacaagaccgcagcgccgctgcgcggtgggccgagcagcagcgcgccgtcgccgataaggccgccgcggaagctgaaaccgcccgccggcaggccaacacggtcgccgagcagtggcgcactcaggccaaatcgatgggcctatcaaccgaccccgacgaggtcgccgccacagcagaatcggaagcccgcatcaccaccgggcttcgtaacgcggccgcggcgctaagcgcccagcagtcaaccctgctgagcctgcgcacccgcgccgacagccatgccagcgaccgcgcggccctgactgccctgcatgccgccgcaacaaccgctcatgctgccgcgcggaaagccaggctggtctacgagcggatgcagggcgcacacggcaaggccgccgctgaactctccgcgcgtctcacggcggcgcgtgcgcgcgccaaagaaacccaggaattggtcggtgcggcggttgtactcaaagacgaagcgcttgtagaagaggcaaagcttgagcaggccgccgccgacgcgatcgaaaatgccgcggccaaacaaccggccgctagcgcggcgctggccgagctacgaggcctgctggccgtgcaggacgtcgccgaagtcgtgctgcgcgacgcccaacactccagcagcgacgcgttgatcgcacaagtcactgccgccgtcgaaggaaaaaccaagtggggcaagaaaaaagtcgccgacacttacgagaccgcgcgcgccgagcttcgcatgtgggccgtggaccgcactgaaggtcacggcgatctcgacacgtaccaatgcacctacgatggcatcgcctacacaccgtgtgcagccgctgccctggcacgcaggctggccgaccgcgccggcgagcaactccacgaggccgaagaggctgcgctgcgcgacttcatcgtcgggcggctacccagcgcgatcggcatcgcctacaccgagctgctggactgggtcgattcagtgaacaccaagatggaatcggcgtcggcgtcctccggcgtcggggtgcgagtgaaggtcagcctgcgcgatgacctcaaccctaaccgacgcaccgtctaccacctggcgtgtaagaaatccgcggcgactcgaacacccgagcaggacgccgagttggcggcggcgctcaagagcctgctagatgcggccgacggcgaaaccgacaccgaaaaggtcaagcaagcagtcgacatccgtgactgggtacgcgttgactacttcgtgcaccgacccggtcaagagcctaaacgctggacacgcaacaccggattgtcgggaggcgaacgccgcctggtgatcctggccccgatgatcgcgtcgatcgccgcgctctacgacaacctgcccgacacagcgctgcgccttgccgcactcgacgaggtgcctgccgaggtcgatgacaccgggcgggaaggcctggcccgctacatcgccgagctcgacctcgacgtcatctgcacctcttatctgtgggaaggcgcccccggtgcatgggacggcgtggacggtcacgacctggaggctggccccgacggtgtggtcgtcgcattcccgatgctggtgcgcgggattgagcccctgcccggggatccagacgaatctccatga

SEQ ID NO: 50669 - DNA, 387 bp, Mycobacterium avium subsp. hominissuis 10-5606
atggtggcccgaaaccccgactgcgccaacccgatacggctggtgtgcacgatgggcaatccctcgcagaccgagatcgcggccattgcaggccttgccgcggctcgctggaacatcgccgtgcgcgccgacttcgaccctgccggcattcgtaccgtgaccgctattctcaacgccgtcccgacagccaaaccctggcgcatgacggccaccgactacgccacatccgggcccaccgccccgatccgcgagctggtccctcccacaccatgggagcccgagctcgcggaacagatcagcgccaccggctgcgtggcattcgaagaagcgctcatggagcacctgctggacgatctacggcgaggcgctccgcctaccgcatcttga

SEQ ID NO: 50670 - DNA, 1533 bp, Mycobacterium avium 09-5983; identical to SEQ ID NO: 50666

SEQ ID NO: 50671 - DNA, 1236 bp, Mycobacterium avium 09-5983; identical to SEQ ID NO: 50667

SEQ ID NO: 50672 - DNA, 4437 bp, Mycobacterium avium 09-5983
gtgggcgccgggctgtcgaacgtctggcgctacggtgacttggtgctgtcggccccgtccgggcgcctactcctgcttggccccaacggcaccggcaagaccacagcgctggaagcgctgtggccgttcctactggacttagacaaagcgaagctgcgcgccggcacatcgcgcaccactacgctcacctcgctcatgcgtgaaggcagcaccgacaggaagcggatcggatacgcgtggttgacgttcgccggacccggcgaccaagctgtgcactcctacggcgcccgacttgtgttttctgatggatcaacgccgaacgtaaagatcgagccgttcaccattcccggtgagcccattaaagatatgccgttgaccggccccgggcccggtcggccggcgatcaccaccgctgaggccttccgcgagcaggtcgaggccacgggaggaaccgtattcaaggacgaagaggactacctcaacgcgttggccaaccatgtattcagcaccgccagaagggatttaatcgccctggcagaccgcatccggaaggtccgcaaccccagcctgctcgctggcaccagccccgatcacgccgctcagtcccttcgcgaagccctgcccggcgtatcaaacgacgtcattgaagccaccggcgaagcgctggccgcaacgaatgaaacccgcctagctttccagcgcgacgtcgaagccgctgcgacgctggatactttcgctgaagtttggtccggccacgccgccgaggtggccggcaagctggcggcggccgcggcctgcgcacgcgatgtgtatgacaacgcccgccaggccgcagatcgatttcagggccgccaccgcgatgccgttaccgcacgcgagcgggccgaggctgacctcagagtcgccgagcaggaccacgacaacgcagtcgccgaagtggagtcgatcgagaaatcccccgcctacacaacgcttgaacgactcgccgacctcgccaacacctccgacgcccgcgacagcgaggcccaagccaaggtcgacaacctccaccaccgggtccgcacactccgccgtgacggtgcacacctcgccactgacgcccaccagctcgccgcggccgtgacggacataaccgccgccgccgccaattacgacccgcacacggccgcgaccgcacccacagtggtggtcagcacccgctcccacgcgatcttgaccgtcggcgaagacgccttcgaccctgggccgccgctggagttgagcatcgatcctgagcagctcgacgcggcggcccagtcctggatggcgatcgccagcgaccacgaaacccggcagacgaacgccgagctcatggtcaggcaacatcgcagaaccgttgcgcccgtccagcaggatgcctcgcacaagtcgcagcaggccgaccaggccgaccagcacgcagacaacgctgcccacgagcgtgaccgcaagaccgaacgagccctcgacgccgcatcgactgctgtgcaggagatctcacgctgggcttcggccaacgccgacctgacggccaccccggagtcggatgcgctcgatgccgacaccatcacccagaccgccgccgcaggtcctgccgcgctgctgggctcggcatcagattggaaggactcagcgcgcaacattgcggccaaaaccgccgccgaactacggcaaaccgccaaagcctatggacagcaggcggatacgaagcacgccgcggctaccgatgcccgccaccgcgccgaggaactgcgcgccggtcggatgatcccgcccccgcggccgccatgggccggcgatgccgacgaagacgcgttcgcttacgccctgcaatggaaaaccggcaccgataggcgactccaggcgctggttgaatccgcgctggaatccgcaggtcttctcggcgcgactctcaccgaggatggcggctgggctcacccctgggctgtgaccgcgaccacaccgcgcgctgcccacagcctgaccacactcatcgaggccgattcacagcaccggctcgccgcagcggcgactgatgtccttgaacgcattacactggtggacaccgcctctgcggctctttcagatgtccccgctgtcattggaaccgatggaagcttccggttcggtgtgatctgcggacgggcccccggcgccgatgattccgccacgcttcccgagccgagccacatcggggccgcacaacggcgcgccgccgcattggcggaagccgaaaggctcgacgacaccgccgatcatctcgacagcgaagccgcagccctagagcaggcggccgaggagctgcgtgaccacgcgacccgaacacaggcgcgggccgagtccttcccgagcctcaaggaactcgcgaaggcagaacaagaccgcagcgccgctgcgcggtgggccgagcagcagcgcgccgtcgccgataaggccgccgcggaagctgaaaccgcccgccggcaggccaacacggtcgccgagcagtggcgcactcaggccaaatcgatgggcctatcaaccgaccccgacgaggtcgccgccacagcagaatcggaagcccgcatcaccaccgggcttcgtaacgcggccgcggcgctaagcgcccagcagtcaaccctgctgagcctgcgcacccgcgccgacagccatgccagcgaccgcgcggccctgactgccctgcatgccgccgcaacaaccgctcatgctgccgcgcggaaagccaggctggtctacgagcggatgcagggcgcacacggcaaggccgccgctgaactctccgcgcgtctcacggcggcgcgtgcgcgcgccaaagaaacccaggaattggtcggtgcggcggttgtactcaaagacgaagcgcttgtagaagaggcaaagcttgagcaggccgccgccgacgcgatcgaaaatgccgcggccaaacaaccggccgctagcgcggcgctggccgagctacgaggcctgctggccgtgcaggacgtcgccgaagtcgtgctgcgcgacgcccaacactccagcagcgacgcgttgatcgcacaagtcactgccgccgtcgaaggaaaaaccaagtggggcaagaaaaaagtcgccgacacttacgagaccgcgcgcgccgagcttcgcatgtgggccgtggaccgcactgaaggtcacggcgatctcgacacgtaccaatgcacctacgatggcatcgcctacacaccgtgtgcagccgctgccctggcacgcaggctggccgaccgcgccggcgagcaactccacgaggccgaagaggctgcgctgcgcgacttcatcgtcgggcggctacccagcgcgatcggcatcgcctacaccgagctgctggactgggtcgattcagtgaacaccaagatggaatcggcgtcggcgtcctccggcgtcggggtgcgagtgaaggtcagcctgcgcgatgacctcaaccctaaccgacgcaccgtctaccacctggcgtgtaagaaatccgcggcgactcgaacacccgagcaggacgccgagttggcggcggcgctcaagagcctgctagatgcggccgacggcgaaaccgacaccgaaaaggtcaagcaagcagtcgacatccgtgactgggtacgcgttgactacttcgtgcaccgacccggtcaagagcctaaacgctggacacgcaacaccggattgtcgggaggcgaacgccgcctggtgatcctggccccgatgatcgcgtcgatcgccgcgctctacgacaacctgcccgacacagcgctgcgccttgccgcactcgacgaggtgcctgccgaggtcgatgacaccgggcgggaaggcctggcccgctacatcgccgagctcgacctcgacgtcatctgcacctcttatctgtgggaaggcgccccggtgcatgggacggcgtggacggtcacgacctggaggctggccccgacggtgtggtcgtcgcattcccgatgctggtgcgcgggattgagcccctgcccggggatccagacgaatctccatgaccgtcaaggcctgccacctttgcgatggctcgtgtgctcacgccgacctgaccatgctgctttcgcccgatcttggttggctgtgggcggccgtcgccgcggccgccgatcgtcgcggcgacccccacttggtcaccgggccggccattaccgtcgatgcgcccgtcaacccgtcgcagcgtgcggcagccgctgggcttgttcgcggagctctgcgacctggccgcaggttgcgcatcgaactcgatgtgttgaccgaacaggtgcgcgcacgcggccctaccctcacgccgggtgccgtcgcagcgcacgccacgggcagaactcttgccacccgcgcggcagatcgcagtcaacaacatgccagagcgcaacggctgtccgcatgcctggacgcggcctgcaatag

SEQ ID NO: 50673 - DNA, 387 bp, Mycobacterium avium 09-5983; identical to SEQ ID NO: 50669

SEQ ID NO: 50674 - DNA, 1491 bp, Ruminococcus gnavus CC55_001C; identical to SEQ ID NO: 50184

SEQ ID NO: 50675 - DNA, 1146 bp, Ruminococcus gnavus CC55_001C; identical to SEQ ID NO: 50185

SEQ ID NO: 50676 - DNA, 4092 bp, Ruminococcus gnavus CC55_001C; identical to SEQ ID NO: 50186

SEQ ID NO: 50677 - DNA, 1320 bp, Ruminococcus gnavus CC55_001C; identical to SEQ ID NO: 50187

SEQ ID NO: 50678 - DNA, 1488 bp, Bacillus vireti LMG 21834
atggattcaacaatgaaaaaaataatagaggccagttatttaacagccgactccgcggcacactatcgaacgattcttcgctatttttatcaccagcacgaaagaatgagagattttattgcaccggaagagttattggaacatatgcgttcgatacctgccttcgcggactttcaagaggaccagctccaccagcaattagcgcagcttgtaaaatggaataatttaattgccaggcaggatatgacaaacgcaaaaacaattgaagaatataaaaagaaacggttccgttatcaatgtacaccctacacggttgagattgagagaatgattgtgcaactagaaaaattaggagatacgttccaagggtcgttagaacgctcccaatttgatcgccttttccaagcaataaccagccttcaaaatgaactagagaatgacctaaacaaatcggcagaagaatatatgcggatttgggaggacgtatttcgctattttcaaacgattcgtaccagcactgctgattatattgcttatattaatagtgaacaaaccgatcaacgaatgcaaacagaggcatttctagtctataaaaatcagtttacaacatatttgcgagattttattgtatccttgcaaaaaacatcgctgcaaatccagcattcattatcagaattaaccttggaacggttacagcatttttttcaaaaattaatcgagcatcgcggggcaattccccgtcttgaggatgtttcgtcatctacaaacgattggcttactgaatatgaggaatattggttttcattacggcagtggtttttagggtcggctgttcagcaaagtgaactagatatccttcagtggcagaccaatgaaatgattcgccggatgacaagatacgttcagcgcatcggtgaaaggcagcagcattttcgcagccgaaaaaaggactatctgcaattatcaaaatggtttgttgaatgcagggatagtgaggaagctcataaactttcagcagttgtattcggctcgatgacgattcaacatctccagcttgaggaagcgaccactgaaaaccttcatgtcgatacatgggatgaggcaccgactgaattaacgataaaaccgagaacggtccgctaccgtgaaaaaacaaaaccgggatcgtttaactcgaatgaacagaagaaaaaagagcagcgagaactctatttaaaggaaagagaacaagagaaaaagttaatcgaaaaatatatgacccaaggtaaaattacgctttcagcactctcgacagttgaaccattcatccgcaaggttttgttaagctggattgggaaatcaatggcggccaaaaatcgcatggtcaagactgattacgggcttcacgtaaaggtaatgcttgattatgagaaaactattaccttacaagctgaggatggcaatttactaatgcctgatgcgacattcttgtttgaggagactaggtga

SEQ ID NO: 50679 - DNA, 1167 bp, Bacillus vireti LMG 21834
atgataatggaacaaacgcaattattcgatgaaaaggcaatccaaggaatggacatcttgtttcatcattactggatcttacgtgccgaacaacctgaatggtatcagctgattcgtgagcgggagaaggtattgcgccgctatcttgatgaaaagttcggcctgcggctaattgttcatcaacattttattaaactggaaaaaattcctgttgaaccggaaggctggatgggcatccaagatttccaagagccaatggactatgcgattttttgctgcgcacttgcctttttagaggggaaagcagtggatgaacagtttttgctttccgaactatgtcaagagattcaagccgattatcctggagattttccgcttgattggacgctctatacccaccggaaatcattgataagagctgtaaaagttttgatggaatttcagctcatacgaaccattgatggggatatcggccgcttcgatcaaaatgaagagcaggaagttttatatgaagctagcacctatagtcgatatttcatgagaacatatccagatgatttttcgagctatcagcactggagcgagttactaaaagaagattggaaattgaaccaagaggatgaacgtaggaagcgggtgtaccgcaagctgttcttttcacctggtttgcatcggctagatcaacaggatcctgattttctctatatccggaactatcgtaaccgcttagcagaagatattgaaaagcacagtgagtataaactccatgtctataaaaatacggcatttttatcgattgcggagccaaggcaatatcaacaggtttttcctaattccaaggcatccactgacattatccttcagttgtcaaagtacattcatggggagcctgagcgcttcaaagcaaacgaaaatggtgaaatactgatgacggaaggtgagtttgaacaagttgtggatgatttacggcagcaatttggaacaggctgggcaaagtattttcgcgatatgagtacaaaaggaattcgaacggaactgcttcgtgccatgaaggattggatgatggcggaagtggattcagaaacttctcttattcggattaagtcattaacaggggtcatgacgggggaatatccgagtgattttcaaacaggaggaacagaatga

SEQ ID NO: 50680 - DNA, 4110 bp, Bacillus vireti LMG 21834
atgacagaggcaaaatgggtgatgaaccgtgcggggttattgaatttttggtattacgatgatgaaatttttcctttctcggatggaaagctactgcttaggggaacgaacggctccgggaaatctgtaaccatgcaaagcttcctgcctgttttgttagacgggaaaaaatcacctgaccgactcgatccatttggatctaaagcccgcagaatggaagattatttactcggggaaaaagaggtggtcgatcgtgatgagcgtacagggtatctttttatcgaatataaaaaggccggcgtagagcgatacattacaactgggatcgggatgcaagccaagcggcataaaggaattaagtcttggtattttgtgattaccgataatcgcagaattggatatgattttgaacttgcacattcgcaactaggagaccgagttcctttttccgcaaaggaactggaaaatcggatcggagagggcggctatgttgttcatacccagcgcgaatatatggagctggtgaataaatatatttttggtttccaatcaaatgaagcttatgaagacttgatcaagcttttaatccaattacgaagtcctaaactttcgaaggattttaaaccgacagtgatttatgaaatattagagtcggccttgcctcctttgaccgatgatgagttaaggcatctatctgataccattgaaagtatggatcaaacccagcagcagctcgaacagttggaacgggaatttgcctctagcagcaggctggttaaccagtatcattcctataatcaatatattttggccgaacgggcagggaagtggcaggatgccttaaaaaggtacactgttgctgaggaacatgtaaaaggtttaacagcccaagacgaagaattgactcaagaaattaaacaagaagaggaacagaagcagcaatttgcccagcagcaagaaattgccttagaagaaaaaaagcggttggagcgccatgaggtttggaatctggaagaggataagcgtaagaaaatagaaaatacaaaatctttaagtagtgaaataaattccttacaaaagaaatgggaccacaaaaacagtcagtacaatcgtctatggcaggagcgggagcagagtcaaaaccagataaggcagcatgaaagcggcatggaagatttattaggggagctgcaatttgatgcggaagaggctgctttttcagagcatgaggttaacgtccatgatttcgaacgtcatcaggaggaggagtttgatttttccatctggattggtgagattggcagtcatgaacaattacttgcgaatttaaatcaattagctgatgaggaaaatcgtctgtcagaagagcataaccggctccaacggcaatcctctgagaaaaagaaagaggtagatgcaatccgcaagaatctcgatcatttagccgattggtttacggaagagaagcaaaggttggagcatcaggtatttacttggattgagcagcatccaaagcttattttttcaaatgaaagacgccaagaaatcgcccgatcaatcgaaggtttatatgaagaaaatcggtacgagcaagtgagggaaaaactccttgctgtggttaatgattatattaccgatatcagtacgaagaaaaagctcatggagacaaaaatagaagataaaaagcacgaattggaagcagcacgagcagaattgcatcactggaagacattaaaaatgccaaacccggatcgtgctaaggatacagaggcatttcgcttgcagctgctagaagacgggcaggcatttattccgttttatgcggccgttgagttccaagatgatgtgaccgaagaacagaaagagcggattgaatctgcgttaaaacaaacgggcatattggacagcttgatcactgaaaatgcccttgccccaacccatgatcgggtaattcgtcctgagccgcaattactcggatatacgttagcagattatttgcgtccggatttagaggcagacagtcttatttcaaacaaacttgttgatgaaatattacggagcatctcccttgaacaggaaggggcaggttttcatgtggatgtcgatggatcatattcacttggttgtttagtggggcatgcaccaaatgaagggccgtctaaatatatcggccgctcatcccgcaaacgataccagcaagagaaaatcaaagaatgtcaggaaaccattgagcaactccaattagagttagaggagctaaaggtgcaactcagtcaatacgaagagaatctcctccaagcagcacaatggaagcagaccatgccaacagatcaggaacttaatgacttgaatgttcagattgaaaagaccggccatcaattggaggagcaaaaaaaggttctttttcagctggatgaacagtggaagcaagtacacggtcacctccaagtgattaaaatacagctccatcaagaaggccgccagctaaatctttctttaactaaagaagtcttagggcaagcattaatctcagctaaaaactatcgtgatcaactctatagctttaaagatctttttcaaaaatgtttatttgcccggaaaagaatagaggatttaactcatcgcttatttgaaatggaaacggaactggacgatcttaaaggggatcaaaatgtcaaggaatcacagttgcggaaagaaaaggctgaaattgagtcaattgagcaacagctgaagctaaaagggatcgaggaagtaagacttcggattcaacaagtgcagcaggagctaagggaagcaacagaaggcatcaatcatctacttgaaaccattcctcagaagaaagcaaaacaagaaacctgtcaaaatgaattagcagcagctaaaacaagtgcggaattctggtcaaatatggcggacgaatgggaacagatggtgagagcggatatcgcccgtggttttgtagaagttgttgaaatggatcctgttaaaatcgttaaacagctggaatccattttaggaaaatatgaccgttcgaagctaaatgaacagctaacaaagacgttcatcaatgaacagatatttttaacggagtacaggatgtttgaatacccggaagagaccgagcgtccagagtggttttcgaaggaatggggcgaatactatgaaccatttatgaatgaatggaatcagcttcaaagccgccgtttaattctaatggaatataaaggccagcgtgtcagtccgtattttgtgttcacatcactggaaaaagagttagaagaccaaaaaggttggcttgatgaacaagaccgccaactctatgaggatattatcgtcaatacagttggagtaatcttacgaaatcgaatcaaacgtgccgaaaaatgggtgagtgagatggacaaaatcatggaaagccgtgataattcatctggattaacgttctcgattgcatggaaaccattaacggccgaatcggaacaagaattggatacaaaagacttggttaagcttttgcagcggaatagtaagtttttgaacgaggatgatttaaatcggattacaaaacacttccaatcgagaataggaaaagcgaaggaattaattcagttacggaatgaaggatcgacgcttcatcaagtgttaaaagaagtgttggattatcggaagtggttcacttttgttctttcatttaaacgtgtaaatgaaccgaaacgagaattgacgaacaatgccttctttaaatttagcggcggcgagaaggcaatggcgatgtatattccgttgtttacggcggcctattcaagatataaagaagcaggagagatggcgccgtatatcatttcactcgatgaggcctttgccggggtcgatgagaataatatccgtgacatgtttgaagtggtggaacagcttggctttaactatataatgaactcacaagccttatggggagattatgacaccatttcaagtctatcaatttgcgagttagtacggccaaagaatgccgactttgttactgtgattcgctatcaatgggacgggaaacagcgcacctttgtggtggacgatgagcacgttgaggagctagtgacacatgattga

SEQ ID NO: 50681 - DNA, 1296 bp, Bacillus vireti LMG 21834
atgattgacaaagtacaggtgtttagggacgaaccaggttttgttaaattgtttaccctatttaaagaaaaataccgttcaatcgggagaatcggcggcatggtgagtttggatggcttttcctatgatgaggtggaatcaattgccggctttttgggacagtctgttgaagcgctccttgaaaaagggaaggtttcattactttcttttgaaaaagaattaccgttgaccggttttgcagagtattcccttattgaattgcttgaagaagtgctcggggagtcgatacttactaaacatgaggaaagtggcattgaagaagagaaagaaaagaggtttttacaagagttatcttttatatgtcctgagggaagttggtggtgggactggattgagtcgaaaccgccggattcccggtggatttggtcgctttataagcaggatgcggttggtttaatggaaaaattcatcaccgtttttaaagcatatcaagatcttccctgtaaggagaataagtatgaaagactgccgctgtttgcccaacgaacaacgggaaatccacatattttcgataataatcaactaactgggaaattgctcgtcaattgcctgcaggtagatcaacagcttaaggggcgacgcgtaccgggaatgccgaaaacaacagaggatctaaatgatttgctaggtttgtatggtttgatgagggatgatttgtggagttttgtttcctgccgcggattacttgcggaaggtgaaatggggattcatcctgtttggaaagccgcagctgaaactgacacagttctaaacgttccgcttaaggaattactgaaaataaaaagaatctggcccgctgcaggaaaaaaggtttggattgttgaaaattcaagtgtttgttcgacgattgttgatgaggttgctgatgctcctgtaatctgcacccacgggcaatttcgggctgcgagctggatattgttggagttattagtggaagcgggctgtcacctttactattcgggtgacctagatccggaaggggtatcgatggcacagcggcttttcgatcgttatcagggtcatgtaacttgttggaggatggatgttgaatcctatgataaaaccatttcagatgaggatatttctggcaggctttctaaattggagtcaataactgcacctgaacttcttgaagtagtgaatgtccttaaaatgcggcaaaaagcgggctatcaagaaggtttagttgagcaacttgttcaggatattaaaaacgagtttaatgtgttactttag

SEQ ID NO: 50682 - DNA, 1500 bp, Clostridium butyricum DORA_1
atgaatattgataagaatgtaacaaaacagattgatgaagtaaaatatcttgctacagagaatacatacagatatagagcaataataagaaccatgtacaaaagttatgaaaaaatgaaatatacaatttataaagaagaaatctttgaaggtcttaaaatctatgatgatttttcttcgtataccatagagaatctcaaaagtgatcttgatgttttagtatcatggaaaaacttaagtgcaacggctgatactgcaaaagttaacactattgaagagtttaaaaacagggaatttagatataacctttcaccaggtacaattgaaattgaaagaatgcttattaaacttgaacatatgacaatagaaaatacatcttcacttgaaagttcacttgtagaaaagtttctcaatcttatcgaaaaaatgttatttataaaggatgaggaaaataaaaaagtttatgaatggtttaaagaccttaattcaagctttgaaagtttaaatagaaattatcaggattacatatcaaaattttattcacctaaaaatgatgagcttatgaagacaacagaatttttaatatttaaagaaggatttattaaatatttaagagaatttataagaacacttcagaataatacaaacagcatacaaaaagtatttaataatattaatgaagatacaattatgcagattgtacataaagtatatcttcatgaaaaagaaatacaaagtcttgaccttattacagatgaaaaggaatttaaagatcttaatataggaagaatcgaatcaatgaaggagtggttcgtaagttataaaggacgtgaacctcttattgaacagcttataagtaatactaatgagataataagaaaaataacaagatatgctgcaaacatagcagacaaaaaatctaataatgctaatagaaaagaagagtataaaaagattgctaaattatttagtgaatgcagcgatataaatgaatgtcacaagatttcaagtgtagttctaggatcttttaatatagaaaaaataatggcagaatttcaacgtgaaacggaaagtactaacagttcaatatatgatgagacaccatcagacattatcataaaacctaaaattagaacatacagggaaaaaatcataaaaaatcctatagttaataaagaagaacgcaaaaaggaaaaactcatgaaaatacttgaaaaaagaaaagaagaatctaaaatattacataaatttatacataataatgaaatagcgtttgacagtcttccagtaataaatacagaggaacgtgtacttttattgagacttttaagcaagggaagaagcagaaagagagaatggtctaaaaatgaaaatggtatggaatacaaggtagtactttgtgatggagataatattaaagttgcatgtgatgatggaagtttatatatgccaccttataaaataatatttaaggaggagctgaaatatggaagaacttaa

SEQ ID NO: 50683 - DNA, 1140 bp, Clostridium butyricum DORA_1
atggaagaacttaagatactgcttaaaaacaatattattttaagagaagataaaaaagaaatgtactataagattaaagatggttataaggaatttaaaaattttataacagaaaacttaggatataatcttatcataagaagtgattttataagacttgaaaagcttccaggaaaaagtgaaagctttatgggaattgaagaatttcaaaataatattgaatatgctatgctgatgcttattttggtattcttagaagataaaagtaaagatgatcagtttcttttatctcatattactgaatcattgtcatcaaatgatatagatattaaatttgactggacggattattctactagaagaagtcttataaaagttttgaaattttcagtaaaaaacagtcttataagagttactgatggtgatgaagacagctttataagtgatacaaatcgtgaagttctctttgaaagcagtggtgtttcaaagtatattgtgcgtaattttaatgatgatatattaaatgcacagactccatcagatttacttagtggaaaaggtgttgattttgacacagataaagtagttgttagaaggaacagagtttatagaaatttattgttatgtccaatagtttataggcagagttctccagaagattatgaatacataaaaaattataagaaatatcttgaggagaattttgagaaatatcttggttggaatctccatgtacataagaacggtgcaatgcttgtaccgtcagaaaaagaaaatggattaaagttatttccaaacggcaaagggataagtgatgtaatactatttgttttatatgaaataatagatgaaattaataaagataaaagcagacttaatgaggaagatatattgattttaaataaagttgattttgaacagattgtacttaaagtaaaacttgagaaaagtcatggattcagtaaggaatacagagaaatgagtgatggaagatttctttatgaaataataaatgaaatgatactattttcatttatagaagaagaaaaggatgtcattaaaatatttcctttatgtgggaaaataagaggaacttatccagaagattatgatggggaggtatcatgtgatgaaaaatag

SEQ ID NO: 50684 - DNA, 4047 bp, Clostridium butyricum DORA_1
atgaaaaatagattttttataaataaattaggtctagttaatttttggtattatgatgtggaagaatttaagctaagcgatggtaatctgcttttgagggggagcaatgggtgcggaaaatctgtaacaatgcagagttttataccacttcttcttgatgggaataaatctcctgaaaggttagatccatttggaacaagagctagaacaatagctaattaccttcttgatgaagatgatactgaaaagactgcatacctttatatggagtttaaaaatggagaaagtgacagctatataactcttggaatgggaatgaaggctgttaagaacaaacctgttcaaagctggtactttattgtaagtgatggccgtaggattggtaaagatcttcttctttatagaaatgctggtgaaatgatacctcttacaaaaaagcagattcaaaatgaacttaaagaaggtaatttctatacggagagtcagaaaacatatatggaaatggttaataaatatctttttggatttgatgatattgaatcatatgaagaacttcttaatttattaataagcataagaagtccaaaattatcaaaggattttaaacctacagaaatatataagatacttacagattcattaaaagtactaagtgatgaagacttaaggcctatttcagattcaatggaaaatatggatagcttaaaagattctctcgatgaaaataaaaattcattaagagctataaataacataaaatatcattatgacagatataatacttcactacttcttgaaaagagcagaaaatttgcagatacatataaaaagctgaaagacaatcataaggaacaagataatttaaacaaatcttataaagaattcagaattaaagtagatgatgcattaaaagaacgtgaatttaaagatgatgaacttaagagtgctgaagaaaaatatgaaaaactaataaacaaagaggaatttaagagtaaaaaagaactagaagatattaaaaagaatattgaggaaaacataaaagaaaaatcaaacaaggaaaatgatcttaaagataaaaatggaaaagaaactgagactagatatgatataaaagagataagtgacagtacggaaatcatagaaaaagaacttacagaaataatgaaagaacttgatgacactgctaaggagataaatatgcagcagtgtataggtattggaacacaagatatttcagttcttacagaaactgatcttgatttttgtgatgacagcataagaaagcttgaaaaaaagcttaaggaagcagaagtatattttaagaaacttgaaaatcagaaagaaaaaacagaagaagcattaaaagagcttgatgattcagaaaaagaaaatgtaataaagaaaaaagacatggaaagagcagaagaaattcttttaacagaaaaggaaaactataaagttaactttaatagtttacttaatacaaatagattatatacacttgatgacaaagaaaaattaaaagtatttacatctgttgatgttatagatgattacaataatatacaggatttaaataatgttgttcaaaactattacaatgataaagtaaatgataaaaatgcatgtataaatatcgaaaataaagtaataaaagaacatgaagataagattaggataatagaaactgaaatagatgaacttaaaaataataaggaaattgaaccagagagaagtgaagaagttaaagctaacagaaaaaggctggaaaaacaaaaggttaaatttatgcctctttataaatcattaaactttaacaaggatattactgaagaagtacgaaattatgtagaaagatccttagataatatgggacttcttgatgcacttgttattgatccgaaagataaagaaaaagcaatggagtttgaagaaggtatggaagataagtacatattctcaaatcccaatattatgagttataatttaagcagtatgctttgtgtagataaagccctaaaaggtgatgaattatttagtgaaatagataatgtgcttcaaagtatatttttagataataatggtactacatgtcttaatgaaaaaggatactataaaattgggattattgaaggcaggtcatcaaatgattatgagcagaaatttattggcgaagcctcaagaaagcgtcatcgagaaaagattatagaaggtaagatgcaggaaattaaagaaatagtaaagctaattgataaacataaattaagtattgaaataattttaaaggaaattgatatattaggtaatgaatacaagctgattccaaacactgacagtatatatgaaggtgtcagaatggtaaaggatcttgaaaatgaccttaaaaatcttgataataaaattataaaacttaaagaaaaagaatttgctgaaaggcagaagcttaatgatattaaaagtgagcttatggcatctgttcaaaatcttgataatgttaaatgcataaaagatattgaagacagccttgaggctgcggattattataaggaaaatgtcacaaaagcaaaaattgctttgaataaatttataagtaaaaaatctatcttaaagttaagaagtgacttcttagatgatttattacaagatattgataaattatattatgaaataaacaatttaagtgaaaaaataaaaagtgataccttaaaaaagaatgccatagaagatattctaagcaaatgtgatatttcagaaattgaaaaagacatggaaaactgccttaatattaaaaataataatccgcagataattaaagatttaagcaccagtattggctcatatcagagtagtcttgatgtgatacaaggaaagatagatgatcttgttataaagcaagaaaatattaaaaatgaatgtgatctatatgaaaatatatttatggaagaatatgatttacagtatgtatgtgaaaaagaagacaaagaaccatatgaaatatgcagaaaaataataagtgaagctgaagaaagcaatgataaaaacagagaacactattctaataaccttacacaggctataaatactaatagtgcaatgctaagggaatttaatattaaagaaacaactctttttgagcatgatgaagaagattttaatataaagtggttcagacagagaagagattttaaaggaaaaattcaaggaaaagatgtaaatcttttaatcttaaaaaatgaaataagcaaatccatagaggagcttgagcttttaataagtgaagaagaaagaaaggtatttgaagaaatactcatgaatactataagccagaaggttaaggctaagattttcatgtcaaacaactgggtaaaaaaaatcaatgagcttatgagcagcatgaatacatcatcatcattaaaactgagtctttcatgggttcctaaaaaatctgaaagtgaaggtcagcttgatataagcagaataatagaaatatttaatcgtggtgacagaaatagtgataaggatcttagaagtttaggaaagcattttacagaaaaagttaaggaagaacttagaaaatatgaaggaactggtgaagtcagaaattatcattctataataaaggatgtattagattatagaaagtggtatgaattcaagctttattatgtaaagaacaatgaacgtaaaaaagaacttacaaataatgctttcttccagttctcaggtggagaaaaagcaatgtcgatgtatattcctcttttctcagcattatatgcaagatatgaaaagggacgatgtgactgtccaagaataatttcaatggatgaagcttttgctggagttgatgaaaataacatacgtgatatgtttaggctgttaaaggaattaaatcttgactacatattaaattcacaaattttatggggagattacgatactgtagataatcttgccatatgtgaacttataagagaagataatgatgatgtggtaactgtattaaaatatttatggaatggaaaagaaaaggtgcttttagatgaatag

SEQ ID NO: 50685 - DNA, 1284 bp, Clostridium butyricum DORA_1
atgaatagtttagaaaaagatgcaggacaatacttaaaggatagaaatgaatataacaaaataatgaaatctttacttgagaagtataaaaaaacaggtaaactaactggtaaagtaaaaatatctaaaatatcagaagaagaaagccttgttcttggtgctgtagattatacactttatggtgaaaaagaagtaatgctttctgttaaaaagtttatatcttatttctgttctggaaaatatgaaaaaacagattttttggaagttatgaaattttattttggagaggatgcattaattacaaaaagagaaattaatgatgaaaagaatctcttaaaagaaaaattctttatagatattgaaaacagttttaaagctgttgaaactaaaatatggtttgagtcaatgctgagtattaagaaatttggatatacaacagtattgaaattatataaggaaaatgaaaaagaacttaaggaaatattattaaatatagataagggattttgtcatattgattcaataaatgaggaatatatcccattagcaaaattttcttctctcataacaaaagattcacattattttgatattgacaatgtttcaggaaaactgtttatccatgcacttggatatttaaatgatataagagttgagagtattgaaggacgtaatgaagctcttatgaaggctaggattgtacgagatgaagtttctaattttacaataacatatggtcttttagtttatgatgataataaggaagttgttggctatgagtggtttagaagggagaagcagccccttcttctcaacatatacaatctcaatgatataaaggaaataaaaggagttcataataaggtttatgtctttgaaaatccaactgtattttatgagctcttaaaaaagtgcaaagatatcccagtcagtctaatatgcactagtggccagcttaatgcaagcagtatcatacttcttgaaaaattaagaaaaagcaatacaatcatatactatagcggtgattttgatcctgaaggacttcagattgcttcaaatataaaataccgttatggagatagtgtaaagtttttaggtatgaatattgaaaattataataaaataaagggaaatatatcatttgctcatcgtgttggaaaacttgatagtataagttcaaaggagctaaaaagtcttgcatatgaaatgaaaatttcatgtatggctggctatcaggagcttcttagtgattattattttgattttatacgtaataatgtttga

SEQ ID NO: 50686 - DNA, 1488 bp, Microbispora sp. ATCC PTA-5024
gtgggggacaggttccggctgttcaacttcacccacagggacgactacgtcgtctatctgtgggtgctcagggcgatggaccggctgcgggccgtgcaccgcgtccaggtggacagcgaggacgtcgcggcggcgatggcggagctggcgctggcgcacgacggggttcccgtggtggacggctcgctccgggggcggctcgacgccctcgccgccgacggcatcgtccaccggctggaggacgcgtcccgggcgggctcgctggagcgctaccgcaaccggcagtcggtctaccagttcagcgagctcggctaccgggcgttcacggcggtggaagacgtcctggcggcccgggtccgcgacgccaacctgtcccgcctggtgttctccgacatcctcgacgacctgaggtcgctcgccgcggccaaccgcgccggcgacgaggagcaggtctaccggcgcatctcgcggctcgaccgggtgatggaggacatggtgcgccggtcggcccgattccacgtcaccctcggcgagatcgtcacctcgacggaggcgtcgcccgagctgttcctccgctacaagaacgccctgctcacccacatgaccgacgtcatggcggagctcgaccgccacctgccccgcctgcaccgggccgtcctcgacgtggaggccacgggtgtcgccaccatgatggtgcgtgcggccgacgccgacgacaggccgttcctcagcccgggggagcggatggaggactggaagcgccgctgggaggtcctgcgcgcctggttcacggcggagccgggcgcggagtccggcgccgccgagctgcgccgcgcgacccgcgccgccgtgtccggggtcgtggccctgctccggcagctcaccgaggcccagcgcggcggggtgaaccgcgcctccgagctgcggcatctcgcggagtggatctgcgacacccccgacgaggacgcggcgtacgcgctggcggcggcggcgttcaacctggggtcggcccggcacatgggcggggcccacgacgacgtggagcagatctcgccgcgggccacctggtgggacgcgcccggtgtcgaggtcgcgctcacgcccttccggacggggcggcaggccgggccgggcatcccgcagcccgtccgggtcgatccgcgcaggcgcgccgacctgcgccgcgagcagatcgcggccagggcggccgagcgccgggccgcccggagcctggcggagcgcgggccacacggacgggcgctcgacgaggccgagacccgcgtcctgctggcgctgctgaccagggcgctggaggcccgctcggtggtgtccgggcggctgaggtccggcgacggcagcgacgacaccgtggtcctccggctcgtgccccactccgcgggcagcagcgtgcggactccacacggcctgctgcacctgccggggttcgccctcgagatcgcgccccgcgctgggaccgcccatgcctga

SEQ ID NO: 50687 - DNA, 1368 bp, Microbispora sp. ATCC PTA-5024
atgcctgagcccctcgccgccgccggcgtcgcccccgccgacctcggcggctaccaggaagcggtgcggctcgtgctgaccagcgacctgatcacggccgtccatccccgtcccggcgtgctggaacgcgtgctgccctgggccgaccagctgacccgcgaccttcgcgacctgttcggctacacgctcatcgccaccacccgtcaggcacggctgatccgccggttcgacgccctcgacccgtcgcgtgggaagatcttcgccaacagggcgggcaagcccttcgaccgcaggcggctcgcgtacctctgcctggtgctcggctccttccagcgctcccgggtggagatcagcctggcggacctggtgcgcctgttcgcccccgcggccaactccatcccggggctcggcttcgatccgctggtccccgggcacaaggcggcggtcgtcgacgtgatcggctggctggtggagcgcggcgcgctgaacctgtcggacggctccgtcgaggcgtgggcgcgcggcgacgggggagacgccctctacgacatcgaccacgacatctgtgcggcgatcttccgcccgtcccgcccgatacagcacctgaccagcgccgccggcctgctcgacggcctggacggcggcgccgaggcacgcgtgcgccggctgctgctggagcggcccgtcgtctactacgccgacctcgacgcggaggccgccgccgtcctgcggcgcgacgacctcgtcgacaacctggcacgcctcaccggcctggtggtggagcgccgcgccgagggcgtgctgctcgccgacccgggcggcaggttcaccgaccgggccttccccggcaggggcggcgcggtcaaccgggccgccgggctcctgctcgcccgcatcgccgacgcgctcgaagaggagcggtccgcgccagcctccaccgggacgttcgaacggctggagcccccggtggaggcggacgtccagcgtgacctgctcgcccgcgtcgactcggcgctgccgcaggccggcgtcgtcagggacctcgcgtggtcgtccggccacacgccgccgatgccgccggatcgacccgacccgctcgtcctcctcgaacgccaccggctcgaggcgctgatcgacgatctgtacgagacgttcggcgcggcctcgttcaccggcgcctggcagcaggacccccacggcctgctcgacgccgcgctcgacctgctggccgacctgcgcctggtccggccggtgcccggcggggtgctgctgctcccggccgccgtccgctaccgcaacatcacgatggcgatcccggcgccgcccaggggccagacggatctgttcgaaggaggagacccggcatga

SEQ ID NO: 50688 - DNA, 4173 bp, Microbispora sp. ATCC PTA-5024
atgacccggttcaagccgtcccgtgccggcctgatcaacatctgggactacaccgacgaggagttcgtcttcgcggacggccggctggtgctgcgcgggcacaacggctccggcaagaccaaggccctcgaggtgctgttccccttcatcctcgacggggtggtcgacgcccgccggctcgacccgttcagcggcgagaaccgcacgatgaagtccaacctgctctaccggggacaggagtccgaatacggcttcgtgtggatggagttcgcggacgggcgccggacggtcaccctgatcgtcgccatgcacgcccaccgggaccggcccgacgtgaagcggacctacttcgtcacggccagacgcgtgggtgtcgacttcgggctcctgtcggaggacgcccggccgctgaccgaccagcagctcaagcgcgtgctcgaacccggcgcggcccgatccaacgccaccgactaccgcgacgcgatcgacgcggcgctgttcggcctcgggcgggagcggtacacgcagctgctcgacctgctgctcgcgctgcgccgtccgctgctggccaaggacctcgacccggtcaaggtctccgacacgctcacggccgggctgagtcccgtctccgacgacctgatcgagcaggcggcccgcgacttcgacaacctggcggccgtccagcgcctcgccgaggacctcgcggcggccgactccgccgcccgcgcgtttttggcctgctacgccgactatctgcgggtcggcgtgcgcgggtgcctcgaccggatcgaggcccgcaccgagcaggccgtacggccggccgtgctggtcggcgaggcgcgggccgagatgcgccgcgccgacacggcccagcaggaggccgaggaggcgtgcgccgccgcggtcgcggagcggaagaggctggaggcccggctcgacgccctcaagcggcacgaggcctacaccgcccagggcgagctggagagtctgcgcacccgggtcgcccaggggtcccaggagatcacccggatgcgggaggcgaacgccaggggcgcccggcacgtcgcggacctgcgccgcgaggccgccgagctcgaccgcgagctggccgaggccagggaggcggccgggcgccaggcagcggcgaaggcggaggccgccgacctcgccgggatcccgcgagacgagggaggcgacgccccggagatcagagcacgggccgtcgcccggctccaggacgtcgaggacgtccgccgcggcctgcggaaggtcgaggaggcggaacgcgaacgcggccgggcagagcaggccgttcagcgggcgcagcagaagatcgacgcgggcgggcacgcgtgtgagaaggccgagcacgccctcgccgaggcggtcggccgggcagaggccgacctgcgcgcctgggccggcaggtggaccggccgcgccgagctcgccgagcccgtcgtgcctccgggcgacggcgacaccctggccgagagcctggccaggctacgggagcccggcgcccccagcctgggcgaggtgttcggcgacctcgtcgagacgcgccgcaccgcgctcgccgccgaggcggccgggctcgacgtgacactggaacgcctcaccgcggagatcgcacggctggcggcggaacgggacgaggtcgcgtccgagcgggacgacgcgcccccgctcgcacgccacgccgatcgtgaggggcggccgggagcgccgctgtggcggctggtgcgcttcgccgaagaggtcgggcacgccggcgccgccgccgtggaaggggccctggaggcggcggggctgctcaccgcgtgggtccatcccgacccccggctgaccgcggaggcgctggagaaggcggagcccgacgcctacctgctgccggccccgcccgggctgcggccgtccgggccgacgctggcgagcgtgctggtgcccgaggatcaggacgccgtcccggcggaggtcgtctccggcgtgctcgcgtcgatcgcgctgaccgaggagatcgacccggcgtcgggcacgccggcggtcagcacccggggccagttcggtgtgggcgttcacctgggcgtccggaccaaggacgcgccggagtacatcggcgccacccatcgggcggcccgccgggccggccgcctcgccgagtacgggcgggagatcggggacaggtccggtgagcgcgaacggaccgtggcggcccgcgactccctccgtcggcgactcgacgacctcggccgggcgcgacgtgagctgaggccgatcggccgggacatccccggcgccgcggcggcgctcgcccaggcgtcggcgctgctcgctgcggcccgcacggagctggccgaggccgccaccgccctcgacgccgccaccgccgaaatggacgcggaacggcggcgcctccggcagacggcggcggaccgaaccatgccgtccgccgccgacgaggtcgaggcggtcgccgccgccatcggcgacttcaccgcggcggcggaccgccacgcccagcagctggccgcggtcgggagactcgacagggatctcaccgggcggctccgaaccgtcgaacggctggaggccgagctcgccgccgcgtccgacgacctggcggacaaggaggaggcacacctggccctcgccgaacgcctggccgccgcggaggaggcgctcagcgcgccgctcaaggagatcctcgaccagatcggcgacgccgagcgggccctggccgccgcgaccggcgccgcccgcgccgccgagcagcgggcccgcgacgagcacgacgcgctggtgaaggccaaggtctcctacgagcacgggcgtgcctcgctcgtgtccgcgctgcgtgagctgctcgaccagctcgcgtccttcgcgccgttcacccagccggagctgcggccggtgctgggcgtcgccgccgcgccggtgtggcccgacgcggcacggtggcccgagcccgaacgggccgccgccgacgtcgtcgagcggctggccggcgaggacgcggcgatggcggtgcgggccgtgctgccggacggcgcggcggacctcctcgccctctacgagacggcggcagccgggcggcagccgggggagggtgcccgcaagcgggcccgcgaccggatgtcccaggccctcaaggagttcggcgaggcgctcaacgcctgcgaggaggactaccggctcgactgggagcagggcgagtcgctcgtcctggtccgggtccacgacgccgacggccgtcacccggtggccgccttcgcccggcgcgtcgcggaacgcgccgaggagcagggcgtgctgctggaggaacgcgagcgcagggtcctggaggacgagctgctcgcgggcctgtcccagcaggtcttcgaccgtgtgatgctggcgaaggacctggtcaagggcatggacgcggacaccagatcccggccgatgtcgaccggcacgaccgtgggcatccgatgggtcgtctccgacagggtcaccgacgaccagcgcgaggtatccgagctgctcggtcgcgacgatctcgggccggcccggctcgccgacctccggcggctcctgcggcagatgatccacgagtaccgtgccgggcaccctcgggcgacgtacaaggaggccctgtcggccgtcctcgactaccgcgcctggcgctcgttcgaactgcggctcaaggtccccggggaggaggaggtcaagctgagcaggaagcgccactcccagatgtcgggcggcgagaagtcggccgccatccacctgccgctgttcgccgccgccaacgccctgtacggatcggccgcgcccacctgcccccgaatgatcgcgctcgacgaggcgttcgccggcatcgacgacgtctacaagcccgacctgctcgggctgaccgtgcgctacgacctcgacgtgttcatgaccggccacgacctgtgggtccggtacgacacggtgcccgcggcggcccactacgacatgcacagcgacaaggcgtcccacacggtctcggccatgctcgtcctgtgggacggatgcgagctcgtcgactccgcagcggggttctccggcaacgacgagctcgcgggagagatcctgggattcccgccgacccgccgtgtcccggaggaggacggcgtcctgataccggccggcggcgagtga

SEQ ID NO: 50689 - DNA, 1524 bp, Rhodococcus pyridinivorans SB3094
gtgagtgaatcaggccgagcgcggttcggcgcgatggaggacgcgttggtgcgggacgaccgcctgcgcctgttctcgttcgcgacggccgagaaaagggtgcactacctgtgggttctgcgcgcattcgatcacgcgcgcggcaactactcggtgctgttgcacgccggcgacgtcgagaacgtcctcacccgactgcccggcgcgagcggcgacgacgtgcccgattcctccgagatcccggcgctgctcgagcagctgcacgcgtggggtgtgctcgaacgcagctacgacggatcccgggcagcgacgctcgccgagtaccgcaaccggcactacgtctaccagttcgggcaggcgggctaccgggtgttccgcgccgtggaggacgtgttgtcctcccgcggggaggacgtctcgctgtcacgtctggcccttcccgatctgcttgccgatctcaacgatctcgccgacgcgaacgccgccggcgacggcgagctggtctaccggaagttgagccgcctcgacgcgacgttgtcggacatggccgagcgcgccgcccgtttctatctcgtcctcggcgagctggtgcgcaccaccgaggtcaccccgaagaccttcctcgcccacaaggacgcgctgctcacccatatgcgcgagttcagcaccgacctggcccgctacgccccgaagctttccacggcgctcgaccgggtacaggccaccggggttcagaagctcagcgcggccgcggcccggcacgacgagcgggtgctgctctcgttcgaggaacgcgaagcggactgggcgcagcgctggtggggcgtcgaacactggttcgtcggtgtgggctccgaaccgagcgaatccgaacgcctgcgcggcgcgaccatcaacgcgatctccgcggtgctcgggctgctgcgccggctcaccgagcagcgtcgcgggggtgtcagccgcgagtcgcagctgcggcatctcgcgggctggttcgctgccgcgccgtccgaggaggccgcgcacgcactgttcgatgcggtgttcgacctgggccggccccgacacttctccgtcgcccatcccgatgccgacatcgtgccggtcacccgctcgtggtgggaagcgcctcccgtggagatcgcccgcaccctagccgagaccggccggcgccccgcagcgggagcgccggggcggatccagcgcaacgacgccggagtacggcggctgcgcgaggcgcaactcgagaagcagcgtcgccgggccgaagcggcgcgttccctcgccgccggaggggtgcgcgaacggaagctcagcgaaccggaagcagaggtgctgttgagcctgctcgacgccgcactgtcggcccgcgtgcccgtgagcgggcgggtgcgcagcgacgatgcgtcctctggtacgcagaacggcgtcaagctcaccctccgaccgagcggcgagtcgacggtggtgcacaccgcgcgcgggcgcctgtatctcgacggtctgtcggtggaggtgcgatga

SEQ ID NO: 50690 - DNA, 1395 bp, Rhodococcus pyridinivorans SB3094
atgagggcgcgttcgattccgtccgtcgagctggattcgtatcagcgcgccgcgcggctggtactcacccaccacctcgtcaccgcgacctttcccgaccggtcggcgctggcgacggtgcgccgctgggccaccgagctgcgggaggatctgctcgccaccttcggataccggctcgaggtcaccgagaccaccgcgcggctgttcaccgtcgccgatcgcctcgacgcgggggcgggcacgtcgacgcacaccggccggccgttcgaccggcgccgctatgcctatctcgcgttggcgatcgcggcgctcggtcgcggcgccgggcagatcacgctgtccgaactcgccgagcacgtcgcgtccgaggcgagccgggtggacggtgtcgagctcgacaccgaacgtgccgccgatcgcgatgccttcgtcgatgccgtgacctggctcggcgtgcgcggggcgatcaccctcgccgacggtgatgcgggcaggtgggcgagcgatcccgacagtggtgaggcgctctacgacgtcgaccgcgtggtcgtgcatgccctgttccggccaccgcgggcgttgcagcacctcgaatcggtgcgcggtctgctcggcaatgccggtgccccgcaatcggatacggcggaggtccggaggcgggtgcgacgcgcactggtgcagcgtcccgtggtgtacgccgacgatctcgacgacgacgaagcgctgcagttggcgttgccgcgcaccaccgacgaagtaaagttgctcaccggcctggtgtgtgagcgtcgcgccgaaggtgttgcgctggtggatacctcgggacgactgtcagatgtacggtttccgaacacggggacggtcgcgcaggtcgcgctgttgctggccggggagatgtgcgatcgcgtcctcgatcccgacgcccctgccccaccccggataccggtgcccgcacagacacaggacgcccttgtcgcggcggtcgattccgcgatcccgaggtcgacggtgttcaccccgctcgcggcgtccgacaccccgatccccgacgagcaggagcaggacgacgccgcacgcgccccgctcgagcatccactgctcgaggattcgtggctggcgggcacggtcggtcgtctcgtcgacatctacggccggaccttcgccgcgcagtggcaggccgaccccgcgggactggccgaggccgcggtggacatgctcgatcggctgcgcctggtgacccgggtacccggcggggtgctcgtcctgcccgccatcgcccgcttccgcggcgtgacggtcagtgtgcgcgaacgggatccggagatcgacctgttccccgcgaccaccccgccgacagtccccgcccccgataccaccacgacggagatctcatga

SEQ ID NO: 50691 - DNA, 4161 bp, Rhodococcus pyridinivorans SB3094
atgagcagcgcccgattccgccccacgcgtgccgggatcatcaatctgtgggactaccgcgaccaggagttctcgttcgccgacggacgactcgtgctgcgcggaccgaacgggtcgggcaagaccaaggcgctcgaggtgctgttcccgttcgtgctcgacggccggatcgaaccgcgacgcctgaacccgttcgccggcgaggaacgcaccatgcgctcgaacctgctgtaccgcgggcaggacagcgcccactcgtacgtgtggatggagttctgccgcggccgcgccgacgacccggaggccgtcaccgtcggtatcgggatgcgcgccacccgcggcaacgacaaggtcacccgctggcatttcgtcgtcgacggccgtgtgggagtggacttctcgctgctcgacgacgaggaccgaccgctcacccgcaagcaactggtcgatcagatcggggccgacgcgatcaccgatcgtcccgtcgactaccgggcggcgatcgacgcgcgcatgttcggtctgggcgcgcaacgctacgaccagctgatcaacctgatcctcacgctgcgccgcccccagctcgccaagaacctcgacccgaagggcctgtcgcaggcgctgaccgacggccttcgtcccctcgacgacgatctcatcgtcgaggccgcccgctcgttctccgcgatcgaggaggtcgagcgcaccctcgaatccctcgcggccgccgacgatgcggcgcagcagttcgtcaaggtgtattcgaagtacatccggcagcaggcccgtaccgccgtcgacaaggccgccacccgtctcggggtggtggacaccgcggtgcggtcgctgcgtgaggcggccgaggcccgcaccgaggccgccaccgcacgcacggcctcggaggaacagctcctggtggccgaacgtgaccacgaacaggcacgcaccaccctcgaggcactgcaccgctccagcgcctacgagggcaaacagcaactcgacgacctcgcctcggcggtgaagaacctcgagcgcaccaccgccgcgcaggccgagcaggcgaaccgcgcccaggccgtcgtggccgaccggctccgcgaccacgacagtgcccgcgacgcgctcgagacggcgacggcggcacgtcgtcgcgccgaggacgggctgagtgcggcggccgaggacgccggcatcacatggaccggtctcgacggcatcgaacggaccgagcagctcagcgcggcgatcgacgcgctcgccgaggaacgcgacgccgacgtgcgcgtggtgcgcagcgcactgtcccagctcgacggtgccgccgctgcgcggtcgcgggccgaggctgccgcggtgcgtgctcgcgcgcaacgcgacaccgcgtcggccgcggtggaggccggcgagaccatggtcgagctgtcccgcagcgaggtcgccgccgagctgggccggtggtggtccgatcgcgccgagaccttcgcggctgtgggcctgtccaccccggtattcgaggcgctcgacaccgccttcggcaccgtcggtcaggacgatgccccgtccccggcggcggtgttcgccgagcacaccgggcccgtgctcgacgacctgcggttccggcgtcgcgtgtgcggcgcggagatcgaatcgctcggcacccggatcgccgaactcgaggccgaacgcaccgccgtcgcagccgaaagtgacgacgctcccccgaccttcccggcccgcaccggcaaccgcgacgatctcgtcggcgcgccgctgtggcagctcgtccgcttccgcgacgacgcctcggcgcaggacgccgccggtatcgaagcggccctgcagggcgcgaacctgctcgacgggtggatcaccgacggcgtcggcgacctgccggacatcgagtcggagcaattgttggtgccgctggcacccgggcaccggccgagcggtcccacgctcgccgatgtactcgttcccgaaaccgacacggccgtccccgaggaacgggtcgccgcggtgctgtcgtcgatcgcatgggccaccgatcccggcccggacgcgcgggtgtcggtcgatgcgcacggtaggttccggcagggagtgcagctcggtcgccacgtcaaggagcaggccgagttcatcggagccaccgcccgcgcccggcggcggcagcgtcgcatcgtcgaactcgagaccaccatcgccgagtgccgagccgacgtggcgtcgctgcgcgagcaggatcgcgagatcggcgaccggctcaccgcactcgacgaggccgtgaagtcgttgccgcgcaccggatccgtgttcgccgcgctacgcaaggtcaccgaatgcgccggcgcgctgcggaccgcatccgaatccgcatccgccgccgaccgcgatctggaccaagcgatcgccgcggtcgccaccaaagaacagcacctgcggtcgacggccggccgacaccgggcaccgctcaccgcgacggaactcgacagtctcgatgcggccgtgcggcacttccgttcgcagggccaggccttgcagcgcgcgctgcgcgagcaggtcacctgcggtgatcgcctccgcgacaacgacgttcgcctcgacgaggcgcgggtctccgccgagaatgcggccgaactcgcggcggagaacgccgagacgctggccaacgagcagcagaagctcgagacgctacgcgagtcgatcggggcgagcgccgaccgaatcgatgcccagctcgacgaggcccggcgccgaatcgaggcggcgaagaccgccgagcggaccgcacgtaaggcccacgagtcggcgctcgagcggatcggcaaggccgaggccgcccacacgggcgccgagcagacactgcggtcggcgctcaccgaggcccgcgccgacgccgacgccctggctcccttcgcccgccgcgacctgctgaccctgctaggcgtggagagcgagcacgtgtggccgtccagcgccgccgcatggctcgacgccgatcagctgacctatcggatccggcagtcccccgacgacaccgtcgacgtgctgcccaccgaggttgtcgcgttgttccgggcactcgacgccgccaccgactcggtcacggcctccgagtcgacccgcaagtccaccgcctctgcactgacctccgcgctgcaggagttcgacgccgaactcgcccggggtcgcgactaccgcctgcattgggacgctgccgacggcatcaccgtcgtgcaggtacaggacgaacaggggtacacgtccgtcgcggcgttcgcgcagcgcatcgcgcgggcgcggcaggaacaggaaaccctgctcaccgactccgaacggcgcatcctcgaggacgcgctgctcaccggtctcgcgcagcagatccacgagcgcaccgtcgacgcccgcgacctcatcgcccggatgggcaccgagatgcggcaacggcacatgtcctcgggcaacaccatcggggtgcactgggtgctcgccgaccatctcgacgaaccggcccgggcagtgtgcaagctcctcgaccgtgacgcgtcgatgctggctccggaggatctggcggggatccgcgcgcatttcgccgcgcggatccgcgcggagcgggccgcgcatccggaacggtcgtacccggagatcctcgccgcgacgctggattaccgccggtggcgggtgttctcgttcagcctcgtcggtgcggacggcagcgaggaccgcctcaccccggcccggcactcggcgttgtccggtggcgaacagtccgtctccctgcacctgccgttgttcgccgcggcgcacgtgatgctcgattccgccgacccgcacgcgccgcgtctgctcgccctggacgaggcgttcgccggtgtcgacgacaccggccgcagcgaattgctcggcctgtccgtgcaattcgacctcgacctgttcatgaccggtttcgacctgtggatcacctacgccggcgtgccggggtgcgcccattacgacctgtcgcattcggtggccgagcacaccgtcgccaccacgctgctggtgtggtccggtggcgaactgctcgccgagcacgacgggtcggatctggagagcgcgctcggatccccgcgcacccgacggatcacacgcccggtggaaggagccctcgagttcgcatga

SEQ ID NO: 50692 - DNA, 1530 bp, Rhodococcus pyridinivorans SB3094
atgggcgaacacatcggtcgcgacctgttccgtcatctcgtcgccgacgaagcggacgagtacctcgcggtgatggactgcttcaccgacctcctgctcgccgatctgtccgccgacgatatcgcggtctcgtgtgcgcggcgcggggtggcgctcgacatcgcggtcgtcgatgcccggtgtcgcagcctggtccggtggggcaatctcgcactcaccagcggcggaaccgacggtggcggctcccaccggcggagcgctcccgagaccgcctcgaccgaggtccgtgcccgataccggccgacaccggccgggctgcgggtgcaccgcgagaccggcaggcttctctccacctccgacgacgtgcgcggcgtggcacgcgtgtcgctccgttgtgtcgcggacgggctcgcccgcatcgaggagctgctggtggacgacgggaacgtgcccgatcgggacgagctggccgcccacgtcaccgccctgttcgcgcaccaccggatgttcaccgacagcgtcgccgatttctattcgcacctcgccgagatcctgagccgtctcgagcactccggccgtcccgaacactcatccgatcgcgaacgcgccggggcggtcgacgattacgcggagaccaagaacctgctcctcgactacgtcgacgtcatcggttcggacgtcgagcgcctcgcccctctcgtcgccggcaggctcgaccggatcaggccgcgtctggactccctgctcgccgcgttgcgcgagtccggcctgccgaacaccgtgcccgggtcccccggtcgccgtcgcaccgactgggacgaactggcgcagtggtacgccgaggacgccggcccgcgccgcatgcgcgaggcagcggcggaggcgctgaaccggctgctcgtgcgcactcggcggatcatggcgagcacaccgggcttctcgcaccgcgcagatctcctgcgcctggcccggtggttcaccgagtcctccgacgagcagggccaccggttgttcgccgcgaccttcggtgccttcccgagccggcacctgctgctcggccccgacgagaccgacccgcgagtgggtgcaggcatgtcgtggtggcgggccgatcccgtcgtcgtgcccgtgtcgttgcgcgaacgcggcgaccacacgtccctcggggccgtcggccgactccccgattcgatgcccggccgggtccgggccgacgaactcgcccggcgagagtcgcgccgccgctccgacgccgtcgccgaactgagtgcggcgggcgatctgcacggagcggacctgtcggcggaggcgcgcgacgtcctgctcgacgtcctcgccgccgcgctcgcgggccacctcaccaccgacggtccggtgcaggtggacgatcccgatctcgggttgtcgctgacggcggagcccggcgccgacaccgtggtgcactcccccgacggcgatctcaccgtgcacggtttctcgttgcgcacgtcggtcacggcttcgctcgatcacagtgcggcggcgccatga

SEQ ID NO: 50693 - DNA, 1146 bp, Rhodococcus pyridinivorans SB3094
atgagcacctcgtacgcgagcacggtgtccggggacgtctccggtcggcgggacgcggcgcgggcgctgctgcaacagccgatcgtcaccgccgcgagcgaacgggagaccttcgacctcgttcggcgccacgccccggccctgaagtcgatgttcgccgaccgcctcggataccggctcgtcgtcgaaccgaccttcgcccgtctgatcaaggcaccgctcgggcccacctcaccgcaccgggcgctccgccacgccgacggcaccgagttcggcgcgatcacctacgcgtgtctcgcgctggtgtgcgcggcactgctcgaacccgggaccggcgagagggtgtccgtcgacgacctgctcgagcaggtgcgcgccgatgcgcgcgagaacgggatcgtgttcggcgacccggtgtccgaggagcggaacctcgctgcggccctgcgcgtcctcgaggaatggggcgtgatcgccgagtccggtcacggggacgaggtgagtggcgacgaggtgaggggcgacgggccgcatctcgacgtccaccgcgacctgctctcccagctgctcgacactcccctccatgggatgcccggtcccgcagcggcactcgcacgtcacgagcacgaacccgccgctctccgcctgtaccgcaggctcgtcgaggacccgttcgtcgcgcgcgacgaactggacgacgagtcggcgacgatcctcgccggcgaccggcacgagctcgcccggatgctggagaacgacttcggcctcgtgctcgaggtgcgtgccgagggcgcgctcgcgtacgacccggccggcgtgctcaccgacgaggcgttcccggggtcgggcaccctgaagcacgccagcctgctgctcctggccgaactcaccgaacggttcggcgactcggcggcgaccacattgcacgtcgacgcgcacaccctcgactcggttctcgccgatctcgccgccgcgcgttcccgcacctggaagagcatctatgtccgcgatttcgcgctcctgcgccgggacgtcgtcgctctgctcttccggctcgggctggcgcgcccgcacgagaacggactcgaactgaccgcacccgccgcccgctaccgccccgtccccgccgaaagcaagtgtcgatga

SEQ ID NO: 50694 - DNA, 4227 bp, Rhodococcus pyridinivorans SB3094
atgacccactcgtccgacccgtccgccctcgacgagaactctccaccccgtttcccggatcgctggcgtctccaccgcgccggcatcgtgaacgtgtggcactacctggacgtcgagttcgtcctgtccggtgggcggatgatcctgcgcggcaccaacggatcggggaagtcccgcgccctcgagatgttgctgcccttcctgctcgacgccgaccgcaggcgcatggacgcgacgggcgccgcgaaggtcgatctcgacgaactcatgcgtaccggggcctcggacaccaccgaccgtgtcggctatctctggctcgaactggcgcgccccagcggacatctcaccgtcggggcgcaggtccggcaccgcgccgacgcccgtcgcagcgacgtgcacttcttcacgacacctttgcgtgtcggcaccgagttgcacctcgtcgatgacgcccgcatcccgctctcgcgggagcgactcgccgaactcgtcggtgccgacaacctcacccgtgatccggagcggcatcgcgagaccgtgcggaagtcggtgttcggcctgcacgcggagacgggacgcgaacgctacgacggcttgttgcaactgctgcacaccctgcgctcacccgatgtcggccaccgcatcgacgagggacgcctccctcagatcctgtcggatgcgctgccaccgctgacggagaacatgctcgccgaagcgggaggtcgcctcgacctgctcggtgacacccgccaggaacaggtccgtctcgaagcggcgcacgcacacgtgctgcggttccacgaggtgtaccggcagtacgctgcggatctgctgcgcgccggcgccgagaccgcgcgcgacctcgcgcagcgggtcgtcgagacgcgacgcgcactcaccgtcgcggaagccgaggcggccgacctcgacgcgcaggccgccgccgtggacacccgcctgaaggagcgccgcgaccaggtcgccgaactcgaccgcgcgatccgcggactcgagacccacgagatgttccggtccgcggacgatctcgcgcagcgccagctcgccgtcgatgcgctccgccgcgccgctgagcacgcgaccgccgccgccgatcgcagccgcctgcaggaacggcgccacaccgaccacgcggcccgcctcctcgacgaactgacctgctcggtcacgcgtgccgcgagacggcttgcgacggtaggtcgcgacctgctgtcggtgggtcttccgcacgacaccgcgccgaccacgctgcacttctccgccgaccgtccacccgctgtgctcgagcccgtgcgcaccggcatcgacgacaccaccgagcaggtggtgcggccggtggtcgcgacggtctccctcgacgccgggcacgtcgacgaggtccggggcgcgatcctgcgtgccgccgaggcgacccgtcgccggcgggaccaggcgggtcggcgactgctcgaggcgcgtcgactcgacgccgccgcgcatgcggtccgggaagccgaggcggcggccgaccgcgcggcccgcgacgccgagcagcgtgccgtcgaggccgccgagacggatgccggtgtcggtgcggccgccgccggtctgcagcaccggtggcgcgagtggatcaccgccgaccgcacgacggctctgctgccggaactcgatcgggatcgggtcatcctgatgcgccgactgtccacgcgactcgacgcactgatcgactcgtcccccaccgacgccggcgacacggactccgaggacgtcgacgtcgattcggcactcgccgagctggattcgctgcccgcggctgccgctcggtccgctctgagcgacctcgtcggcgccccggccgatcgcgagcgccgcgaacgtgaggcgcggaccgcgcgcgaggacctcgtccgggaacaggcggcactcgacgcgatcggcgagggaccggaacaggcaccctggcacgtgcgcaccgacggtgtcccgctgtggcgggcggtcgagttcgtcgacaccctcggggacgacgatcgcgccggaatcgaggcggcgttgctctccgcgggtttcctcaccgccacggtcgacggcgagggccgcttgcgtgcactgggcggccaggtcctcgtctcgccgcgcggtgaaccaccggcgcagcccctgtcgacggtcctgcgtcccgaccccgaggccgacgtgccgcgcccggcggtcgaggcggtcctcaacacgatcggattcgaggacgccaccgcggtggcctccgtctcgcgggacggccgctggcacaacggcgttctgcgtgggcgccacaccgccgagaccccgggctgcatcggcaggccggcccgggaggccgcgaccgcggcacggcgggtgcgtctcgacgagatccgcgccgaactcacccggatcgacctggcggtggaacagctgcgcgtcgactatcccgacgcggcgcaccggcgggcgaagatcgacgcgcacctgtcgaccgcgccgacctcgcacgccctgcgctccgcgctcgaacgacgtcggcacgcgtacgcgcatgtgcggtccgcagcgaacaccgcggtggaactgcgtgagcgggcgacgacactgcgtgctcgctggaccgccgagctcgacgcccaccgcacggcgtgcgagtacttcggcgtgcccggcgatgttccggaactcgaggcgctggtcgccggatgcgcttccgcagagacactgtgcaccgagctggcacgcgatctcggtgacgtccttgctgcccacgtccggttcacggatgccgccgaacggtgcgtgcaggccaccgccgagcggatcgactcggaggagatcgccgaatcgtgccgctacgaatggcacgcgaaggccgcggtggtcgctgcccagaccgccgctgtcgacgtcgacgccgccgacctggcgcaggaactgcgtgactcggaggccgaacgggcacgcgccgacgaacagttccggcgcacggtcgcccatcgcgaccatctcggccgtgccgtcgccgaggtgctgcagcgatgtgctgccgcacgcgaacggctcgaccgcgaccgtcgcgaactcgccgcggccgccgaactgctcgccgctcacctgcagctgcccgaactacgcggcgcactcgaggaggatccggagtcggactccgcctctgcccggacggttctgcctcccgtccacctcgaggatccggatcacgtgctctccgtggcccgcaccctgctggccacgttgccgccacgcacgggagtcgacgagaacgcgatgctcgtcgcgctgcaacagttcgaccgcgacctcacggcccggttcgacatcgagcacacggtgacgcacggcgcccatcgcgtccggatcgccggggcgggtgacgacaccacgcccgcgggtgtctcggccaccctgacccggcaggtcgaggacggccggcgggcactgtcgcaacgcgaacacgacgtgttcacgggattcgtgctcggcggtgtggccgacgaactgcgccggcggatcgagcgggcacgacaggtgatcgccgcgatgaacgacagtctcgccgacagccgcacgacgcacgggatcggcgtgaggatcgagtggcgccccggtggcgaggacgccgacgcggcgcggctgacgcagctgctcaccgccaccgagcggtcacccgaggatgcgtccgaactggtcgggatgctgcggcgccgggtggaatccgcccacaccgccgatccgtccgccggctacgcgcagcacctgtcgcaggcactggactaccggcgctggcacgaggtcgaggtgaccatcctcggccccgaaccggaccgggagaggcggatctccgcgcgcgccaagatatcccagggtgagacccgattcgtgtcgtacgtggcgctgttcgcggcggcggacggctatctctcgggcctacccgacaccggcaccgcactgcggctcgtgctgctcgacgacgcgttcgccaagatcgacgacccgacgatcggtgaactcatgggtctgctcgtacggcaggatatcgacttcgtcatgaccgggcacgcactgtggggttgtgtgccggaggtgcccgagctcgacgtctacgaggtccggcgactcgccgacggcgcggccgtgacgacccgcgtgcactgggacgggcgcgtccggcaactccgaccgctcaccgagctgcagacatga

SEQ ID NO: 50695 - DNA, 144 bp, Thermoanaerobacterium aotearoense SCUT27; identical to SEQ ID NO: 50302

SEQ ID NO: 50696 - DNA, 3252 bp, Thermoanaerobacterium aotearoense SCUT27; identical to SEQ ID NO: 50303

SEQ ID NO: 50697 - DNA, 384 bp, Thermoanaerobacterium aotearoense SCUT27; identical to SEQ ID NO: 50304

SEQ ID NO: 50698 - DNA, 1500 bp, Bacillus boroniphilus JCM 21738; identical to SEQ ID NO: 50646

SEQ ID NO: 50699 - DNA, 1167 bp, Bacillus boroniphilus JCM 21738; identical to SEQ ID NO: 50647

SEQ ID NO: 50700 - DNA, 3075 bp, Bacillus boroniphilus JCM 21738
atgaagggtacaagatgggtgatgaaccgtgcagggttactcaatttctggtattacgatgaagaagtgttccactttgagcaaggcaagctactgcttcgcggctcgaatggttctgggaaatcagtgacgatgcaaagtttcctgcctgtactgctggatggcaaaaagtctcctgaccgcctggatccctttggttcgaaggcgcgaaggatggaggattatctccttggtgaaaaggaagtcgtcgaccgtgatgagcggacaggctatttgttcatcgaatataaaaagcaggggtctgagcagtatatcaccactggaatagggatgcaggcgaagcggaataaaggaatcaagtcctggtatttcctcttgactgataaccggaggataggtcatgatttccagcttgcccagcagcacacaggtgaaaaagttccgctttcagcgaaggaattggagaaccggattggccagggtggctatgtagtccattcgcagcgggagtacatggatcttgtgaataagtatgtctttgggttccagtctatcgatgcttatgaggacttaattaagttgctgatccagctgaggagtccaaagctgtcgaaggatttcaagccaacggtcatctacgagatactggaatcagctctgcctcctttgactgatgatgagctgcgcactctctctgacacaatcgaaagcatggaccagacgcagcagcagctggaacagcttcatcgagagtctgaatcgatctacagactggaagcggcatatgatacgtataacaaatatattttagccgaacgggctgagcaatggcagaaggcactgcaaaggagcaatactgccgaaacaaaagtgaacgagtatatatcccagcaacaacagcttgatcaggagattgtcagactaaggattgagcttgaaaagtttcagcagcaaaagcatattgctgagcaggagagcaattcgcttaagcatcatgaggtttggtcactggaggagaagaggaaagacaagcttgatgaatcggcagtaatcgcgaatgagattgctggactgcaaaagcggtgggatgaaaataataaaaaactccgcggcgaatatcagaaaaaacaggctgctgaagatgagctttttcaatatgatcaaaaggaaagagaacttttggccgagcttgcacttgacgcggatgcaacagcctttcaccagcatgaggtgaatgtctcggattatgtacggacaaaggaaattggatttgattttaccgtctggcaaaaagaagcgaaagaccatctggccttgcttggggagctggagaaactcgctgttgaagctgtgaggctaggtgatgaccaaaatcaccttcagcgacaatcatctgagaagaaaaaagaaatcgatgagttgcaaaaggaactggaccattatcaaacgtggttcgaagaggaacaccaaaagcttgaaagtaatgtatttttctggatggaaaaacatccaaagctgctctactctaatgaacttcgccagggaatcgcacgtgcattgcagggattgtatgagcgtaatcgctatgatgatgtccgctctcaattgtatgtagccatccataattatgaagctgaagtgaagagggatgaggctctgacaaagagtcggattcagcaaaaacagaatgatatcagtgaagcagaggcggaattgctgcgaataaaaacccagaagatgcttgagcccgaacgagcaacaggtacggaaaaacaacgggagaaactattgaatgaaaataccgcctttctgccattttatgcagcagtcgaatttcaggagcatgttacagaggagcagcgggaacgcctggaggcagcgctgatgaaaactggaatccttgatagcctgatcactgatcaaacgttttcacctgtggaggatgctgttctggctgctgatccacgcctgcttggctacacgcttgctgactatttgatgcctgacttggatgttgacagtcctttgactgaggaattggtggaccaggtgctgcggtccattccgctggagaatgatgggacaggattccatatcgatcaagacgggtcgtattcaattggctgcatgagaggacatgctccattagggggtccttcgaaatatatcggaaggacgtcaaggaaacggcatcagcgtgagttgatccagacttggacagaaaagatccaggaattgtatcgggaacttgctggattgaaagttgaactcgagcacttcaattctgaacttgaaaagattgatacttggaagagagagataccagatgacaaggtacttttagatataaacgagcaaattttatcaaagaagcatgagttaaagaatgaaagggaaatgctaaaccggattgatgcagactggaagcgagtttatgacaaatatacagaagtaaagcgggttttacgtgataaaggggtccagctgaatattccgttgacggttgatgatcttggaagtgcattgtcagctgggcaaagctacattgattttttacatgagttgaaaaataatgacgtgaaagtttcttctgtcaaaaagcttttacaaacctcgttggagcgaattgatgagcttgagggtgagcttgatgaactgaggggtgagcagggcaggaaggaaagccagcttggtaaaatcaaggcaatgatacagtcgattaacctgcagttgcagcttaaagggattgatgaagtcaggagcaggatccaggaagtccagtatcagcttaatgaggctgagaaagaaattgaccgaattagaagtgatttgcctaaagctgagtcggatcagaagcgcaatcaggaaaagcttgacgaggctcaaacagatttgtcattttggaagcaaatgaccgaagtatgggcaagaatggtcgaagcagagaagaaacgaagttactttgacattgaaggtagagatcctgctcagatttttgcgcagtttgatcctatttttacgaaacatgagcggccgaaattatcggaacagctgacgaaagtcttttttaaatga

SEQ ID NO: 50701 - DNA, 1608 bp, Rhodococcus rhodochrous ATCC 21198
atgaagggcacgggctgcacctccgcccgggtgtggcgcgcacggcaccgggggttgcgcggcacgagggccgcccccgcctaccctgtcacggtgaacgaaacgcagccgcccgccgggcccaccgatccgggggccggggtgcaacacgaccggctccggttgttctcgttcgcgacggccgagaagcgggccgaatacctctgggtgctgcgtgctttcgacctcgcccgcgccaactacgtggtgctgctgcacgccgccgaggtcgcggcgatcctcgagcggaccggctcggcggatccggcggcggcgctgtcggcccaggacgtcgcaccgctgctcgagcagctgcacgcctggggtgtgctcgagcgcagctacgacggcacccgggcggcgtcgctggccgagtaccgcaaccggcactacgtgtatcagttcggccgggccggttatcacgccttccgggccgtggaggatgtgctgcgggcgcgcggcgaggacgcgtcgctgtcgcgtctcgcgctggcggatctgctggccgacctgaccgagctggcggcggcgaacgcggccggggacggagagctcatctatcgcaagctgtcgcggctggacacgacgttgtcggacatggccgagcgggccgcggggttctatctgatgctcggtgacctggtgcgcaccaccgaggtcacgcccgagtcgttcctggcgcacaaggatgcggtgctggcgcacatgcgcgagttcagcacggacctggcccgctacgcaccgaagctggcggccgcgctggcacgggtgcaggagacggggatcgaccgcatgctggggttcgccgccgcgcacgacgagcgggtgctgctgcccgcacccgaacggcaggcggactggcgagcccgatggcgcggcctcgagcggtggttcgtcggcgccggggacgtgccgagcgagtcggagcggttgcgggagggcacgatgagcgcgatcgcggcggtgctggcgctgctgcgccgggtgacggagacccggcgcggcggggtgagccgcgagtcgcagctgcggcacctggccggctggttcgcggccgcgccgagcgaggagtcggcgcacgcgctgttcggagcggtgttcgacctgggccgcccgcgtcacttctccgccgtgcatcccgacccggagacgatcccggtgacgacgtcgtggtgggaagcggcacccgtcccgatcgcccggacgctggccgagaccgggcgcaccccgtcggcgggggcgccggcgcgggtgcagcgcaacgaatccgggatccggcggttgcgggagcggcagctggcggcgcagcgggcgcgggccgaggcggcgcgatccctggcggcgggcggcgtggacgagcgggagttgtccgagccggagaccgaggtgctgttgagcctgctcgacgcggcgctgtcggcgcgcgttccggtcagcggcaccgtgccgggggcgacgggcacgcagaacggggtgcggctgacgttgagcccggccgcggagggcacggtggtacgcacggcgcggggccggctgcatctggacgggctgcgggtgagcgtgcagtga

SEQ ID NO: 50702 - DNA, 1371 bp, Rhodococcus rhodochrous ATCC 21198
gtgagggcccggcggatctcgccgctcgaccgggattcgtaccagcgggcggcgcgcctgatcctgtcgcaccatctggtgaccgcgcagtacccggaccgggccgcgctgccgctgctgcgccggtgggcgacggagctgcgggaggacctgctcgagttgttcggataccggctggaggtgaccgagacgaccgcgcggttgttcaccgtcgcggaccggctcgatcccgggggcggcgcgcgcacggtcaccgaccggcccttcgaccgtcgccggtacgcctacctggcgctggcgctggcggcgctgggacgcgccggcgggcagatcacgctgtcggaactggccgagcaggtcgcgtccgaggccggccaggtgcccggggtggagctggccaccgagcgtgcgaccgaccgggacgcattcgtcgacgcggtggcgtggctcgccgcgcggggggcgataacgctggcggacggcgacgccggcggctgggtgtcggatccggaccggggtgaggcgctctacgacatcgaccggcccgtggtggcggcgctgttccggccgccgcgcgcgctacagcacctgcgctcggtgcggggcctgctcgccgccggtgacggccgcgacggggaccggatcgcggacaccgccgaggtggcacggcgggtacggcgggcgctggtgcagcgaccggtggtgtacgccgaggaactcgacgacgacgcgcggctgcagctggcgctgccacggacgaccgcggggatcgagctgctgacggggctggtggccgagcggcgcgcggagggcgtcgcgctggtcgattcgtcggggcggatgtcggatctgcggttcccgggggtgggaacggttccgcaggtggcgttgttgctggccggggagatctgtgcgcgggtgtcggatccggagtcggtgccggtgcggttgccgaggccggcggatgcggaggcggaactcgaggcgggactggacgcggcgattccggcggccggggtgttcgcgtcgctggccggtgatgccggcgccgggccggcggacacgacaccggcgcagcagccggcgccgacgcatccgctggtcgaggacagctggctggcggagacggcggcgaagctggtcgacgagttcggccgtaccttcgccgcgcagtggcaggccgacccggcgggcctgctggaggcggcggtgacgttgttgcagcggcaacggttggtggcacgggtgccgggcggggtgctggcgttgccggcgctggcccggttccggggagtggtggtgacggtgcgcgaacgcgacccgcgcctcgcgccggccggtgaggattcgaacgaagcggagatgtcgtga

SEQ ID NO: 50703 - DNA, 1162 bp, Rhodococcus rhodochrous ATCC 21198
gtgagcagtgcccatttccggccgacacgtgccgggatcatcaatctgtgggactaccgggaccaggagttctcgttcgcggacggccggctggtgctgcgcgggcccaacgggtcgggcaagaccaaggcgctcgaggtgctgttcccgttcgtgttcgacgggcgtatcgagccgcggcggctgaacccgttcgccggcgaggagcgcacgatgcggtccaacctgctgtaccaggggcaggacagcgcgtattcgtatgtgtggatggagttctgccgcggccgccgggacgatccggaggcggtgaccgtgggggtcgggatgcgggcggcgcgcggcaacgacaaggtcacgcggtggtatttcgtcgtcgacggccgggtcggtgtggacttctcgctgctggatgcggccgatcgcccgctgacgcgacggcagctgatcgaggaggtcggggccgacgcggtcacggaccggccggtggactaccgggcggcgatcgatgcgcggttgttcgggctcgggatcgagcggtacgaccagctgatcaacctgatcctgacgctgcgccggccgcagctggccaagaacctggacccgaaggggttgtcgcaggcgctgaccgacgggttgcggccgctggacgagcagctggtgctcgaggcggcgcggtcgttcgccgacatggaggaggtctcgcgcgcgctggagtcgctggcggcggcggacgaggcggcgcagcggttcgtcgcggtgtatgcgacctacctgggtcagcaggcccgcgccgacgtcgaccggctcggggcgcggttggcggcggtcgagggcgggagtgcggagtggacggcgtcgatgacggcgttcgaccgggccggcgtggagcgggcgcaggcccacgagcggctcgagctcgcggagcgggacctcgagcaggcccgggcgactctcgaggcgctgcagcggtcgagcgcgtacgagggcaagcagcagctcgacgatctggcgcaggtggtggcggacctcgagcgcaccacggccgggcaggcggagcaggcgcagcgcgcgagggcggagctggcgcagcgcgacgaggaggcgcggcgggccgcggccgcggcgacggacgcggcggccgcggtgggccgcgccgaggacg

SEQ ID NO: 50704 - DNA, 1533 bp, Gracilibacillus boraciitolerans JCM 21714
atgattgtcgaaaataatagaatgaaagatggaaaaggtgaatgtccaatgttcaaaagagttaaagaagcaacgtatttgacggcagaaaaagcatggagttatcgtgctattttacggtatttctttattcagcacgaacgaatgagagagtttttatttccggaagagatctatgaatatcttaatcagtatgacgaattcagtgaatatagtgaggaaggtctgcatcaggatcttgatgcattggtcagatgggggggcaatttaattgccaggcaggaactgggaaagtcaagaacagtggaggaattcaaaaagaaacgatttcgctatcaatgcacaccatataccgtggagtttgagcgaatgttactggaattagaagggattggtgagacatttggcggctcactggaacgaacccaatttgaacggttgtatcaatcattgtcgaaaatagcagatatcactttgtcacaagcaccagaaaaaagagaggaatctgcacaaatttgggaagatattcttacctattttcgacaaattactcaaaatacatctgattatattgcttatattaatagtgaagaagtagaagaacaaatgcaaacagaagcatttcttgtatataaagatcaatttaccacctatttacgagattttattgtgggtttgcaaggaacagcattgcaaattcaagaccttttacaatcaatgacaaaggaaaagctacaaacctttttctcacaagtggtccagcataaacagcaagtattccgtttagaagaaattgatggcaagaaggatccatatgaagactatcagcaaaaatggttgagcataaaagcatggtttcttggtaatgagcatggtgaaagtgagtatgaaatgctgctacagcgcacgaatgagtcgattcgcaggattacaagagttgtgcagcgcctaggtgaacgtcatcagcattttcgcagcagaaagaaagattatttacatctcgctaattggtttagtgcaatggataacgtagaagctgcccatcaattatcatctgtagcatttggtgtcttccatacccgtcactttttgatagacgatcattcgacagatgatatctacacggatgtatgggatgaacaaccaatggaacatgaaaccaaaccgattgtaagaaattatcgggaaaagtccagagctggcgcagtaataagtaatcagcaaaaaaaagaagaaatgaaacgagctcatctggagcagaaacaacgagaacggcaacttattgaacaatatgtcaaaaataatcagataaaggtagagcatttacctatagtggaagcacatgtgagaaagctgttattatcatgggttggaaaagcaatggcccgtaaggatcgcaccataaaaacagagctgggtaaacgtgtgcatgtaattttgtcagatgagcggattacactcgaagcagaggatggaaaacttgaaatgccaaaagcaatctttcaatttattgatgaggaggtggatgtttga

SEQ ID NO: 50705 - DNA, 1167 bp, Gracilibacillus boraciitolerans JCM 21714
atggaggaagcaggatttgatgaaaaactgcaagaagctttaggtcttctttttgaacagttctggattctgcggacggaagaaccagccgcatatcaactggttcgtgaacgagaaaaaagcttaaaaagatatctttcagaaaaattcggttttgacttgattgttcatcagcactttatcaaactcgaaaaaattccagttgacccgaaagcatggatgggcatccaagactttcaaacacctcaggattatgcggttttttgttgtggattagcttttacagaacgacgatctgtagatgaacagtttttgttgtctgatcttacagaagatattcaggatatgtatccaggtgatttgccattggattggacgaattaccagcatcgaaaatcattggttcgagcaatgaagaagttggttgaattacggattatgaaaacggtcgatggcgacattgacatgtttgccaatgatcaggagcaagaagtgttgtatgaagtaaccgtttatgcccgttattttatgcgatcgtatccagatgatttgttccgttatcagacgattcgggagatattagatagtgagtggcagagacatacagcagatgccagacgtaaacgagtatatcgcaaattattattttcccccccagccgtatatcgggaaaatgacaatgatcaggattttgattatatcagaaaatatcgaaatcgattgcgtgatgatttagaacagcacacatctttccaactggaaatttataaaaattgtgcactattggcaatgacagaacgaaaacagcgttatacattgtttcctgatcaaaaggcaataatgaatgttgcgcttcattttcaggattatttaagggaacatcgcgaacattattcaatcaacgccatgggtgaaatcaggattaccaataatgaattcactcaattaatcgatattgtgaaaagtcaatatggccatggatggagtaaaaagtatcgcgagatgacgtatacagcaatcgccttggaattattgcaattgtataaggagtgggaactggcagacgttgaggatgatacaggaatgcttgttttaaaaccagcaattgccagaatgaccgggcattatccgaaagattatctgatggaggtgaatcaacatgactaa

SEQ ID NO: 50706 - DNA, 2001 bp, Gracilibacillus boraciitolerans JCM 21714
atgactaaatggaaaatgaatcgagcaggcttattaaatttctggtactatgacgaagagatttttacgttcgcaaacggtaaattattacttcgaggaagtaatggttcaggtaaatccgtaaccatgcaaagttttctgccggtccttttagatggaaggaaatcaccagatcgactggatccatttggctcaaaggcaaggcgcatggaagactatttacttggtgagaaagaggttgtcgatcgagaggagcggactggttacttatttctggaatttaaacgtcaggatatcgaacaatatataacgattggcattggtctgcaagcaaaacggaataaaaaaatgaagttctgggggggtttcatcgtgacagataatcgcagaattggtgttgactttgacttgtataaagtggaacagcacggtggagagaaacagaaaatcccgaggtcacgtgtggaactggaaaatgtgatcgctgatggcgggcatgttgtccaaactcagaaagaatacatgagtcttgtaaataagtatgtctttggttttgaaacgttggagagttatgaggatttaatcaaattattaattcaattaagaagtcctaagctttcaaaagattttagacctaccgtcatttatgaaatcttggaagcagcattaccaccattaacagatgaagacttgcgtcatctgtctgatacaattgaacaaatggaccaaaccaaacaacaaatcgagcagttggatcgagaagtatctgctattaacagtctaaatcaggtatataatacctataatcaatatgtcattacggatcaggcaaatgaatatcttcaggcaaataaacgctatcgcaaagaagaaaaagaatatcagcagcttgagacaacacgaaagcaattagaagctgagatccaacagttagcagaagaaattgataagttatggattgaactgcaaacatatgaaaaaaaagaagaaagacttcgttcccataaggtgtgggatctggagaaagaacgacagcaggaacaggagaaatggaagcaagtagagataacgcttgtgaagaaagaacaccaattagaagatagacgtaaaaaagaaagaaaaattttagatgatcaaagaaatctggaagagcaaatcgagcagcgaaagcaggcaatagaagatcgcttaatcgacctggataatgatgcagatgaagtctcttttgcggaggcacatcaaattaatcagcaagactatgacagatataagcaagataattttgattttacgatgtggatgaaggaagcgagtaatcatttacaggaattagagaatgtagcaaacgaactacatgtgtttgctacactaaaagagcggtatcaggaaaaggataaagagttggcgaatgagcagcagcaattagatgatgttacctatcagaaagatgagtggttgcgcttatttgaagaggataaagaacagaaattaaatgagatacatcaatggctcggacaactggcatggttagatgtggaggaagatgtggttcaaaaatcttcgagagcactccgttccctttatgaaccggatacctatcaggctgtgattgatccaatcagacaagtgatatttagttaccagcaggaacaagggcagttgttatctgaacataaaatcgacgagaaacagctggtagagcaaatcaaagagaaagagcaggagcttgaagagtggaagaagaaaaaagatcccgaaccaccacttgagtccttgtcgaaggaagcaagacaacaattaaaacaggaaaatattccttttgttccattttatgcagcggttgaatttcaggaacatgtaacaaccgatgtgcgaaaacgactggaggcagcattgcttgatagcgggggggttttagatgccttaatcactgatcgaagtgaaacagtaaaacatgatcgaattttaaagccgaatccgaatatgatggctatacactag

SEQ ID NO: 50707 - DNA, 1515 bp, Nocardia nova SH22a
atggacccgattcgcgtaccgccggagatgttccggttcaccggggctgagcgttcgggggtgtatacggcggtgctgcatgcgttcggtgaggcgaacgaacatctcgagaccgcgctgagtctggacaatctgcgatcccggttgccctcggtcgggcggctcgaaccggtttccgaggacgaactggccgaggtgctggaccagttgcgcgcctggaatctggtggatgtcatccagaatcattcggagaactaccgcacggcagtcgactacgaacgtcgcaatctgctctattcgctgaccaagatgggggaggccgccttcgccggggtggtgcacgccttgaccgtgctcgcttcgagcggtgccttgcagaccgcagtactggacgcgatcgccgatcggttggccgatctgattcgcgtagtggagtccggcaccgatcggcaggtctacgtagtgctggccgagctggagggccacttggaggcattgcgttccgggacaaagcaattcaacggcgagttgcaacgtttgctgcgtgccgacggagtggatctcgcggtgttccatgaagtcaaatccgccacggtcgcttacctgcaggagttcctcgacgatctcgacatccgtgcacacaccatcgcgatccggatccggcagctcgaggatttcggagtcgcccggttgcagcaacgggcgctggccggtgccgacctgcccgcgatcagcgggcccgatcctcgcccggcgtggctggaacaacgccgggctcgctgggcggggttgcgtgcctggtttctgcccgccgacggttgcgcaccgcgtatcgatcagctacggcatgtgggacggcgtgccatcgtcacgcttctccaagttctcgatcgcctcaccgaatcgcgccgccgttccagcaatgccgtggcagacttccgcgaactcgctcgctggttttcgatcatccccgccggagacgacctgaatcgcttgtggtccacggtgttcgggctcagcccggcgcgacatgcccacctggcccacccggacccggaactggtgagttatacggcgtcgtggatcgatgccccgggtgtgccggtgtcgccgctgctgcgcagtgcgggcaagaccgaacggatgggacggacgggcgctgtgcccgatgtttcggccctgcgtaaggagcgcgcggccaaggcgatcgccgagcgtgcggaaatagaggcggcttgggagatgctcgataccggcggcatcgtgcggcggctgtcggaattcgagcaactcgaccacgcgatgttccagcgccttctcgacctgatcggccgcgcactcggatcggcaccggattccgagtgcgtccgttcggcccgggcacacgacggccgcatccagatcgtgctgcggcccgcgacggacggcgctgtcgccgaactgcgcctgccgcacggaatcttccgcggtccggactatctcgtcgagattcgtgccgtcggagtccggcgatga

SEQ ID NO: 50708 - DNA, 1257 bp, Nocardia nova SH22a
atgagcgacctcaccaaccagctcgcgatcgccgaaaaggaggaggtaggacgcggcatccgctatctgctcgccgaaccgctgctcactgccaggtcggccccggaccggttcgacgtcgtgcgccgtcgccgggtaccgattgccgcctggttcgacaccttctgtggttggggactcatcgtggagccccgggtgggctacgcgcggttgcgcaaggtccgcgccagcgtcgatcccacgcgtccggctcgtcgacatcgttcccagcgggcgccgttcgaccgccgccggtatgtgctgctgtgtgtcgtcgcggcggagttgtgcacagttccggtgaccaccatcggcatcctggccggcaatgtggccgccgctaccgcgaacgaaccgctgatcggtggattcgacccggtcgaccgttcggagcggcgagcgtttgtcgacgtcctgcgacttctggagtcgttcggagtgctggagcccgtcgacggatcatcggacagttacgtcgactccacgcacgcgaaggtgctctaccgggtcgacaacacattgttgctgcggctgctggtcaccacgtcgggtccgtcgcagctgggcgttccggccgaggaggtgccgctgcggctgcccgacatactcggcgaactcacccgggaacgtcgctacggcgccgccgccgaacctcgaggccgccataccgattcacccgcagcaccggacgcgcagcgcaatctctggttgcggcacagcgtgtttcgccgactgatcgacgaccccgtgctgtacttcgacaccctgaccgatgccgaacgcacctacctggcgaccccgaccggacggcagatgctcaaacgagccgccgataccgccggcttcgtcctggaggagcgggccgaaggggtgatgttcgtggaccccgaggcactgtccaccgaccagaaattccccgatgacgccgccaccgccaaggtcgccgcgttgctgatgctggaagagctgaccggcccgaccacggtcgagcagttgcgcggccacgcggcagagctgttgcagcgattcccccgctgggcacgcacctaccgcaccgacgacggtccccgtgacctggttaccgacgcgctggcggtactcactcagttccagctggttcgcaccaccacggccgggctggtcgtgccgctaccagccgcggcgcgctatcgcgtgcagcagcctcgcatcgccgatcccacccaggagccctcatga

SEQ ID NO: 50709 - DNA, 3993 bp, Nocardia nova SH22a
atgaccgctgccgctcaggtgcgctgggcaccgactcgcgccggaatcctcaacatctggcgctactaccgtgaaattttcgaatttcacgaaggccggctgctgctacgcggtgcgaacggcagcggcaaatccaaggcgctggagttgttgctgcccttcctgttcgatgccagcttgcgggccaatcggctctcgaccttcggcaccaatgaacgcacgatgcactggaacatgatgggcgagggcgcgaccggtgtgacccgcgtcggttacgtatggctcgaattccggcagcaggaccgctggttcacctgcggtgcccgactgcaggccaccagccggaccaccagcgtgcacccggacttcttcaccaccagccagcggatcggcgagccgggcgaagaaggagtgctggtactcaccgattcggaacggcccatcggcaaatccgaactcgatgcccggatcggcgagtacggctccgtctacgagaacgccgcggaataccggaatgccgtgcgtaccacactgttcccggaactgaccgaacaacggtacgacgctctcatcaccgctctactgcagttgcggatgccgaagctgtcccagcgcctcgatcccggactgttgtcgacgctgctgtcgaaggcgctgccgcccttgggaaccgacgaactcgccgacctcgccgaggggttcgagcggttggatgcgcagcgggagcggctggcccgtctcgatgaggaatcgaccgcggtggcgaagctcgcgcatcagcagcggacctatgcccagcgtgtactccgcgctcatgctggggagctgagttcggtgaccagcgaactcgaagcactgtcggaggaggcgcggaaggctgccggacagcatgtcgcggcaaaacaacacctcacaggtatcgagcagaaattgatcgagctcaaacagggccatgccaaactcgtctcgcgccgggaggggctgatgaagtcccacgcctaccaagaagggacaaaactcggggttctgcgcgagaacgtggcgaaggcgaaacggtggcacgacgatgcggagcgccggacccgtgccgccatcgcagcggcggcgagcgcgacggagcagtaccggaatgcccaggagaccgccgaatcgtggcgggaagcggttgtcccggctgccacggaagtacagcaagcagccctgtcctgcggaatgagcgcgactgtggacgagatggccgcgagttcggcacttccggaatgctccggcctgcttcgtaattccgtagcggcgcgcgaagaccggattcggctggtcgaccgccatatcgccgagcacgaaaagaagcgggcgttgagtgaggccgaggaaaagcgtgtcgagcgggcgagggacaacctggtctctgccgatgagcggctgcggacggccggtgacgagcgggaccgggcgctggaatcgttgcggcacgacatcgaggagtgggcgcagagctgctcggaactgcgtgtggcggccgaatcgttggtctccgtcgcggattcggataccgggttcgccgagcgcgtcaacgaggcagtcaccgacgcgcgtgaggcgatcgctgccgcgatcgaagcctgtcgccgggacaaagagggggcggttggggaacggaaacaaccggccgccgaccgggagaagctgctggccgaacaggatgtgcccccggccgtgcctcgctggcgaacggccgaccggtccgtcatgccgggcgcaccactgtggcaactggtcgatttcgcaccggcggtggatcccgccatggccgcggcgatcgaagcggcactcgagtcttccggtctcctcgacgcctggatcggcccccggggcgagattgccggacacgacatcttcgctgtccccgccgcggttgcggacgtgaccggctggtctctcgccgacatgctgatcgtgcacgacgagggcacagcggaggccgaatcggtacgaaaggtgctggcagccatatccttcggccgaactctcactgacggaccgacgatggcggtcgccgccgacggcagctggcgcatcggcactttgcatggcagctgggacaaaccggccgtcacctatatcggtgccgaggccaggaggcggaaccgcgagcggcgcctcgccgaactcgatgcggttattgccgaaatcgacaggcgcatccagggttacgacctgcaactggagaagctggcgatccggcgccggtccgtcgatgccgagatgcgggcacaaccggaccgcagcgcactccgctccgcccggacagccgttgcggacgcggaccgccaccgagatgctgcggaccaggcagtgcgaaccgcgatcgccgatttagcacgcgcgcaagcagcacagacagctgcgctgcaggacctgcatatgtgcggtgccgaaagcgggttgccgaccgaaacgccggccttggaagcactccgcaacgcactgaaagcgttcctgggaaaagcacagacgtggctcgactatcgccgcgaactccagcgtgccgagtccgacgagcgagctcgcgccggaggcgccgacgacgcggacgatgaggcgcaacgatccgccgaaggcgaggagcgcgccgcatccgaccaccgggacgccgaagaacaattgcgcgcggtcgaggactccgtcggcatggaataccacgaggtgttgaacgagatcgaggcgttgcggactgaaatctccactgccacagattctttggaagcagaacgcaagcgtgagcgcgaatggactggtaaagaagccacgttgggcaccaaggccgaggccgccgcgcaggctcaccgggacaagaccgccgaacgcgacctcatcgctcagcgattccgggagctcgctggcggaaacctgcccgcagacgccgagatccccgaatccgagagtttccgcgacctactcaccgggtccggtggtgtccgtgcggccctcgacgccgcccgcagagtgacggctgcctggcccaccgtcccgcacaccgcgaacaatatcggcgacgccctacgccgcctcagcgaatccgtgcacgaatgccgcacctcactgagcgctcgcgccgacctggacctcgaatccgacggcgacgtccaacttttcaccgccgtcgtcgacggcgtgcgcgtcggcgcggcaggcctgaaggacatcctgcggcgcgaagccgagcagagccgcaatgacatcacccagcacgaacacgaactgttcgacaagacactcaccggcgacacccgccgtcacctcgcctccagaatccggcaggcgaacgcactcgtcgacgccatgaacgagcatctgtcccgcgtgcgcaccgcctccgacgtaggcgtgcaacttcggtggcaggtcggtaaagacctgccaccgggcaccgctgcggcgcgcgaactgctcttgaaggaccccgcccatctcaacgatgccgctcgtgaagccctccacaggttcctgcgcgaccgcatcgaggaagccaaggccgccgactccgccaccagctgggaacagcaactggccgaggtattcgactacacccgatggcaccagttcaccgtccgcatcgaccgcgggcgcggcgagggcttccaggaactcaccaagaaactgcacggcgccctctccggcggcgagaaggccatcgcgttgcacctgcctttgttcgcggctgttgccgcgcactatcacgccagccccacggcaccccgagtgatcctgctcgacgaagtgttcgtcggcgtcgacactgccaaccgcggccagatcttcgctctactgtccgcactgtcactcgacctgatcctcacctccgaccacgaatggtgcaactacccggaactgagcggcatcgccatccaccagatcgtcacgggtgacgacagcgatgctgtgacgacagtccggttcacctggaatgggctggagctggaggcagcggcgtag

SEQ ID NO: 50710 - DNA, 1209 bp, Nocardia nova SH22a
atgggtgggacggtgcacgagctgtcggccgatctgatgactgtctggcgagcgttgcatcatcgattgggctccggcaccgcggtgacatcggtacggatcggaccgatgaacacggccgaacgtgaggctttggccgatctgctgggaatggcgacgctgtcggccgagatatgcaccatccgtgtcgatcggctcgattccgcgttgacagaggctgtggggatgaccgcgcgacaggtggcagagcgactggtcgggccgatcgagaatcggtcggcagcgcgcgccgagcaggcggcccagcgccgggaattgtgggactggctggaaacccacccggtggtgctggcacaacccgcgctggtggaatgggcccgtgcgatgcgtcgcgccggaattgtcggcggttcggtcgacaagacacgagacttcctggccgatgcgctggccgtgctgcgggcaattcccgcggcgggagtgtcgttacccgtgttcgccgagcagacggcgcgcgatccacatgcgctggacaacggaactcgcctgcacgcggctgtctttcgcgctctggcgatcatccacgattgcgatgtgcccggcgatgctgtcggaatgcgcggtttgtgggagatggctggcatagccgacgacgagctgtcatccactgttctggtcgcggggctgtgggtgaccgctcctggttcggtgttggaaggtgttctgcgagtgtgcgtcgcggcaggttcggccgcctctctgactctgcagcagatacgtggtgcggatcggctcaccgtcgtcccggaagtggttcgggtggtggagaatccgagcgtgctcgcgaccgcgctgcaacgcttcggaccttcgtgcccgccgatggtgtgcaccgccggttggccgtccagcgctggtattcggctcctggatctcctggcggccgcgggtgcccggctcgaataccacggtgatttcgatggcgaaggcttgcggatcgccgcacacgtgatcgcccggaccggagcacatccgtggcggatgggcgccgcggactatctcgcatcggtcggccaggtcggtccaccagtgggcagggtgtcggaggctccctgggacagcgatctggccgcgcatatgcggcacaccggagtctcggtgccggaggagcgggtcgtagggatcctcctggacgagctgtcgacgtag

SEQ ID NO: 50711 - DNA, 1644 bp, Nocardia nova SH22a
gtgcgccgcggcggtgtgcggacaggtattacgctcgtgccggtgaccgagtccgctgaccgattgctgcccgccgaacccgtgctgttcgacggcgaccgtggcgaacctcgcgggcccgagatcgcgggcgcggaccggctgcggctgttctccttcgccaccgccgacaaacgcaacgactatctgtgggtgctgcgggccttcgaccaggcccgcgccgcctacgtcgtgctgttgcacgcgggcgaggtcgccgacaccctcgcccgcactccgggcgcaccgcgcccgaccgccaccgagatcggccctctgctcgaacagttgcacacctggggcgtgctcgagcgcagctacgacggcacccgcgcggccaccctggccgaatatcgcaaccggcactacgtctatcagttctcccaggccggatatcaggcgttccgggcggtggaggaggtcgtgggcgcccgcttggacgaggcgtcgctgtcgcggctggtcctgccggaactgctggccgacctcggcgcgctcgcccaggccaaccgcgccggagacgccgaacgggtgtaccgcgtgctcaaacggctcgatgccgcgctgtcggaactggccgaccacgcggcgcacttctacctgaccctcggcgatctggtccgcaccaccgaggccaccccggaaacctttctcgcgcacaaggatgcgctgctggcgcacatgcgcgagttcagcatggatctggcccggtacgcgccgcggctggccaccgcgatcgccgaggtcgacgacaccggcgccgatctgctgatcgcccgcgccgccgcctgcgacgagcgcatactgctcgatctcgccgaccgcgaagcggattggcgagcgcgctggcagggtctgcggggatggttcgtcgcggtccgcgagcgcgccgcgaccgatgccgactccaccgccacgaccgaggccgagcggctgcgggaggcgaccatgagcgccatcgcggccgtcctgtcgctgctgcgccgggtcaccgagacccgcaagggcggggtgagccgggaatcggcgctacgccatctagccggatggttcgcggccgcgcccaccaccgacagcgcgcacgccctgttcgacgtggtcttcggactgggccgcccgcggcatctgtcgatggaacatcccgacgccgacgtcattcccccgcaccgatcctggtgggaagcggcgccgttggagatcgcgcggacgctggccgagaccggccgccagcccactcccggcgcgcccgcccggctggtgcgcaacgacgccggggtgcggcggctgcgcgatgcccagctcgaggtgcagcgcgcccgtgccgccgccgcgatgtcgttggccagcaccggaatccacgaccggatcctcgacgaacgcgagaccgaggtgctgctgcgcctgctcgacgcggcctccacggcctgggtgccggtgtccgggcgggtgggcacgagcggctccgacagcggtgtcacgctgaccgtgtcggaacatccgggctcgacggtggtccgcaccgcgcgggggttactgcatctcgatcaccggcggctcgaggtgcgcgagaatgcgcgcgcccgcaccggatccgggcggtcgtga

SEQ ID NO: 50712 - DNA, 1404 bp, Nocardia nova SH22a
atgcacgcgcggaccatcgatcccctggcgctggacagttatcagcgtgccgcccggatactgctggccaaccatctggtgacccgcacctatcccgaccgcatcgcgctggcgctgatccggcgctgggccaccgaactgcgcgacgatctcgccgaactgctcggctaccgcctcgaggtcaccgagaccaccgcgcggctgttcccggtcgccgaccggctcgacggcgggcgtccggcacgcactcccggcgaccgcgtcttcgaccgccgccggtacgcgtatctgtcgctggcgctggccgcgctcgggcgcgccggtgaccagatcaccctgtcggaactcgccgatcaggtggccgcctacgccggtcgagtggacgggctggacctgtcgaccgagcgggccgccgaccgggacgcgttcgtcgacgcggtggggtggctggccgcccggggcgcgctgagcctcgccgacggggacgccggtgggtgggccagcgatccggaggccggtgaggcgctctacgacatcgaccgctcggtggtgttcgctatcttccggccgccgcgggcactgcaacatctgcacagcgtgcgctccctgctgtccgacgacaccgaaccgggcgccgggcgcaccgccgccgcccggcgggtccgccggatgctgctggaactgccggtggtctacaccgaaaccctcggcgccgcggaacgatccacgctcggcagcgacaagctggtggcggaggtggaactgctgaccgggctgcgcgccgaacgccgaggcgagggcgtcgcgctgatcgacacctccgggcggttctccgacctgcgcttccccagcaccggcacgctcgggcaggtggcattgctgctgatcggcgagatcgccgatctggtcctcgacaccgaccacccgctcccgcgccgcgaacgcccgggcgacgccggtcggttcgccgacgaactcgatgccgccattcccgcggccaccgtcttcaccccgctggccacaccggaacccgccgacaccgacagcaccgccgacgaggacgaccccgaacccgtcacccatcccttcgtcggcgacgactggatccgcgccaccgtgcacgcgctcaccgagcgctacggttcgaccttcgccgcgcagtggcaggccgatgtgccgggcctgaccgccgaggtgatctcgctgctggcccggctgcatctggtggaggtggtcgacggcggcctgctggcactgcccgcgctggcccgctaccggggcacggtggtcaccgtgcgcacccgggcggagagcgagctgttcgcgtccgcccgctcgctgggcacgcatgccaccgacccggtgaccacgagcccgaacaactcaggagaggcgacggactga

SEQ ID NO: 50713 - DNA, 4224 bp, Nocardia nova SH22a
atggacctcatgcacggtggtgtccgattcattcccacccgcgcgggcatcgtcaacctctgggactaccgcgaccaggaattctgcttcgccgacggcaggctggtcctgcgcgggccgaacggctccggcaagaccaaggccctcgaggtgctgttcccgttcgtcttcgacggccgtatcgagccgcggcggctcaatccgttcgccggtgaagagcgcacgatgaagtcgaatctgctctaccgcaaacaggattcggcgtattcgtatgtctggatggagtgcgcgcgcgggcgcaagtccgatcccgaggtggtcaccgtgggcatcggcatgcgcgccacccgcagctccgacaaggtgacgcggtggtatttcgtcgccgacggccgggtgggcgtcgacttctcgctgatcggccccgacgatcggcccttcacccgcaaacagctcgccgagcagatcggcaccgacgcgatcgtggaccggccggtcgattatcgtgcggcgatcgacgcgcgcatgttcggtctcggtgtgcagcgctacgaccagctgatcaatctgatcctcacactgcgccgcccgcagctggcaaagaatctcgatccgcgcgggctgtcccaggcgctgaccgacggcctgcgtccgctcgatgatcagctgatcctcgacgcggcccggtcgttcagcgatatggaggaggtgggccgcaccctcgagggcctggtcgccgccgactccgccacccgcgcgttcgtcggcgtgtatcgcaaataccttgcggtgcaggcgaagtcggatgtggagcaggtgcgtacgcgcctggatgccgtcacccacggcagtacggcgctgttcgcggccgcggcactgcggctgcggcgcgacaccgagcgcaccgccgccgaacatcgcgccgaggaggccgaccgcgcctacgagcaggccctcaccgaccgggagacgctgcagcgttccagcgcctacgaaggcaagcagcagctcgacgatctcgccgacgcggtgcggcggctggagacctccgcggcggtccaccgcgacaagtcgaccaaggcccagcaggccgccgaccagcgcgccgaggagttcgagcgcgccgccgccgcggtcaccaccgccgtcgccgcgctgacccgcggtgaggacgagttgcgcgcggcggccgaggaggccggaatcgcctgggccgcactgccggaacaggcccgcaccgaacagctcacgaccaccgtgcgcggtcatgccgaggaacgcgacgcggatgtgcgcgcggtccggcaggccctgacgggcgccgacgccgccgcggccgaccgggcccgcgccgaacgcgccgccgaacgcgccacccaccaccgcgacaccgccgccgccggactggccgaggcggaggccgcggtgacgctggcccgctcgaataccgctgcggcactgcgggtctggtgggacgaccggcgggagctctactcccccgccgcgggtctgttcgaggccctcgacgccgggctcgcccaggccggagccgatgacgccaccggcctgtcccaggtgctcgccgagcacaccgaaccgctcaccgaacaggtgcgggagcgacgacggcaggcgcgcgcggcggccgaggacgccgagcagcgcgcgtccgcactgcgcgccgaacatcgggtgatcgcggccgaacaggacgacgcaccaccaccggcccccgggcgcggcggtgcgcgagccgaactcgcgggtgcgccgctgtggcgtctggtccggttcgccgacgacgtcgacgccggacgcgcggccgggatcgaggcggcgctgcatgcggccggactgctcgatgcccgcgtctgtgccgaagatgctgtgccccaggaggactcggacacattcctgattccgctgcccgattcggcgcggccgtccgccccgaccctggccgacatcctcgtcgtcgaggagggggtcggtgacggtggggacacgccgatcgcggcggtgccgcgcgagcgggtcgccgccgtgctcgcctcgatcgcggtgcgcgagaacggagtcggcgcggagtccgccgaggcggtggcggtggccggtgacggcgccttccgccagggcgtgcaactgggacgtcaggacaagccgcaggccgagttcatcggaacgaccgcgcgggcgcgacggcgcgaacgtcggctggccgaactcgcggagggcatcgccgcggccgaggcggccgggcgcggtgccgccgacgaggccgaggaggccgaggccctgctgtcgcaactcgcctccgccgccaaggaattgccgcgtgccggtgcggtcactgccgccctgcgcgcggtgtcggaggcggccggagtgctgcgctcgcacaccgaggccgccgcccaggccgaacaggacctggaccaggcggtggccgccttcaccgccgccgacaagaaggtgcgcgcggtggccgcggcccgcaacgccccgcgcgatccggccgagctggacgcgctcgccgccgccgtccggcacttcgagaacaccggcaccgccctgctgcggctgcgcggcgattcccagcgcgagaccgagcgcagccgcgaggccgccgaccgcctggccgaatcccgggatctggccgaggctttcgccgaggaggccgaggccgcgcgggcgggctacgaggagcaggtgcgcaagctcgacaccctgcgcgaggcgctcggcgccgatgccgccgatatcgatcgcgaactcgagcaggcccgcgaacgcatcgatgccgcccgcgccgaacagcgcgctgcccgcaaggccgccgccgaggcgatcgaggcggtcggctcggccgaaggcgcctatcgggccgcgcacgaggcgctcggcaccgcgctcaacgaactgctcaccgacatcaggcaactcgcgccctacgcccgccccgatctgctggcgctgctgggcgctcccaccgacagccggtggccgtcctcaccggccgcctggtcgaccgccgatcagctgctctaccgcatcgagtcgggcgggccggataccgagaccgcggtgctgccgcccgaggtacacgccctgttcgacgatctcgccgccgcgacgacgtccgtgcgcgccggtgaggccgcccgcaagtccacccgcagcgccgtcacctcggcactgcaggagttcgatgccgcgctcgccgcggcccgccaggactaccggctgcagtgggatgccgccgacgggctgaccgtggtgcaggtgcacgacgacgacggagtcgccgcactcgcggatttcgccgatcggatcgcgtccgcccgcgccgatcaggagttgctgctcaccgacgccgaacgccgcatcctcgaggacgcgctgctgaccggtctggcacagcagatccacgaacgcaccggcgacgcccgcgatctcatcgcgcgcatgggcagtgagatgaagcagcggcggatgtcgtcgggcaacaccatcggtgtgcactgggtgctggcggacaatctggcggagtcggcgcgggcggtgtgcaagctgctcgaccgcgccgccgccgatctgactcccgacgaattggccacggtgcgtgcgcatttcgcgtccgagatccgggcggcgcgggcggcacatccggagcggtcgtatccggagatcctggccaccaccctggactaccgcacctggcgggtgttctcgttcaccctcgtcaccgccgacggctccgaggaccggctcaccgtcgcccggcacagcgcgctgtcgggcggtgagcagtcggtctcgctgcatctgccgttgttcgccgccgcgcacgtgatgctcgattccgccgatccgcaggccccgcgcctgctcgccctcgacgaggccttcgcgggcgtggacgacaacggccgcagcgaattgctgggcctgtcggtcgatttcgatctggatctgttcatgaccggctacgacctgtggatcacctacgatcatgtcccggcgtgcgcgcactacgatctggcgcactcggcggccgagaacaccgtcagcgccaccctgctggtctgggattcctcggaactgctcgccgaacacgacggctcggatctgacgaccgcgctcggctcccccaaccggcgccgcaccccgcacacggtggagggcgggatcaccttcgacgaagccctcgaaccgaccgtgtga

SEQ ID NO: 50714 - DNA, 1533 bp, Mycobacterium avium MAV_061107_1842; identical to SEQ ID NO: 50666

SEQ ID NO: 50715 - DNA, 1182 bp, Mycobacterium avium MAV_061107_1842
gtggccaccgcgttgcggctgttagcccgtcaaccatggttgatcgccggccgcgacgatgcggccatcagcgctgttcgccgcaacctcatcggaatgcgctcagtgcttaacagactgggctggcggctgattgtgcaacgcgacgtggttcgcctcgaaaagtcaccgccgacgcgtgcgcgcctagccgattgggcagtgcaggcccccaatccgctcacctgctcgtgggtgttcctacttgccgcggccgcggaaagtctgccgcaccaggtcactatcggccaactcgttgaagccggcaaagccgccgcggccgaagccagcatccctcttaccgccagccgcgccgaacgacgcgcaatcacccgcgccgttcacgaactggccgatcgcggagtcatcgaggaaaccgacggtcagatcgactcctacctcaacgacgacaacgcaccggttcttctgaccatcttccacacccgactgctgcacctgatcgccaacttcgacccaaccaccgacccgtcactggacccggggcgctggctggacaatgttgcgcgtgaacccgacgtcggccggcggatgcggcgccgactcgtcgatgacacctgcgtgcataccatcgatctcgacgaggcggagtccgactggttgtcgcgacgcctgcgtagtgatgatggcgcaccattagcggccgcgttcggtttggcgatcgaacggcgcgccgaaggtgccgcgtttgttgttcccgacgacgcgtttcgctggcctagtgagctcgggcaagtcccgtttccggccgctgggatcatcccccacgtggccatgttgctggcggatcacattgcgatcaaaggacaaactggggggccgggtcccggatggcgcggcatgccgcgcgtagcagtcctcgctgaattgacccgccttgccgagcaacaaaccaccggcaaaggcggttggcccgccgagcgggccgctgaccccgccggcttgctcaccgacgtgcagcagttgctgaccggcgtcgggctactgcggatcgtcgactgctgctggtggttgtcacccgtcatgggccgctgggaaccacccccaaccgcaccagccccaacgccagaccgtgaattcggcacaaagtatcgaccagaaccttgcggtggagaacccagatga

SEQ ID NO: 50716 - DNA, 4119 bp, Mycobacterium avium MAV_061107_1842
atgacaactatcgtccccacaccgatggaacaatcccaacccgcaccaccggcaggcaatcgggcgcggttcggcggacgctggcggctcgtgggcgccgggctgtcgaacgtctggcgctacggtgacttggtgctgtcggccccgtccgggcgcctactcctgcttggccccaacggcaccggcaagaccacagcgctggaagcgctgtggccgttcctactggacttagacaaagcgaagctgcgcgccggcacatcgcgcaccactacgctcacctcgctcatgcgtgaaggcagcaccgacaggaagcggatcggatacgcgtggttgacgttcgccggacccggcgaccaagctgtgcactcctacggcgcccgacttgtgttttctgatggatcaacgccgaacgtaaagatcgagccgttcaccattcccggtgagcccattaaagatatgccgttgaccggccccgggcccggtcggccggcgatcaccaccgctgaggccttccgcgagcaggtcgaggccacgggaggaaccgtattcaaggacgaagaggactacctcaacgcgttggccaaccatgtattcagcaccgccagaagggatttaatcgccctggcagaccgcatccggaaggtccgcaaccccagcctgctcgctggcaccagccccgatcacgccgctcagtcccttcgcgaagccctgcccggcgtatcaaacgacgtcattgaagccaccggcgaagcgctggccgcaacgaatgaaacccgcctagctttccagcgcgacgtcgaagccgctgcgacgctggatactttcgctgaagtttggtccggccacgccgccgaggtggccggcaagctggcggcggccgcggcctgcgcacgcgatgtgtatgacaacgcccgccaggccgcagatcgatttcagggccgccaccgcgatgccgttaccgcacgcgagcgggccgaggctgacctcagagtcgccgagcaggaccacgacaacgcagtcgccgaagtggagtcgatcgagaaatcccccgcctacacaacgcttgaacgactcgccgacctcgccaacacctccgacgcccgcgacagcgaggcccaagccaaggtcgacaacctccaccaccgggtccgcacactccgccgtgacggtgcacacctcgccactgacgcccaccagctcgccgcggccgtgacggacataaccgccgccgccgccaattacgacccgcacacggccgcgaccgcacccacagtggtggtcagcacccgctcccacgcgatcttgaccgtcggcgaagacgccttcgaccctgggccgccgctggagttgagcatcgatcctgagcagctcgacgcggcggcccagtcctggatggcgatcgccagcgaccacgaaacccggcagacgaacgccgagctcatggtcaggcaacatcgcagaaccgttgcgcccgtccagcaggatgcctcgcacaagtcgcagcaggccgaccaggccgaccagcacgcagacaacgctgcccacgagcgtgaccgcaagaccgaacgagccctcgacgccgcatcgactgctgtgcaggagatctcacgctgggcttcggccaacgccgacctgacggccaccccggagtcggatgcgctcgatgccgacaccatcacccagaccgccgccgcaggtcctgccgcgctgctgggctcggcatcagattggaaggactcagcgcgcaacattgcggccaaaaccgccgccgaactacggcaaaccgccaaagcctatggacagcaggcggatacgaagcacgccgcggctaccgatgcccgccaccgcgccgaggaactgcgcgccggtcggatgatcccgcccccgcggccgccatgggccggcgatgccgacgaagacgcgttcgcttacgccctgcaatggaaaaccggcaccgataggcgactccaggcgctggttgaatccgcgctggaatccgcaggtcttctcggcgcgactctcaccgaggatggcggctgggctcacccctgggctgtgaccgcgaccacaccgcgcgctgcccacagcctgaccacactcatcgaggccgattcacagcaccggctcgccgcagcggcgactgatgtccttgaacgcattacactggtggacaccgcctctgcggctctttcagatgtccccgctgtcattggaaccgatggaagcttccggttcggtgtgatctgcggacgggcccccggcgccgatgattccgccacgcttcccgagccgagccacatcggggccgcacaacggcgcgccgccgcattggcggaagccgaaaggctcgacgacaccgccgatcatctcgacagcgaagccgcagccctagagcaggcggccgaggagctgcgtgaccacgcgacccgaacacaggcgcgggccgagtccttcccgagcctcaaggaactcgcgaaggcagaacaagaccgcagcgccgctgcgcggtgggccgagcagcagcgcgccgtcgccgataaggccgccgcggaagctgaaaccgcccgccggcaggccaacacggtcgccgagcagtggcgcactcaggccaaatcgatgggcctatcaaccgaccccgacgaggtcgccgccacagcagaatcggaagcccgcatcaccaccgggcttcgtaacgcggccgcggcgctaagcgcccagcagtcaaccctgctgagcctgcgcacccgcgccgacagccatgccagcgaccgcgcggccctgactgccctgcatgccgccgcaacaaccgctcatgctgccgcgcggaaagccaggctggtctacgagcggatgcagggcgcacacggcaaggccgccgctgaactctccgcgcgtctcacggcggcgcgtgcgcgcgccaaagaaacccaggaattggtcggtgcggcggttgtactcaaagacgaagcgcttgtagaagaggcaaagcttgagcaggccgccgccgacgcgatcgaaaatgccgcggccaaacaaccggccgctagcgcggcgctggccgagctacgaggcctgctggccgtgcaggacgtcgccgaagtcgtgctgcgcgacgcccaacactccagcagcgacgcgttgatcgcacaagtcactgccgccgtcgaaggaaaaaccaagtggggcaagaaaaaagtcgccgacacttacgagaccgcgcgcgccgagcttcgcatgtgggccgtggaccgcactgaaggtcacggcgatctcgacacgtaccaatgcacctacgatggcatcgcctacacaccgtgtgcagccgctgccctggcacgcaggctggccgaccgcgccggcgagcaactccacgaggccgaagaggctgcgctgcgcgacttcatcgtcgggcggctacccagcgcgatcggcatcgcctacaccgagctgctggactgggtcgattcagtgaacaccaagatggaatcggcgtcggcgtcctccggcgtcggggtgcgagtgaaggtcagcctgcgcgatgacctcaaccctaaccgacgcaccgtctaccacctggcgtgtaagaaatccgcggcgactcgaacacccgagcaggacgccgagttggcggcggcgctcaagagcctgctagatgcggccgacggcgaaaccgacaccgaaaaggtcaagcaagcagtcgacatccgtgactgggtacgcgttgactacttcgtgcaccgacccggtcaagagcctaaacgctggacacgcaacaccggattgtcgggaggcgaacgccgcctggtgatcctggccccgatgatcgcgtcgatcgccgcgctctacgacaacctgcccgacacagcgctgcgccttgccgcactcgacgaggtgcctgccgaggtcgatgacaccgggcgggaaggcctggcccgctacatcgccgagctcgacctcgacgtcatctgcacctcttatctgtgggaaggcgcccccggtgcatgggacggcgtggacggtcacgacctggaggctggccccgacggtgtggtcgtcgcattcccgatgctggtgcgcgggattgagcccctgcccggggatccagacgaatctccatga

SEQ ID NO: 50717 - DNA, 432 bp, Mycobacterium avium MAV_061107_1842
gtgttcatcaccgagaatccctcggtcctagccgccgcagcagacatggtggcccgaaaccccgactgcgccaacccgatacggctggtgtgcacgatgggcaatccctcgcagaccgagatcgcggccattgcaggccttgccgcggctcgctggaacatcgccgtgcgcgccgacttcgaccctgccggcattcgtaccgtgaccgctattctcaacgccgtcccgacagccaaaccctggcgcatgacggccaccgactacgccacatccgggcccaccgccccgatccgcgagctggtccctcccacaccatgggagcccgagctcgcggaacagatcagcgccaccggctgcgtggcattcgaagaagcgctcatggagcacctgctggacgatctacggcgaggcgctccgcctaccgcatcttga

SEQ ID NO: 50718 - DNA, 1545 bp, Xanthomonas arboricola pv. pruni str. MAFF 311562
atgacgctcccagcaacagcccaagccgatctgtttcgccacgtcagtgcggaaaaggccgcgctgtatcgctgcgtcatggattgcttcgccgctgccaagcggcagttccggctgcatcttcgccccgacgaagtattggaagacggcgactggtcgacgttggtcagctcggccacgccccggatggaagaaatccaggcggcgctggcgcaattggccgaatggggcaacctcgaatcccagccggacaccgcccgtgtcgccagcatcagcgacttctatcgcgcgcgcttcgtctaccggctctcgctgggtggcgaggcggtggaagccgcgctagcagccttcagccgcacgctgcgccggcgcgccgagttgcagagcgtcgcacttgaggacatcgccctgcgcctgaaggcgttgctggccctggccgacagcgccgaacccgatgccgtcaaggtgcacgaaaccctgcgcgacctagttcgcgtgtttgagagcttggccgacaacgctcaggccttcatggctggcgtcggccgcggcatcgaattgcagcaggccgacgccgcagccgtgctcgcatacaaaaagcggctgatcgactacttggagcgtttcatcggcgatctggtcgcgcgttccggcggcatcgcccagcacatcctctcgctgcagccgcgcatcgaatcgctgctgtggctggccgcccagcgccaggcccgcgacagcgcaccgggggacgaagcagagcaactcgatgcagtcacgcgcggctggcaggcctggcgcgaacgctggaccgggctgcgccgctggttcctagccaccggacacgcgcccgcgcagtccgaattgctgcgcgccaaggcacgcgcggcgatcccgcagctgctgtcagccgtggccacaatcaatgagcgccgcagcggacgcagcgaccgctctgcggacttccgcatgcttgcgggctggttcgcagcctgcgaggacgatgcccaggcccatcgcctggcgcgcgcagcattcgcgctcaacccggcccgccacttctcgttgaaccccgaactggcgtccggggcgcaggacttgcccgccagcacgccttgggccgacgcgccgccgttgcgcattcatccgcgcctgcgcgaatacggccaggcatcgccacgcggcgcactgccacgggtgcaggcgcgcgatgccgagcgccaattgctcgccgctcggctacacgaggaacatgcgcaaatcgaagccgctcgccagcgcctggccaacggccgcagcacgcgcctgtccgagttcggcacactcgacccgcatgccttcgccctgttcctcgggctgctgggcgaggcgctgaccgcgcaatcctcgcccgacgccgaggtggacgtgcccagcggcgacggcctgctgcgcatccgcatgcagccgctggccgcggacagccgggccagcatccacaccgccaccggcacgttcagcggccgcgaccacctgatcaccatcacccgcacggacgcagcaccatga

SEQ ID NO: 50719 - DNA, 1269 bp, Xanthomonas arboricola pv. pruni str. MAFF 311562
atgagccccagcgacagccgcgcgaacagccgcagcatcggccgccagcaggcccgccaccgcgacgacgaacgccgccaggcgctgcgcgccctgctgatgtcgccgctgatgaacccggcgcacgagggcttcgccgccgtgcgccgccacgccgacgagctacgcgcctggttcgcgcgcgagaccggctggacgctgcacatcgagcgcgactgcgcgcgcctgtacaagcggccggccgacctgcgcgacgccagccgcggcctgccgggttacgactacaggcgctacgtgctgctgtgcctggcctgcgcagtgctcgaacgcgccgacccgcagatcaccctgcgtgtcctcggcgagcggctgctgacgctggccgccgaccccgcgctggaatcgcgcggctttcgtttcaccctcggcgccgcgcacgagcgccgcgaactggtcgccgtctgccgcagcctgctggagatcggcgtgctgcagcgtgtcgccggcgacgaagaaggctacgtacgcagcagcggcgaggcggccgagggcgcggacgccttgtacgatgtgcgccgccgcgtactggctgcggtgctctcagcggtccgcggcccgtccacctggcccgccgagcaggccccggtggacctggacgcacgcctagcctcgctggtaaccgagcaccagcccgacagcgaggaaggccggcgcacggccctgcgccaccacctcgcacgccgcctgctagacgaccccgtggtctacctggataccctcgacgccgaattgcgcgcctatttcgtcaaccagcgcggcgcgatggccagccgcctgtgcgaggccaccggcctggtcgccgagcagcgtgccgaaggcctggctcttgcggacgaggatgcagaactgaccgacatcgccatgcccgccgaaggcaccgaggcccatgccaccctgctggtcgccgagtttctgtcccggtcgcgggaaaccaccgatgcgatcaaccgcgacgacgtcatcgccttcctcgccaccgcccgtgaagcgcacggcagctactggcgcaaatcggcgcgcgaacccggtgccgaacgcgaactggccgacctggcacttgagcgcctgcagaaactgcaactcgcggcatgcgacgagacccacgtccagcccctgcccgcactggcgcgcttcgccctgggcgaggccgatatccgccagccagccgcgcccgcgaccgcggccgcccatccgtccctgttcgaatga

SEQ ID NO: 50720 - DNA, 1287 bp, Xanthomonas arboricola pv. pruni str. MAFF 311562
atgaccgacaccacctccccgtccttgcccatccccaccctcgcacgctggcagccactgcggctggggctggtcgagctgttccactacgacagcgaggagttctggttccgcgacggccacctgctgttgcgcggcaacaatggcaccggcaagtccaaggtgctctcgctgaccctgccgttcctgttcgacgcccagctcaagccctcgcgcatcgaacccgacggcgacgccagcaagaagatggcctggaacctgctgctgggccgcctcgaccgccgtatgggctatgcctggctggagctgggccggctcggcgccgacggccagccgcactacctctcgctgggctgcggactgctggcggtggccgcgcgcccccaggtcgacagctggttcttcgtgctcgaacagcagcgcatcggccaggacatctggctgatgagccccgcgcgtgcggtgctcacgcgcgagcgcctgcgcgacgcgctgcaggaccatgggcaggtgttcgataccgcgaccgcctaccggcgcgcggtcgatgagcgtctgttccacttggggccgcagcgctacaccgcgctgatggatacgctgatccagctgcgccagccgcagctctccaaaaagccggacgaggccaacctctctaacgcgctgaccgaagcactgccgccgatctccaccgacctgctggccgacgtcgccgacgccctgaaccagctcgaggaataccgccgagagctggaggagtacgaggccttggagcgcgccgtcggccagttcaaccagcgttaccagcgctacgccgccacccaggcccggcgccgtgcacgcagcctgcgcagcgcgcagaccggcttcgacaacgccagccgcgacctcaacgacggccgcctcgccctgggggccgcacgcgccgccgaaaccggagcgacacaggcgcaacagcgggcggaaaatgcgctggccggccaccgcagccggctcgacgagttgcagaacgacccggccatgaccgacgccaaagccctggacaaggcggcagccgacgccgagcggcagcaacgcgacgcgggcgccgcccgcactgaacgccagcgccgacagacccgcttcgagcaggaacagcaggccacacggcagcgcgcccagcgtgcagaggatgcgggccacgcactggccgaggcccgcacacaggccagcgcagcggccgaaaccgctggcctggtgtccaactacggcgccagccgctggcccacggcgaggcggccaccctga

SEQ ID NO: 50721 - DNA, 1554 bp, Ralstonia solanacearum P673; identical to SEQ ID NO: 50173

SEQ ID NO: 50722 - DNA, 1251 bp, Ralstonia solanacearum P673
atgagcaacgacagccacgacatcggccgccagcaaacgcggcaccgtgatgacgaacgcaaccaggccctgcgcgcgctgctgatggctccactgatgaccccggcccacgagagcttcgccgccgtgcgccgccacgccgatgaactgcgcgcctggttctcgcgcgaaaccggctggacactgcacatcgaacgcgactgtgcgcgtctgtacaagcgtcccgccgacctccaggacgccagccgtggccttcccggctacgaacgccggcgttacgtgctgctgtgcctggcctgcgcagtactggaacgcgccgaaccacagatcacgcttcgcgtgctgggcgatcggctgctggcactggcggcagatccagcgctggcctcgcgcgactttcacttcacgctcggcgccacgcatgagcggcgcgagctggtagccgtctgccgcagtctggtggagctgggtgtgctgcagcgcatcgcaggcgatgaagaaagctttgtgcgcagcacaggagacgctgcggagggcggcgatgctctgtacgacgtgcgccgccgcgtactcgccggcctgctggcggccgtgcggggcccgtccacatggcccgtcgaacagacacccgtgagcctggacgaacgcctggcatcgctggtagccgagcacatgcctgacagcgacgacgggctgcgcaccgccctgcgccatcatctcgcccgccggttgctggacgacccagtggtctacctgaacacgctggacgccgaactgcgcgcctatttcatcaatcagcgcggcgccatggcgacccgcctgtgcgatgccaccggtctcgtggccgagcagcgcgccgaaggtctggccctggtggacgaggacggcgaattgaccgatgtcaccatgccagccgagggtacggaagcccacgccacgctgctggtggccgaattccttgccggccgcagccgtgccgatgcgcaggcacccaccacgctggacgagatcagcgcctttctggccgacgccagaacgcgttatggcagctattggcgcaagtcagcgcgcgagcccggtgccgagcgcgaattgacgaatattgcgctggaacgcctgctcaagctgcaactcgtggcacgcacggctgaccgcattcagccgctaccggcactggcccgcttcgcgctcggcgagaccgacatccgcacgccgatccgcgctgcaacccaatccaatttgttcgaatga

SEQ ID NO: 50723 - DNA, 4131 bp, Ralstonia solanacearum P673
atgaccgatacgcaatccccggcactaccgatcccgaccctagcgcgttggcagccgctgcggctggggctggtcgagcttttccactacgacagcgaagaattctggttccgcgacggccgcctgctgctgcggggcaacaacggcaccggcaaatcgaaagtgctgtcgctgaccctgccctttcttttcgatgcgtatctcaagccgtcgcgcatcgagcccgacggcgacgccagcaagaagatggcctggaatctgctgctgggtcgccatgagcggcgcatgggctacgcgtgggtagaattcggccgcgtaggcgaagatggaaggcatcgctatctcacgctgggcagcgggctctctgccgcggccgcgcgtgcacaggtggacacctggtttttcttgctggacgaacagcgcatcaaccaggacttttggctcatgagcccaacccgggtggtgctcacacgcgaccgcttgcgcgaagcactgcaggattgcggacagtttttcgacaccgcagccccctaccgccgcgccgtggacgagcggctgttccgcctgggttcgacacgatacgcagccttgatcgacacgctgatccagttgcgccaaccgcaattgtccaagaagcccgacgaggccagcctgtcgaaagcactcaccgaagccctgcccccgatctccaccgacctgttggccgacgttgccgatgcgctgaaccagttggaggagtaccgtcgagaactggaggaatacgaggcgctggagcgtgccgtcggccagttcaaccagcgctaccaacgctacgccgccacgcaggcccggcgtcaggcccgcaatttgcgcaccgcgcaaaccggattcgacaacgccagccgcgaattgaactcagcgcgcgacgcgctggagactgcccaagccgaagagaagcgtgccgaccaggcatggcaacaggccgacgccatgctggccgccaaccgcacccggctcgaggaactgcagaacgacccggcgatggccgatgccaagacgctggagaaggctgacgccgatttccggcagcgcgacaaggaagccaatgccgcacagcaaacgcgccatgacatgcaaacccgcctggagcgcgagcggcaggccacgcgcactcgtgcccagcgtgccgagcacgccgggcgcgcgctcgctgagtcgcgcgaagatgcggtgcaagccgccgagcgcgccggcctttcgcatgcctactcggcaaacccgttggccagtgccaacgcccgtctgctgcaaccgctcgcgttggacacagcacgccaggacctgcgccgcgccggcgtcgagcgacgcgcagaggtggcactgctgctgcgccactgcgacgaagccgaccacgcggcacaagcccatacgtacgcgcgaacccagcgcgacgaacgcgccgacgaggcggaagccgctgccgcacagcgagaagaggccgatgccgccgtcgatcggcagggccggacactgctcgatgcgtggcaacgccatctcgacggcctgcggcaattccagtgtcccgatggtgccaacgcactggaagcgctggcagcctggacagtcagcctgcagggcgacaacccggcccgcaccgcgctgcaccgcgcccagcagaccgcaagcctacgtctagcgcagcgccaggccgcactccagaacgatcgtcatgcgctggaacaggaacacgacaccctgcaagacgagcggacgcgtcttgaacagggagaagatgccgtgccgcagcccccgcactggcgcgcgcccgacgtacgcgtcggccgcgccggtgcaccgctgtggcaattagtggacttccaccccggtacgtccgcagccgactgcgccggcctcgaagccgcgctgcaagcctcgggcctgctcgacgcctgggtgacaccaaatggcacgctgctggatagcgacggcggtgatgcgctgttgttgcacgacgcgcaatggctcacccgcgaacgccagccacagtcgctggccgcttggctacgccccgcagaagcagcaaacggcgcttcgccccgggtcgatcccgccgtggtgcagcacctgctcgagggcgtggcctgctgcgctgaggacaatctcgccgcagaagcctggatcgcccctaccggacgattccggctcggcgcgctggcgggcgcatggcacaagcccggcgccgagttcatcggctacgccgcccgcgctgcggcacgcgaacgccggcagcacgaaatcggcgcacgcctggacgcaatcgacgctgccctcgcgtcgctggcacgagacttcgttcaactcgatgccgatcagcgcgaagccgcccacgaatggcaattcgccccgtctgacgacagcctgcgcgccgcgcacattgcagctgtattgcatgcgcgcgaattcgacatggcgcggcagcgcctggagcacgcggatcggcaactgcgcgccgctgcccagcaatgggaacaggctcgcgaaatcctggcacgcgatgcagaagacctggctcttccccccgcgcgcgatgccctacgcgccatcgaccaggcgctgcaaacgtttggagactgcttgcacacgctagccgtcgacgcgcgcgagctgcgcgacgccctggccgaacacgccgagcaattgcagcgtgagcaacaggccgagtccgacaccctgcacgccgtcgagcaattcgccgagcgcgaggccctggccgaggaagcccacatccgcctggaaacgctgcgcacatctgtcggcgccagggtggaagagcttcaacaacgcctcagcgacgttcgcagcgccgtcacgagcggcgagaccgaactcaggcaacagaacggcacccggcgccaggccggcgaagcacgcgcccgagccgaacaaaaggtcgaagcggccgaagccacgcttgccgaacgcatagccgcacgccagtacgccgtggggcagatgcaaggcttttccgccaccggtctgctggtcacggccctgcccgatgccgagttgccgtctatgcacgcgccctggaccattgagccggcactggcgctggcacgacgtaccgaacaggcactgctcaacgtcaaggacgatgacgaagcatggacccgcgtgcaaagccaagtctcgcaggattacaccgaactcggccgcgcactggccgcgctgagccaccaagcccaggctgaaaccaacgacttcggcctggttgtcagcatcatctaccaaaaccggccagaacgtcccgaccagttgggtgcacgcctggccggagaaattgcccagcgccgcgagctcctcacggccggcgaacgtcaagtactggagaaccatctacaggcagagatcgccagtgcggtgcaaaagctgctgcgcgatgccgagcgtcaggtcaaggccatcaacgacgaactggacaagcgcccgacctccaccggagtgcgcttccgtctgcagtgggaaacgctgcccgaaggtgcggatggcgccccggtaggcctcgaggccgcacgccgccgcttgctcaacaccagcacggatctctggaccgccgaagaccgccgggtggtcggcgaaatgttgcagcagcgtgtcgccgcggagcgcagccgcgccgacgcggaccaaggcggcagccttctggatcaattggcccgagcgctggactaccggcgttggcatcgcttccgcgtgcagcgctgggacggccaatggcggccactgtccggtcccgcctccagcggcgaacgcgcgctgggcctgacagtgccgctattcgccgccgtctccagctactacacgcaggaaagctacgcccacgcgccgcgtcttgtgctgctggacgaggtttttgccggcatcgacgacgcagcgcgcgcgcactgctgggcactgatccgcgagttcgacctggacttcgttgtgaccagcgagcgcgagtgggcctgctccgccgaactgccgggcgtagccatcgcgcaactgcaacgccacgaaggcatcgacgccgtacatgtctcgcgttggacctgggacgggcgaacccggcggcgcgaagacgacccgaaccggaggttccccgacgcatga

SEQ ID NO: 50724 - DNA, 1563 bp, Kutzneria albida DSM 43870
gtgtcggaggagcgggaagggcgggaagaggacgatctcgacagattgtcctgctacacctacctgactgtggagttggcacacatctacatcccgatcatgaggatcttcaccagcaccctgctcaccgacctgtcggccaccgaggtccacgagcgcctcggtggcgtgggggtcgatgtcgatgtggacacggtgcccgagttgctgaagcggctgagcacgtgggggaatctgatccccagcaatcgggtgggcaccgtcgtaagcatccgggactacgagcgtggccgacaccgctaccagatctcgcagcgcggtgagatggtgcagcggcaggccgagcaggtgctcaccagttccgacgccgcacgcgaggtgagcagggaactgctcagcctcatctcgcagggtttgctgaggttggaggaccagctcaaccagcccggtgacattgacctccaactggcgttggaatgcatcagcacggtgttcgtccagttcaccaccttctccgaatcggtgcgcgacttctacgccttcctggcgcaggtgctgttccgctacgacctggacaccgccgagtacacagggttcaaggacctgcttctggactacgtcgaagcggtgaccgacgagatccggcagtactccaccccgatcgcggcgtgcctccagtggctgtttgacaagggcaggctcaccgagttgttggcggcgatcgaccatcggtacgagggcctgcagcggctgagcgagcacaacccggaactccaggtccaacgcagtcgtggccgtgatctggccgactggcatgcgctgcgggcgtggttctccgacaacgccagcgaggtcgaccacctgcgggacacgaccctgcacgcgctgcacgccttattggccaatgccaagcggttgatccgtagtgcgagtggcgagctgtcccgtcgtaccgggttgctgcgtcttgcgaagcagttcgaccacgccgaccaggacctggccgatgctctcttcgtcgcggccttcggtctctacgcaccggtccatctggggatcgaggcatccgccgaccaactggccacagccgccaccagttggtggcacgcgcccgctgtcgcggttccggtgagcctgcgggagcggggaagccgagcaccgcgtggtcgcatcggcttggtcgaggatcacagcaaacagcaggaagcgctacgactccgggccgcgcaactggtcgagcgcagacgggtcgcggccatcgagctccggcagtgcggagcggacttcgtgacccgaccgctgtcggccgaggcagcgcagctgttacgggaactcctcgccagggcgctgaccgccgccacaccggagccgaccaccctcaccgccacggacggcgatctggatctccggatctggctgcggccggccgccgacgcgtccacccgcgtctgtggggcggacggcgtcttcgagatctacgggcacgagctgttcatcggccgcatgtcctgcacgttcccggacgaccaggaaggagaggagtccgatggcatacgatcctga

SEQ ID NO: 50725 - DNA, 1251 bp, Kutzneria albida DSM 43870
atggcatacgatcctgacccggatcgagccgaagaccggcgtacggcggccagggctctactgcggtccccgctgatgactccggttacccacccgactgcgtttcccctggtgcggcagcatgctggctggctccaaccgcagttcaaggaggtgctcggctaccaactcgtcgtcgaagccaccttcgctcgtctgtacaagtccgggctgggcgccgccagtgggtactgcctgcgacgtcccagcggtgtgccgttctccccgcggtgctacgcctacctcgtgctggccttgtcagtgttggtaaccgtgccaccgtaccggctgctgtcggagtttctggtcgatctgcacactgcggcttctgaagccggtgtgcgcgtggcgaatccgggcagcattcacgaaaggcggtcgatcgtcgcggcactgcgtcagctcatggcctggcaggtgatcagtgaggtcgagggatcggtggtggactacgccgaggacaccaacgccaaggtcctcctccagttcgaccaggaactcgcccgctacctggctcatcggaggatcaacgaagccaccgaggacccggcggagctgatagctctggcggagcagtccggtcggggcggcaccccgcacgctgttcggcgacgtctggtggagaccagtgtcgtgtacctggacgatttgaccgccgacgaacgcgcctggctgcggcaccgccaacggcgtgagcaacagcagttcgaggagttcctgggactcgatatggagatccgtgccgagggagcggccctgatcgaccaccagagcgtgatgtccgaactcgtgttccctgggacgggcactgtttcgcaggccgcgttgttgctgatcagcagactggtcgaggagcatcggccgatgcatgcgggtcaccccgcagccgggcgggaactcgtcatcggcgtcccggtcggtcaggacgagatcacccggatactgcgggaactggtcgatgtacaccggaggcactgggcagccgactacgtggacggggtggccaaactgcgcgtggacgtcctgaacctgctcggccggctccgattgctggtgccggatcaacccacccgagccgatctcgaccgatcgacgccgacggagaaccggccggtgaccaatgtggacggagcgcgcggcggtggcggcgaatgggtcctgctcgcggcggcttcccgtttcgccgtctccggcgaacagggccgatcgtga

SEQ ID NO: 50726 - DNA, 4221 bp, Kutzneria albida DSM 43870
gtgaacgccgcactgggcgcattgccgatgaccgaaccggccgcactgcgtaaccccagccgttatcggctcaaccgtgccggtgtgtgcaacgtttggcagtacagcgaccaggaattccggttcggggacggccggctcctgttgcggggcaagaacggtgctggcaagtccaaagcgctggaggtcctgctgccctacctgctcgacggtgacgcgcgccgcatcgacgccaccggctccacgaagaccagtctgtcctggctgatgttggacggaatcgatccgatcaaccgtatcggctatctgtggttggaattcgagcaggtggacgagaccggccagttgcggtggctgaccctgggcgcggcgatcaaggcctccaaatcgaccggcgaggccaggcccacgttcttcgtcaccccactgcgggtggcgcacgatctgaccctggtcagcgcggggcaaccgctgccggtcgacgtcctgcgcgagttggtcggtgccggcaactgcttcgaacgtccgtccgagtaccgcctgcgggtgatgcgggacctgttcgggctcacggagccggcgcgttaccgtaacctgttgcacctgttgtaccggctgcgcaggccgaccatcggtgaccgcatcgagtccggggaactccaagccgtactggctgaggcacttccgccgctggacgacgaggtgatcacccgggtggcgcacaatttcgacgacctcgcggcggtgcgcgcggaactgagtcggctggagtcggtcgacgaggtgctcaccgagttcctcaagcactatcgaggctacttgcacggtgtgctgcggacccgttgtgaggccgtgcgttcggaactggccagcctggccgaccggcgcaaggacgcgggacgagccgaacagcgcgtcgtccggtccacagcggacgagcaccggcatgtagcgcgccacaccgaactggtggaccagcgtgaccaagccactgccgagctgacagcactgcgggacagccatgcctaccgcggacttgaacaactgagggaccggcggtccgcagtggcggcgatcgctgagtcggttgctgccgcatgggaactcgtacgactggcgcaccgctccgagcgaagtgctgccgagcgcgtgaccgtggccttgaaccagttgggtacccgagtaactcgactcaaggcgacgcagcgtgtgcaccagcagcaggtgacctcatgcggcttgccggcggccgtactcggtaccgcgccggaactccgtacgtcgagcctggccgcagcggtggaatgggcggccaccgatcccaccggacgcacggagacgttgcgctcggattcggtcatcaccgcggactcggccacggagagcctgctgggcacgtggcacaccgaactcaccgagggtcggcggtcctgtgcgtcgaggctgcgcctggccgaggacctggatcgcctgctcgcggcgatggctgcggcggaatcggctgccgaccaggctcgtaccgaacgcgaacgcctcgacgccgaggtggaacaagcggacgccgccgcgtcgtccgctcttgaggccaccgctgtgaccagtcgtgactaccagtgcaccgtcctggaatgggcgacgcatccgctgcgactgggcgctgacctcagcaatctcctcgccgtggtcgcggtgtcgaccgatcagagcctgcccgcgggcgaccgggtactcgacgccgacacaccggcggaggtcgcactcctcgcacagcgtgccctggaaccgatccagcagcacttggaacacgcccgtgacgatgctcttgtcgacgaagcgcgggtccgggccgagttctcggctgtgcaagaggaactcctctcctggcaggaacatcgtgatcccgaaccgccggcgtcgccctaccgtgccggtgccaggcttcccggcacgggagcgccgttctacttgctggtcgacttccgcgacgaccttcctgcgggccagcgggccggactcgaagccgccttggagtctagcggtctgctggcggcttgggtcacagctgggggccacgtccttgcgccggacacccacgagaccgtgctcgagccgggagtggccgtcgacggccccaacatgggagacgtcctacacgtcgtggacgccggctcgagcggggtcagtcccgctcaggtggagcgcatcctgcacggcgtcgaactcgttcccgcagggggacgaccacgaacggccaactggctgtcgaccgacggcagatggcaactgggggtgttgcgcggggcctacaccaagcgatcagtggaattcgtcggggctgctgcgcgggcagcagcccgagcacgccgcattgccgaactggagtctcgacgagccgagctggactcggcgttgttggaacacgcgcaacgacgtgccgtgctggaactggactgcggcctgctgaggacagcagcccgtaccgtaccggtcggcagggaactggcctcggcctggacggctctggaacagcgccgctcactgctgagagcggtcatcagtgaactgagcagcgctcgtgttgtcgcggatcgcgctacccagaaggccaatcgtgctcgcggtgcggcgggggcggcggcgagcgccgataggtttcccgtcgaccgggaacgattgcgggcggtgcgtgatcagttggcccgcatccgggacggcctcgacagcttctgtcaggaagtcgatcagacaagccgggatgccggagagcttcccgctgtcgtcgaggactggcgttgcgaggcaacggcgtcggaggaggcccgtcgcggctacaccgagcggcacacgatgctcgtgtcggcgcagttgcagctcagcactttggaagaggcaatcggtactgctgagtcagacctgctcgcgatcgagcaccgggccgaggaccggtaccagcaagcggttcggcaactgccggcggtcgcccagcacaggcaggtagcgcacgacgacctgatccgtgcccgggccgaccgagaggtcgctctgcggctgttgcgagatcaggaaaacgtggtcatcggagccgggggattgctgcgcacgccgttgggggacaacgcgttgctcctggcagctgacctgtccgagatcactccggcggttgatgcctacgattccgctgccgaggccgatgcccgggaccggctgatcgcactacgcgcacttgccgacgccacgtcgggcagccttcggggacagtcggccgacgtgggggacacaggcatcctgcgccgccacgaaaccgtccgggaccggctcgcgggtggctacgacatcgaggtgtccgaagaactgggcatcaagcggttcgagttgcgtgacgacgctggccggcacgacatcgcactggtgcagcaacggatccacgatgaggccgaacgagcccggacccgattgacgacacgggagcaggagaccttcgaacggttcctgctcggtgaactcggcgatcacctcgccaggcagatcctggccgccgaggcgctgaccaagcagatgaccgagaccctgaaggacgtgcacacctcccatggcctcggcgcgagcctcaagtggcaactccaggccggtgcgtccgcgaacatccgcgaagcagcggaattgctccggggaccagcggccatgcggaccagagagcagaccgcgaggttgcgcgacatcctccaggaggagatcgaacgccatcgacaggagacgccgaacgaggactacaaagcgcacctgacccgtgcgctggactaccgctcctggttcgagttcgacatccgggtcaccgacgccgccaagccgggaccgggacgcaagctcaaccaacggaccgcaatgagccagggggagcagcgcgtcgtgtcctacctcgtgctgttcgccaccgcggcggcccatttcggctcgctagcgaaggtggcgccgaatgcgccacggctgatcctgctcgacgacgccttcgctaaggtggacgaacccacccacggcaggttgctgggcctgctcgtcgcactcgacctcgacttcgtcctcaccagcgaacgtctgtggggctgcttcccctcggtaccgagcctgcacatctacgagtgcctgcgcgatacccaggtcaggggcgtggccacactccacttcacgtgggacggcagcaacaagcggctggtttcgttgtga

SEQ ID NO: 50727 - DNA, 1281 bp, Kutzneria albida DSM 43870
gtgaacgcccgaaagtcggctgtggactggctcgcccagccggcattggccaggatgtggcacgccgtacgcactcggctggagcgcaacggcgtggaggcgaagggacgaatccaactggtcgacctcaccgatgtcgaggccgaggcgttgggcctgctgttgggacagcggtgcaataccgcgctgacgcggatcagtctcgcgacactcgaccgtcggctccgtgactccgcagcggaatgcgggctcatcgagttggtcggaatccttgctgggccattgcaagatctcaaaggagcgcgcgcagccagggctgcgcagtgggccgaggtctggacggctggcgcggacctgttggcggcccacgacctgggagatctcgcgggatggttggaaacagagcgatcctcgggtggtttgcgacggctcgatcccggcgaggccgctgaggaacttcgcagggccatcacggtgctcgccaggttgtccaccggggacaggtcggtcatcagccgcacggaactggcagcccaggtgactggtaatgcgcacgggctggacgacgacaccgtcctggcgcggctcgtactcagggccattgccgtacagcgtgctcaacccgtcccggtgactgcaggcgatcggcgcagcctctggcgtgccgcggatgttctcgccgaccaggtctcggccaccgtcctgacctatgggctcgcgccgcatggccagggatggcgggaaggcgccttacgcgaccgcgctgcccacaacgccgaggtccacctcaccgcacgggacgtgtgtgcgattcgctgggaactaccggcgcacgcccgagaggtctgggtttgtgagaaccccaccgtggtcgaggccgctgcggacgcacggtgcggtcggcccctgatctgcacttcgggcaatcccgcgaccgtggtgctgctcctgctcgacgcactctgcgccacaggggcacggttgcactaccgaggtgactttgactggcccggcatcgcgatcgcgaaccgcttcctcacccgttaccgtgcggacacgtggctgatggacgcggtgttctacgactccgcggtgacactggcccgtgatcggggtagcccactctggccgttgtcggaagcatcggtggaggcaagttgggatccggagctggcgcccgcgctggccgcgatcggcgtggccgtccacgaggagtccgtactggagcagctcgtcgaccacctgaatccgcccgagcgggcgacctcaactggatcttga

SEQ ID NO: 50728 - DNA, 1623 bp, Kutzneria albida DSM 43870
atggggggcgtgaccagcgaccagcgcgacgaggagagcactgtcgccgacgtgccccggcagccgttcgcgcacctgagcgcgcccaacgcggcgttctaccgggaggtgctgatggccttcgcccgggccagggaccggttcatcgtgcatatgcggcccgaggacgtcatcgcggatcttggtcggcccggtgagaccgagcaggttgtcgcggcgctgggcaagctcacggagtggggcaacctccgagccgaccccgacaccagccgggtgaccagcgtcgaggatttccatcgcgcccgttacctgtaccagttgaccgccgcgggccaggcggctgagcaggcgatcgcggtctacgaagaggccgtcggccggcgcgggtcgttgcagtcggtggcgctgtccgacatcgccgaccaattgcggtcgctggccgaactcgccgatcggtcggccgacctcgaccccgccaaggtgcacctgctgctgctcgcgctcgcggaacggttcgccgggctggccgacaacgcgcaggcgttcatggcctcgctgcgccgcgtgatcgacttcgccgacggcgacatcgacgcctttgtcgcctacaagcatcggctcatcgactacatcaaccggttcatcgccgacctggccaatcgcggggccgagatcgccactctgctcagcggtgtcgagtcagccggtgtcgaacggctgctgctggtcgcggcgcgccgtgaggccgctgactccgtgcccgacctgcccaacgacggcacggagaatgacgaccctgccgccgcctacgaggcggccatcggcgaatccctggccgcgtggcgcaaccgttggcgtggactgcgggactggttcgtctcggctgactcacgccacccgtcgcaagctcggttgctgcgcggcgccgcggtcaccgcgatcacccagttgatcgacaccgtggccgcgttcaacgaacgtcgatccggccgctcggaccggtcggccgatttccgcacgctggcccgctggttcgccgaggcgccggacgacgcggccgcgcacgtgctgtggcgaacggcgttcggtctcgcctcggcccgtcatctgacggtcactcgggaaaccttggccgcctgggaggaggaacagccagccgccgccacgccgtggcgggacgccccgccggtgcggatcagcccgcagttgcgcaagaccggttcatacgagcgacgtggccagcccaatcgggtcgcggaccgtgcggagcagcgccggctgctggctgagcaggccgaccgcgaagccactgagaccagcgcggcacggcggcgactgtgcactcacgggccggtgccgctgtccgggctgggggaactcgacacccgcgcgttccggctgttcctcggtctgctgggggacgcgatgtcggcccgcctgcccggcgacaccgaggtccggaccacgacaagcgacggcacgatggaaatccgactgtcccttgtggagggcggcgacacggtgcggatcgccaccgaggacggggtgttgtccggccccgaacaccttgtcgagatcatcgaactggcgggtgcccgccgcgcggtgggagcgatggcgtga

SEQ ID NO: 50729 - DNA, 1224 bp, Kutzneria albida DSM 43870
gtgatcgatgacgaggccagggcgcagcgccgtgccgcgttgcgcgggctgttggtcaagccgctgttggttgcgggcgtcgacgacgagacgctgcggctggtccgtcggcatgtcgccgaactgcgcgagtggctggccgcggagaccggttggcgactggcggtggacgcggaatcggcgcgcctgttcaaggctgtgcccgacggcggcggtggcgacggcactcgtccggcgcgcgacggcaggggccggccggcgttcggccgtcgccgttatgtgctgctctgcttggcgttgtcggtgctggaacgggccgacgcgcagatcaccctcggtcgacttgccgagggcgtgctggtcgcggccggcgaaccggaactggccgacgccggcgtcgtgttcacgctgagccgccgggacgagcggtccgatctggtggcggtcgtgcggctgctgctcgggctcggtgtgctggaacgcgtcgcgggcgacgaggacgcgtacctgtcggacaccagggacgtgctctacgacgtgcgccgcagggtgctcgccgcgctgctgaccggcgtgcgcggcccgtccaccatcgacgcgcccgaccacgaccagcggttgcgcgagttgaccgacgagccggtgcccgacaccgacgacttgcgtaaccgggcgctgcggcaccggttgacccgccggctgctcgacgacccggtggtctactacgacgagctgtccgaggacgagcgtggatacctggtcggccagcggcacgcgatcacccggcggatcgaggaggccaccggcctggtcgcggagatgcgggcggaagggatcgcgatggtcgaccccaacgacgaactgaccgacgtgcggatgcccgagcagcgcaccgacggccacctgacgctgctggtcgccgagtacctggcagcccaagtggacactccggtgccggtggaccgactgcgcgcgcacgtccgggcgatggccacggagcaccagaactactggcggcgtggggtcaccgagcccggtgccgacgccgaactgctcgcgatcgcgctggacaggctgcgtgcgctccggttggtcaccgacatcccgggcgagcggccgtcggtgctcgcccggcctgcgatcgcccgctacgcggtgcaggcgccgaccgtccgcaccggaccggcacaacgacgatcgacgaggaaggccgatcgcacgtga

SEQ ID NO: 50730 - DNA, 4101 bp, Kutzneria albida DSM 43870
atgccgaccccgcatcgcgagcgctggcagccgctccgcgctggcctggtcgacctcttctactacgacgtcgaggagttccacttccacgacggcaggctgctgctgcggggcaacaacggcaccggcaagtccaaggtgctcgcgctgacgctgccgttcctgctggacggggaactgtccccgcaccgggtcgagcccgacggggaccggaacaagcggatggagtggaacctgctgctgggcggccgacatccgcactcggaacgactcggctacacctggctggaattcggtcggcaccgtggcgacggcacggccgaataccgcacgatcggcgcgggactcaaggcggtcgccgggcgcggcatcgcccggcactggttcttcgtcaccagccagcgcatcggaccggccctgtcgctgctcagcccgactcgggtggcgctgaccagggagaagctgcgggatgccgtggacgggcacggagccgtctacgacaccgcgtcggactaccgtcgagccgtggacgaggcgctgttcggactgggcgcgcaccgctacgaggcactggtcaacctgctgattcagctacgccaaccgcagttgtccaagaagccggacgagaagctcctttcccgtgcgctgaccgaggcgttgccgccactggacccggcactggtggccactgtggccgaggcgtttcgcggcctggacgaggaacgggaggccctgcgcggactgaacgaggccaaggccgccgcggagaagttccttggccactatcgcaagtacgccggcgtggcggccaagcgcggcgcgacgccactgcgccagacgcacagccgttacgaacagctcggccgggaactcggcgaggccgacgcggcctacgagcacgcgacccaggcgctggagtccgtgcagcggcggctcgacgagttggccggcgcccgggacacgctcgaggcgcggcgtgtcgccctgcaacagagtccggagatgcgcgacgccgaagccttgacggcggcgggccaggaatcccagaagctgggccggttcgcgtcggcgcgggaggccgatcgggtgtccgccgtcgacgtggctcggcgccgggaacgtcagttggaacgggcacggcagacggccgagacggacgacacggccttgcggtccgcgcgggacatcgcggccgacgcggccgacgcggcgttgatcaccagcgggcacgcctcggtgctggccgcactggcggcggacgagccgccgtacccgaatgccgaccgagccggtactgcgctgatcgagtcgcggacgacggcgatcgcgcgggtggagcagttgttggagcgggcgggcggggcggaggccgcgctgcggggcgcacgcgtcgagctggaccgggtcaccggtgagcggcaggccgccctcgaccggatcactgtcgccgaaggtgtcacgtccgaatgtgccggtgcgctcctgacggcgtacgcccactatctggccggggccagccacgtgctgatcaccgaccaggacgacgtgctcgccgcgttggacgcgtggacggacgccccggccggcccgaaccccgccgccgcggtcgtcgatgaggcagtccgcgcggccaccgccgaactcggccgggcgcaagccgatgcggaccgccgccgtgccgacgccgaacgagcgcgcgacgaggtcgccgaggagatcgctcggctggaggagggcggccacgacgcaccgcccgtcctgtacacgcgtgaccagcagggccgggagggccgacccggcgcaccgctatggcgggtggtggactttgcggagggcctgcccgatgagcatcgggccggtatcgaggcggcgttggaggcggctggcgtcctggatgcctgggtgacgccggaaggtgagctgcgcgatgccgttgacgacgtcgtggtgcgcgccggtgcggtcgtgcccggcggtggtctgacggcggtgctgacgccggccatcgaccgggccgacgcgacggcggccacactcaccgacgccgcggtgaccgcagtgttggccgggatcgggctcggtcccggcgcgaccacctgggtcggcgttgacggccggttcgccaacgggccgctgagcggctcgtggcacaaacaggcggcgggttacatcggcgagggcgcgcgggagacagcccgccgggcccggctggaccggctgcgcgagcagttggccgtgatcctggctcagctcgaccagttgacggcgatcgagaccgacctggccgaccgggccacggcactggccgccgagcatctggcgcagccatcggacacggagctgcgggaggcgcacgtcaagcttgcggccgagcacgagaccaaacgccgcgtggacgcccagctgaccgaggcagaggcgacggttgccgagcgagcgcagctggctcggaccgcgtgggcggaggccaccgagttcgccggcgacgtcggcctgccgacggattcggacgagctggcggccgttcgggccgcggtcggtgactaccgggtcgccctggccggtctgtggccggcggcgcgagccgccgaccgggcgcgcgaggacgtcggcaacgccgagttggaactcgacgcggccgtggaacaacgggaacaagccatcgccgcggcggagcggtcccgcagtgacgcggacgtcgcggccgagcggcaccgagtgctcatcgagaccgccggtgccggcgtcgacgagctgtaccgcaagttggacgccgtggcgacagaactggctgagcgcgacaagcgcgagcgccaggcgcgggaggacgagcggcgaacccgcgacgagcggggcacggccaacggccgcagggaaacgctgcgggagtcgatcgccgtcgctgccgccgagcgggaccaggcgattgtcgcgttgcgtgcgttcgtcggcaccgggctgctgcacaccgtgctgcccgatctcgacgtgcccgatccggccgaggactggacaccgaggtcggcgatcggggtggcccgcgcggtcaatgcggcgctggacgcggtcgacgacggcgaccggccgtgggaactggtgcagcaacggctgtcggccgaacacaaggtgcttactgacacgctgtcgcgccacggtcattcggtcggcatgacggtgcgcgacggcgtcatcgtggtggacgtgctgtttcaagggcgcaagcaggacgtccccgacctggtggacggcctgacggccgagaccgaccagcgcggtgccctcctgtccgcgaaggagcgggagatactggagaaccacctggtcaacgaggtggccggcacgttgcaggaattgatcaccggcgccgaggagcaggttgcggcgatcaataccgacctggccgaccggccgacctccaccgggatgcggctgcgcctgctgtggcgggtggcgcggaccgcgccggcggggctgtcccgggtgcgcgaccggttgctccgccagacggcggacgcgtggaccgtcgaggaccgggcggcggtcggtgccttcctccaggagcagatcaaccgagagcacgccgaggatgccgctggcggctgggcggagcagctcacccgcgcgttggattatcgggggtggcacgagttcgccatccagcgccaccaggacggccattggcgtccggcgtccggcccggcgtccggaggggagcgggtgctggccgcgtcggtgccgctgttcgccgccgcgtcgtccttctacacctcgtccggaaacccgcacgcgcccaggttggtcgcactggacgaggcgttcgccggcgtggacgacgactcgcgggccaagtgcctcggcctgctggccgcgttcgacctggacgtggtgatgaccagtgagcgtgagtgggggtgttatccgcaggtgccgggcctcgccatcgcccagctcgcccgtcgggacgggatcgacgcggtgctggtcacgccatggcggtgggacggtcgcgaacgggtcgaggtggagcgaccgacgccgtatgtgccggaacggccggcgcccgccctgaccggcgattcggccggcacgctgttcgaatga

SEQ ID NO: 50731 - DNA, 1257 bp, Kutzneria albida DSM 43870
atgagaggcgcgatggacgagccacggctgcgcaggctgctcggcggcgaggacactgcctggctgctggaccgggttcgccgtcggctcgaactcggcaagccggtcgccggcacggtcaccctggcctcggccggcgttgaacagcgtcgcgcggtcgaacggctgctcggtcgccgtgccgggagtggcaggtcgctgactgtctcgttggaggagatcgacgcggtgcttcgcgtcagcggcgccgccccggaggggctcgcggcggcaacccgggccctcctcggcacagtgccggatcgggccgccgaggcgacggcgtggatggcggtctacgagccgctcgcggagttggccgagcgacggccggaactggccgcatggcgtgcgtggctggatgccacgggcatgattcgccgactgacggccggtcccgccgatgcggcgaggctcgtgaccgaacttgtgcgggtgctcgatcggctgcccgccgcaggcgtcgcgctggggcgtctggccgccgagaccaccggcgacgcacacgggctcgacgacggcaaagcgttggccaccctgacgcttgcggcggtccgcgtgctggccggcgccgccccgaccggtgacggatccaccttcgaacgccggtccgcctgggccgccgtgggagtgcaccgggacgagttgtcgtcgtccgtgctgtgcgtcgggctacccggaggcgtcacgacgctggtgggccggatggtcgctctggcgagggaagccggcgagccgtgtgcgttgaccttgcgccagctcaaccgcgaacggtccgacctcggcgtccgtgacggccacgtgtgggtctgcgagaacccgatcgtgctcgcctccgccgctgacgagttggggacacgctgcccgccgctggtctgtctgagcgggcagccgtccgcggcggtgcttcgcctgctggacttgctcgccgagaccggcgctcagctctcctaccacggtgatttcgactggggcggtgtccgcatcggcaatacgctgcgcgaccgtttcggttggcggccatggcgtttcgatgcgccgtcctaccgagccgcactcgcgtcggcccctggcggcacgctggccggccggcccgtcgacgccgtctgggacccggatctccgccccgcgctcgaacatcacggcatccatgtccaggaggagctggtgctgcccgacctcatcgccgacctgtcggccgccgccaccgtgccatga

SEQ ID NO: 50732 - DNA, 1572 bp, Kutzneria albida DSM 43870
gtggcccaggcgtggggcgcgggcccattagtgtggccgaccgtggagcaggagcagttgtacgaccagacgaccgaccggcggctgctgctgtacgcctacctccagccgcgcgagcaccaccgcacctacctgaccacgatgcggctgttcgcctcgaccctgctggccgacctgtcggcgggcgaggtcgcggcgaagctggccgccgccgagcgggacggcctggtcgaaccgggcgagtcccggatcgagaacgtgatcgcccggctcaagcagctggtggagtggggcaacctggtgccggggcggcgcgaggtgatcgcgtcgagcatcgccgagttccagcacggcagcgtgcgctaccaggtcagcaagctcgccgtgcgggtgcagcgggacgtggacgagctgctgcgcgtgcccgagggcgcccgcgaggtgtcccgcgagctgctgcccgcgatcgagcgcgggctgggccagctgggccggtcactgtccgacgcggtgttcaccgagggcgggccgggggccaggcgggccagggaggcgctggccgagcaggtcaccaccctgttcctgcaacacgccgagctggccgtgacggtccgcgacttctacgcctacctggggcagatcgtcacccggcaccacctggccccggacgagatctccgggttccgcaacctgctcgtggagtacatccagatggtggtcgaggacgtgctgcggcacaccccggccatcgccgactcactggcgcagctggccaggggccgtaccgaactgctgcggctgctcggcccggccgacggactgggcgcggagatcgagcggtcccgcggccgcaccacggcggactggcaggagctgaccgactggttcgtggaccggccgggacggcccagccaggtcaccgcgctgcgggaggccaccggccgcgcgatcggctcgctgctggccagcgtcaagcgcgcgacctcgggcggcggcctgctgccgggtcggcgggcggagctgctcaagctggcgtcctggttcgactccgccgagccggaccaggcgcactgcctgtacgcggcggcgttcggcctgtactcggcgcgcaacctgctgcccgcgccggagcacgacggtgacgacgagcacacaccctggcgggacggtccggtgctggacgtgacggtgagcgtgcgcagccggggcgatcgcggtgcgcgcggccgcacctcgcggatcatggacgacccgatcaccgagcacgcgctgctcaacgaggcccgccaggtggaccagcagcgggccgaggcggtctccgagctggtcggggccgcgcccaagatcgaggacgcggagctgtccagcggggcgctggacgtgttctgcgagctgttgacgatggcgatggcccagcgcgagcgggccgaggacaccggcagcgccgccgacccggtgcgtgggctgcggctgacggtgaccccggagcaggggcgcacgacgaggatcgcgaccgcgggcggcacgctgaccctgcacaacgcttcggtggttctggaggccgggcagtga

SEQ ID NO: 50733 - DNA, 1242 bp, Kutzneria albida DSM 43870
gtgaaagacgtgctggacggcatgtccgacatcgacgccgccaacgtggtccgctgcgcgcgggtgctgctgaggcggccactgctgcgcgccgagggcccggacggcgatctgctgccgctggtctaccggcaccgcgccgcactacaggacctgttctcggggctgctgggctaccggctggtggtggagcgccgcttcgcccgcctgtacaagccgggtccgggcaacgaccccagccgcggcgagtcctcgctgtccccgcgcggctacgcctacctggcgctgaccatggccgcgctgaccggtgtcggccgacaggtgctgctgtccaggctggtcaccgacgtgcgttcggcggcggtggaggccggggtcagggtcaccgacgacctgccggaccggcgcgcgctgaccgcggccctgcggcacctgctgtccctcggcgtgatcagcgagaccgagggcacggtggccccgtggggcagtgacggcccggccgaggcgctgatcaccatcgacaccgacctgctgggccaactgctgtccggcccgctgctggaggccgaggaccccgcgcacctggtggaactggccgcccggcccggcccgcgtggagccgagcactcggtgcgccgcaagctggtggagaatcccgttgtgctgcgctccgacctgccccaggagcagtcggagtggctgctgcgccaccagcggcgcgagtcggccctgctggagcgcagcttcgggctgatcaccgagaccaggttggagggcgtggccgtcaccgacccggaggactacctgaccgacgtgctgttccccggttcgggcacggtgtcccggatcgccctgctggcactgcccgagctgatcgccgaccccgacccggagctgttcgccgaggacgacctgccgccgcagccgcgtgcggacgggcggcacccgatccgcctggcacagctgcgctcgatctgcgcccggctggtcgaggactacccggccgcgtggtcgcggcaggccaccgaggaccccgaccgacttaccgccgaggtgctggacctgttggcgcgcatgggtttggccaccgagcatcccgaggacggctggctggtcgcgccgaccgcgcaccgctgggtgcccgtgcccgacgacacaccggcccgcaccgcaccgcccgcaccgccgcctccccaggaggaacccggttggtccctgttcgatgaggaaggtcagtcgtga

SEQ ID NO: 50734 - DNA, 4080 bp, Kutzneria albida DSM 43870
gtgactacgagtccgcggtggacgttgagccggggcggcatcgtcaacatctggcagtacgccgagcaggtcttcgacttctccggcggccgggcgatcttccagggcaccaacggttccggcaagtcgcgcaccctggagctgctgctcccgctgtgcctggacggggacctgcgccagttgggctccaagggcttcgacacggtgagcatccggcgcctgatgctcgacgactacgacggcggcccgaaccggatcggctacgcctgggtggagctgcaccgcgcaccgggtgagtacctgacctgtggtatcggcgtgaaggcctcgaagacctcgcagcagatcaccgactcctggcggttcgtcacaccggcgagggtgggccaggacctgcggctggccggtccggaccgggtgccggtcggcccggcgcagctgcgtgagctgatcggcgcggactgcgtgttcgaggacgccgcgttccgcgccaaggtcgccgagacggtgtacggggtgcccgcggcgcgctacgcggacctgctgcacttgcagcgcacgctacgcaaccccgacgtggggttgaaggtgttggaaggccagctggagcagatcctctcggatgccctgcccccgttggactcctcgatggtggagcagctggcgacctcgttcgacgacctggagtcgatccgcgagaacatcatccgactgtccactgcggacaccgcgctgggcgccttcctgggcacgtactcgggttacgccctgtccggcctgcggtccgcgggtgaccgggtgctcgcgggccgcaagagcctgaagtccctgcgcagcgaactggactccttggaacgcaagctgatcgcagcccgcgaggagcgggtcaccgcggaagaggctgtggcgcaacaggaatcccaggacagccaactcgaagcgcggatcgaggcactcaaggagctgcccgcgtaccgggggctgcgcgacctacaggaccgcgagcagctcgtggcgcggtccaggtcggcggccgaggccgcgctggacaccgcgggcaggcagcgcgcgcaggaggaccgggcggtcgacgcggtgctggccgtgctgcgccgactgggccaggacatcgacgccgccgacgaactcgccggtcaggcaagggaaaggctcgccaccgcgggcctggacgccgagttgtgcccgcaggtgccgaagatgccctcggcggaggcgagcagcaccacggacaaggtgcgggccaagcccgacccggagtcggagccgctggccatcgaccggcgcacgctgcccccggtgcagccgcagacgctgctggacgcgctcagcgacgcgggccgccaggccgagcaggccgcctcggaagccaggcgccgcaacgccttgaccctgtccctgcacgagcgtgcgctcaagtcggaccggcagttgcgcgatgtcgaggaactgcgacgcgccgcgcgccaggcccagctgaccgcgaccgagtcggcgggccgccgcaacgaggcgggccagcaactggccacggccgtggacgtgtggcgtgagcaggcgtcccgctggaccgctggcggcccggattcctccgtgcagtacccgatgatgccgaccgccgagctgctcgccgaggagcggggtgcggcgcggaccgcgcgcgacaacatcaggcagtgggccgcgccgaaggtgcacgagctacgccagcaggtggtgtcggccgagcagcggctgaccgagctgcgcgcgacgatcaccgagcacgaggccgaggtggtgtcgctgcgttccggcggcacgaacacagctggcgatggtgcggcgttcttccggctggtggacttcgtgcccacgctggccgaggcggaccaggccgggctggaggccgcgttgcaggccagcggtctgctcaccgcgctggtgtccgcggacggcaaggtgtccgacccggagctggccgaggtgctcgccgtggccggtccggccgccgagggccgcagcctcgccgaggtgctggtgcccgccgccgagccgggcagcccggtgtcggccgaggtcgtggcgaagctgctcgcggccgtcggtgtcgccgaggaccctgctgccacaacggttcccgggctggtcgtggccacctccggcgcgtggcgtgccggtgtgctgtgcggcgcgcgggccaagtcggtggccgagttcgtcggcgccggggcccgggaggcggcgcggctgcggcggatcgccgagctgagcgaggccgtggagcggctgcacaccgaactggccgagtcggagcggcgctgcgacgaggcgcgtgagcggaccaccgagtgggagcggcatgtcgaggcgttcccggacgacggggagctgatcgccgcgcacgcccggctgaccagcgcgcgggagtcggccgaggagtcggaggcccgttcgcagcagctgcgcgaggagcacggcgccgccgaggaccgctggcacgcctcgcgcgccgagctggtgcaggccgcggccgagtcgggcatcgcggttgccgaccccgagacgtccactgtggacactgaggcgctggagcgggccaaccgcgcggcctcggaggcgcgggcggcggccgagcagctggccgagggcctggccgggcggtgcgcgcgcaccgtggccgacctgatggacgcgatgaaccaccaccacgccgcggtgaccgaccggaccgaggccgagtccgcggccaacgcgctgtgcaccgagtacgccgaccgcgcacacgcactggacgatctcagctcggcgatcggcagcgaggcccaggaagtctcctcgcaactgtctactttggaggaagaacggcgcagggtccgccgtgagctgccgcgcacccgcgagcacgtggtggaggtgcgcgagcaggcgaccaaggtggagaccctgctggagaccaagcggtcccagctggactcgcgcggggccgaggagtcgtccgcgagcaccgcgttcgaggaagcccttgcggcgccgggcatctggaccgcggccttccccgagcaggagccgcccgccgacctggacgcggcgctgggcgtgctggccggggccgccgagcgcaagggtgcgggcgagggttcggtcatcaccaagttgcaggtgttgcagacctcgctggccggtacgcacgacatcggcgcggagaccaccggcggggtgctcacggtgaccgtgaccggggaggacggcccgcgcccggtggccgaggccgccaagcgggtccgcgagcggctcgccgagcagcgcggtttcctcggcgagcgctaccagtcgatcttcgcggactacctgatccgggacctggccgagcggctgcgcggtcagatcgaggtggccgaggacctgtgccgccgcatgaacgacgtgctcgaccaggcccgttccagccagggcgtgcacgtgcaactggagtggcggccctcggcggccctggacgagcgcaccaagcaggcgctggagctggtgcgcaccccgctggccgagcgcagcgaggaccaggacgacctgctgcgccaggtgatcaccgagcggatcgaggccgagcgggacgcgcactccagcggctacgccgagatcctggccagggccctggactaccgcacctggtactcgttcaccgtgcgggtgcgcgactccggcccggacggcaagccgcgcgtgcggcggctgcgccagctgtcctccggtgagacccggctggtgtcctacgtgaccctgttcgccgccgccgcctcgttctacgacgcggtcagcagcaccgaggacgaactcgccccgctgcggctggtgctgctcgacgaggcgttcgagcggctcgacgacccgaccatcgcccgcatgctcgggctgctggtcgacctggacatggactgggtcatcacctggcccagcggctggggcgtgtcctcgaagatcccgcgcatgcacatctacgacgtgctgcgccccaagaacggccgcggagtcgcctgcacccacaccacctgggacggcgccggactcgaccgcgacgacccctga

SEQ ID NO: 50735 - DNA, 1581 bp, Actinokineospora spheciospongiae
atgagcagcacgccggaacagccccgaagttggtggcgcggtgtcgtcgccagtgactggaccgtgttctccctgcccgaggacatcgtgcgggatcgctactcggccttgctggccgccctggaggaactgagcacccggggtcctcggtcgaccgtggcggagatcgtagatcggctgcgcgcggtcggcttccacgacccgttgaccgacgccgacctgcgcgccctgctcgaccagctcgccacctggggtttcgcggagccgttccgggatttcgccgcaccagtgcgcaactaccgcggtgtcgtggccaggcaggaggcgtgggcgctgacccgtcgcggccgggccgtggtcagcgccgtccgcaccgcggtcgcctcggccgaccgcgcgctgcaactgcccagcaagctcctcgacagcgtcgaacagacggtccggacgctgttggcccacgcggacgacaaggaggcccacggcctgctcggggccgacctcggcaacgtgggcacgcggattgccgaactgcagcgggtcaccgctgacttctacgacgcgctcggcaggctcgtgcagtccgacgtgacccgcgacgaggtcttcggcagcaaccgcgaccgggtcgtcgaggcgctgcggcaatttgcgcgggagtacgaccggggcttggtccgggtctgtgccgcgctggacgcgctgcggcgcgtgggtcaccagcacgtggtccagtgcgctgtcgagcacgccgggctgctcgactcctccgcgcagcagcagtgggtgaccgagcaggtgtcgctcctgtcggcactggaagcctggttcaccccggaggggagcatcccggcactggtcgaatccgcccacggagccgtgaacaccctgctcaacgcgatcgaccgacgctacaacgcacgcctgcgcggtgccgacctgtccgtcgacttccgactgctggcgcactcgctgcaccggcaagctgacgacgaacaggcccgccgggtctacgccgccgcgttcggtgactggcccgcctggcacgtcctggcaggtcccgcgcgcgaagacgtcgaccactcctccacagcggccgccgggaccactcccttcgtcgtggagctgaccttgcgcgagcacgagcggcacgggccacccagcggccgcccgaggaaggtggccgacgcgtcgactgaacgaagccgtgccctggcggaggccagggaacaggcacagcgccgcgggcgccgcgcggcggcgttgctcaccccaggcgaagtggggcttgagcacttcaccgatctcgacgccgactccgccgccgtgctcttcgacgccatccagtcggcactggacgcggtcgaccccgcgaccggtgtcggtcaggtcgacgcggacgaggccggggtgctcgtcgcggtgcgggtccccgtcggtgccgagcggagcctcgtgcggctggcggagggcgacctggatgcaccccggctgcgcgtcacggtgaccgcggcggagtcggccctgcccgatcccgacacgatcggcaccggatcgaaggcttcccggagcgtcgcatga

SEQ ID NO: 50736 - DNA, 1428 bp, Actinokineospora spheciospongiae
atgagacaggacacactcctgcccccggacctcgccgactgcgccaggcagttggccgcccggggcaggctgctggcggagcgggacccggagctgtaccggaccgcggtcctcgggcaggagcaactcgggaagttcttcgccacggagttggggtggcgggtggacgtcgtcgaacacgcggacatggtccggctgcacaagcgcaggcaggacgtaccgggaacgcgcggtcctcgactgcggcgcgagagccgggaccggccgctggcaccccgtctggtgctgatcgtcgtggctctggtctgcgaacagttgtggagacgacctcggatcacggtcaacgacctcatgcaggccgtctcccaggtgtgcgcggccgacagcgcggacgggttgctgccgaggttccgcatcgtccccgatgaggaggtcggcaagcgcgaggcgcgggagaaccggcagagcatcgtggacgcgttgcgcctcctggacgccgacggcaccatcgtgttcgagggcgacctggaccacgcggtggacgaggacggcgcggacggagtcgtcgcggcgtcccgcgaccggctgtccgcccggttctcatcgttgtcgccctccctgctcaagctctcgcaactgccccctgaccgacacgtcgaggcgctcgcctcggaccgggtgccggacgacgcggacgtggacgacggaggcgcagaggatggaggcgaggaggactgggacaccgcggcgccaggcgagcacaacgcccgcaccgcgacgaccgtgcgccgtcatcgggcggtccgcaggctcgtcgacgaccccggcaccgacccggtggccgatgactacctgcagagctcgaccgggcgcaacagggcactcaacgtcctgcacgcgctcggactcgtcgggactgtgcgccgggactggtggcaggtgggcgatccgaccggcctcggcagcacgatggacttcccccacggcagacgcatggagaggcaggcggcgctcgccctgctgcggcacctagggacccgcccgatgctcgacggcggggaggccccggtgacctccgcggagatcgagtcgctgttcgagcggatccgggaacggttgccgcgctgggccgccgcgtacgaccggcagcaggccgccctggcccgtgccgcggcgtcggaactcgtcgacgcgggcttcctcgtcgacgtcgccgagccccccgaccaggcgaccgccactcccgagccccactggcggcccacccccgccgcgcggatgtggcaggtcaaggtcaccgaacccgatacatccgacagccaccacaggtctggtggccaccacacatccggtggccaccagacatccgacggcacagtgccgaagcgaccagttgtgcccgacgactcggaaggaggcctgtggtga

SEQ ID NO: 50737 - DNA, 4986 bp, Actinokineospora spheciospongiae
gtggaaggacggtggcagccgacccgcgccggtgtcctgaacagttggaagtggaccgacgagcggttccacttcgcgaacgggtggttggccttcatcgggagcaacggatccgggaagtccctgacggcgtccgggctcgtcaccgtcctgctggacggtgacacgtcccaggccgcgctcaacgtgtcgggcagcgcggcgggcaccctgttgagcaggcacaccgacaacagggagaaggaggacaagaccggggtgtggtggctggagtacggccggaccgaccccgacaccgcgaccaccgaatacgtgaccaccggcctgtggctgcgctcctcgggacccaccctgctgagggcgttcttcctcgtgtccggccgggtcggccacgagatcgagctgcagcaggatcggaacccggtgggcatcgaacgcatcagcgagcagttggcggcccacggcggtgagctgttcaccgacgctgcccgcctgcggacgaaagccggggcggtgctgcggacggtcagcccccagggcgcctatcgcgcggcggtgcgcctgcgcctcttcgcgccgctcgatgaggtccagtacgacgccctgctcagcgtcctgcggacgctgcgcagcgtccggacggccgagaagatctccgccaaggacatgctcagcgtgctcaccgacgcccttcccgcgctggaccaggtcaagctggcggagatcgcgacggcgatgcagcgcatcgccacccaggaggcgcgcctggtcgccacaagggaccaggcgaggaagctcacgaggaccgaccgtgcctacgaccggtaccggcaggcggtcgcgctggccaccgcagcgtcactccggtcggccaacaccgagttcgacaacctgacccgatccgagacggcggcggagaacgacctcgcccgggcgaccgcccgcgcggacgacggcagggaggcgctcatccagcgcaagcaggaacgctcccagtgggaaggcaaagcgggcgccgctgagaccctgctccgcaagcacgctggggccgaactccctttccgggaacaacgcgcccgagagctggatgaggccgccgaagcggccgaacgccgcgcgcggaccgcgatcgaccaggccagggccgggggagccaaggcggccgagaccgcccgggtggcggcggaagcgcagcagagcgcgtccggcatcgcacacgaactcgccacgaccgggagaccgctcggagcggcgggcgcgttggagaacatgctggccgccacagcggggctgacactccccgaggcgctgctgccggacgcacctgacgtggaactggccgtcgacgagctggcagtggtccccctggtctgggtcgaggcgcgcgaggaggctgtggagaacgtggtgacggcgctcggcaaagtcggaaccgccaaccagtcggcggtcgacgcaggcgaacgactgcgcctttcgcaggacatcgcggcccaacgagccgaccagctcacccggcacaccgcggatcgggccaaggccgagcagcacttgacggccacgatcgccgagtggcaccggggatgcgaccactacccaccggttccggacgacctgctcgcgccggatctggtcgacaaccgggtcgaccccgccgggctcgcacactggctggcccagcagaccgaccggatcaggcaggacatcgacgtccccgggcaccgtgggagcaaacagagcgccgaccgcgccgccgagcaggcggtcgtgttcgcccaacagcagaaagacaaagccaacacggccgccgacgccgtgaccggggcccgacggaccctggacgaccaagtccgtgaagccgatgacgaggcggacagggatgccgcggcgctggcggacgcggaggcagcgcacggccgtcgggtcgaggccgcgctgtcgaagcgccacgaccacttcctcgcgctgctcgacgacaccggtgccgcactggaggccctccggcactgggagcgagaggccgagcgctggcggaccggactgcgccacctgaacgggtctgctctgaccatcccgatctcagcggccacccgcctgtcgcgggaacttcgcgatgcccgccgcagcgtcgcacaaccggaactggaacagtcctcacctgcggtccgcgtcgcgggcagcgccctggagatgctcgccgggcacgacgacaccgccctgcggtcggccgtggccagcgccgcccaacagaccgcgcggcgcctgcacgggaaggtcgtcgacgccgacaacgtcgtcaggcggcttggccaggaatcggccgcggtggaagccgacttggccgaggcacggaaggcgccgtccccaccccccgcaccagcgtggcggaccaggtcggacgggcaccccctgtggtcattggtcgatttccacgacgacgtgcccaccgagttgcgcgattactgcgagggggccctgctcgccgccggcatcctcgacgcggtggtcaccgccgacggccgggcgcgcgtcggcgacacggtactggcaaccgaccgtccagcggcagaccgttcactcgccgaggtcctgttccccgagcgcgatgccgcaatcgaacccggtcggatacaggccctgctgcgcgcggtcgacctcgtcgacgtcgaggcgggtgtggaggtgcgttccggagtcatcaccgccgtcgcaccacccggccacacgtcgcgcttcatcggcacgacggctcgggaacgagcccgagcagcgcgggtcgtcgagctgcaaacccagctcgctgtcctcgagggtgcactggaaacagccaccaccgttctccgacgatgccaggacgacgagaccgaggccgctgaggagcaggccaccctgcccggctccgccctgtggcaaccggcccacgcaacagctcgggccacgaacggtgtcgcccaacgagcagaccgtgacgccaccacggaacaacagcgggccggagcggaactcgactccgcacgcgaagcggcttcgaccgccctgcggctcagggagcggaagctgtcagcggcccacaccgccttcgacaaggtggtggccgccgccgagaacgcggcgaacgccgcacaggtggcgtcggacaaggcagaggaggtcagggcgacggcggccgaggccgccgccgccctgcggaacacggtcgaggaacaagccggtgccgacgaggagcggcagcggtttccctcgtctcaggcattgaccgaggccagggcagcggaggacgacgcggagcgccgctcgaccgacgcgcaggcacaggtcgtcgaggccactgagcggtcccggctcgccaaggacaggtcgaggcaggagatcaccgccctcaaccggctcgccgacctcggcggcgggcggatgctgccgaccgggcaccccgagatcaagaagttccgagacgacctccagcggctgtcccacatggtccggtcctggcaacgggtcgccgagcggaccctgcgcctctgcgaacaggcccgggtggcgaccgccgcgtcgctggagtgggcagaacacgccgagacggaaagggcctcggcggccgaggcccgggccaccgctgtgtccgaggccgccgctgtcgcggacctgcgcaggatgcatggtgccgactacgagctgctgcgcgagaaccacgacaaggccaggcgggcattggaggccgctgtcaaggcggtggaggacaccaccaacgacatccatggggcagaactcgcagaggaaagagcccgcgccactctggacgggatcgcccctcgccgcgccgacgccgagcaggaacggggacggtgcctggaccgcgtgcacctgctggtcgaggaatccttcgcgaaggtggaggacggcgtcccggtcgacgactccggcagacccgccaacctcaccgccgcgttgacctggagcacacggttgctggacgaccagccgcgtgggcagtcccgcgaggacctggcccgagcggtcgaggcccaccggtcccgcttggaggcggaggcgaagcgggtcagcgccgaactcacccgctacgaccggcaggtgacgctgcagacgatcccccgcacggactggcgtcgagccgtcgtcgccgcgccggaggccctcgtcggcgaggacctgcacacgacggtcaccaccttggagcagaccgcggagcaactcgagtccgacctgcgcgacgatgtcaagatcacgctgaagaccagcatgttcaccgcgctgcggcgggacatcgccacgcgacgcgccgccgcacaggagctcgtccgacagatcagctccaccttggagggagttcggacgggagtggccagggtgggcgtcaaggtcgagtgggctgtgcgcgacgatccagacgcgaagcgaatggtcggcctcatcaacgccataccctccgacgacaccttccaacagatgtatgacgtgctgcggcagcgcttggaagacgccaccggggacacatgggaagcgcgcgtcgcgcacaccttcgactaccgcatgtggcacgagtggcgcatcgacgtcacccacgcgtccttcagcgacggcaccaccgaggtcttccgcaggctcaaaccgcgttccaacccgctcgccatgttcagcaccggcgagatgcgcctggccacgatgctcccgctgctcgccgcggcgtggtcgacctacgaggcacccggctaccaggggccgcgcctgctgttcgtcgacgaggtcaacgccgcgttcgacccgcagaacgtccgcaagctcctggccctcctgcgcgaatgggagttcgacgttctggccaccgcgccggagatgagcgccatgctcaaggcggaggcggaacaggtgatgatcgcgcaggtgacccagatgggccgcatgcgggtgtcggtgccctggctgtggagcggatcgggccagcccgttctggtggagggcaccgcatga

SEQ ID NO: 50738 - DNA, 1584 bp, Actinokineospora spheciospongiae
gtggaggcagaccaggagacccgaccgggcgccgacgcccagcgcaggctccagctctacgcctacctgcaaccccgcgagcaccaccggacctacctggccatcatgcggctgttcacctcgacgctgctggccgacctgtccgcgggcgaggtgtcctcggcgctggcggcggccgagcgcgacgggtcgatcgacgtcggcgagtcgcacgtcgacgtggtgatcccccggctgcgccagctcgtcgagtggggcaacctggtgcacggccgccgggagacgatcgcgtcgagcatcgccgagttcctgcagggctcgatgcgctaccaggtgggcaagctggcggtgcgggtgcagcgcgacgtggacgagctgctgcgggtgcccgagggggcgcgcgaggtgtcccgggagctgctgcccgcgatcgagcgcggcctcggcgagctgggcgaggcattggcgacggcgatcgcccgttccgaccgcgacccgggttcgctgcccgcccgccgcgcccgcgaacagctcgccgagcgggtgaccacgctgtttctgcagcacgcggagctggccgccacggtccgcgacttctacgcctacctcggtcaggtcctgacccgccaccacctggcgcccgaggagatctccggcttccgcaacctgctggtggagtacatccagctcgtcgtggaggacgtcctgcggcacaccccgacgatcgcggcggcgctggccgggctggccccgcaccgggcgcggctgctggcgctgctgcggcccgccgagcagttgggcgcggccgtggagcgcacccgcggtcgcggcgaggccgactggcaggagctggcggactggttcgccgaccggccgggcaaccccagccaggtcaccgcgctgcgcgacgccaccacccgggccatcggcgcgctgctggccaccgtgcgccgggccaccaccggcggcgggctgctgccgagcaggcgcgcggagctggtgcggctggcgggctggttcgaccgggccaccccggacgaggcgcacgccctgtacgcgggggcgttcggcctgcactcggcgcgcaacctgctgcccgccccggagcacgacggcgacgacgagcacaccccgtgggccgacggcccggcggtggacgtgtcggtgagcgtgcgcggccgcggtgaccggggggcgcgcgggcgcacctcgcggatcatggacgacccgatcaccgagcagggcctgctcgccgcggcccgcgcggccgacgagcgccgcgaggccgccgccgccgagctggccgccgcggcggcgcgcgccgacggcatcgacggcgccgtgctgtccgcgcccgcgctgcgcgccctctgcgagctgctgaccctggccatggcccagcgcgagggcgccgccgacccgggcagcgcgaccgaccaggtgcgcgggctgaccctgcggctgaccccggcgccgggccgcaccaccgacatccgcagcgagtcgggcacgctgaccctgcgcgacaccgccgtcgacatcgcccgcgtccagaccgccagggcggcccgcgatgcgcgctga

SEQ ID NO: 50739 - DNA, 1224 bp, Actinokineospora spheciospongiae
atgcgcgctgacacccgctcccgcgtccccgccgcgctcaccgagctgtcggacatcgacgccgcgaacgtggcccgctgcgcgaaggtgctgctgcgccacccgctgctgcgcgtcggcggcccggacggcgacctgctgccgctggtctaccggcaccgggtgacgctgcaggagatgttcgccgcgctgctgggctaccggctggtggtcgagcgccgcttcgcccgcctgcacaaggtcggcgcgggcgacgacccgacccgcggcgaggcgggcctgaccccgcgcgcctacgcccacctctgcctgaccatggccgcgctgaccggggtgggcaggcaggtcctgctgtcgcggctggtggccgacatccgctccacggcggcggaggcgggcatcgacctggtcgacgacctggccgaccggcgcgcgctgaccgcggcgctgcggcacctgatcggcctgggcgtgatcaccgagaccgacggctcggtggcgggcctggtcggcgagtccggcgccgaggcgctgatcaccatccacaccgacctgctgggccagttgctctcgggcacctcggacgcgcccagcgccgccgcgctcatcgcctccgggtccggggcgggcgtcgagcactcggtgcggcgcaagctggtggagaacccggtcaccctgcacagcgacctgtccgccgaggaggccgactggctgcgcagggggcagcggcgggagtcggtgctgctggagcgctgcttcggcctggtcaccgagatccgcgcggagggggtggcggtgaccgacccggaggagtacctgaccgacgtggtgttcccgtccaccggcacggtcgcccggatcaccctgctggcgctgccggaactgctggccaccgaggccgcgccccgcccggacggccgggtcccggtgaccacgcgggacgtccgcgagacgtgcgtgcggttgatcgaggactacccggcggcgtggtcgcggcaggccaccgacaacgtcgacgacctcgtggacgccgtgctcgacctgctgctgcggctgacgctgatcgccgagtcccccgagggctggctgttgagcccggccgcgcaccggtggttgccgctgcccgatgacactcctgccacccgggccaccccgggccggtccgctgtgcccgaggcccccgaacccggctggtcgctgttcgacgaggaaggatctccgtga

SEQ ID NO: 50740 - DNA, 4113 bp, Actinokineospora spheciospongiae
gtgacaacccccgaggcgggattcggccgctggcggctgcaccgcggtggcatcgtcaacatctggcagtaccgcgagcagaccttcgacttctccggcggccgggcgatcttccagggcaccaacggctcgggcaagtcgcgcacgctggagctgctgctgccgctgtgcctcgacggcgacctgcgccacctcggttccaagggcgcgggcacggtgtccatccgccggttgatgctcgacgactacgacggcggcccgaaccggatcggctacgcctgggtcgagctgcaccgcaccacccccaccggcggtgacgactacctgacctgcggcatcggggtgaaggcgtcggccacctcgcagcagatcagcgactcgtggcggttcatcaccccgtcgcgggtgggcacccacttcgccctggcctcggccgaccgggtcccgctgggcccggccgcgctgcgcgaggtgctcggcgccgaccgggtgcacgacgaggccgcgttccgggcgaaggtcgccgagaccgtctacggcgtgcccgccgcccgctacggcgacctgctgcacctgcagcgcaccctgcgcaaccccgacatcgggctcaaggtgcaggacgggcagctggagcagatcctctccgacgcgctgccgccgctggacgcgggcgtggtcgagcagctggccacctcgttcgaggacttggagtcgatcagggagaacatcggcaggctcagctcggccgacgcggcgatgggcgccttcctcaccgggtacgccgggtacgcgctgggcgccctgcacgcctcgggcaccaaggccgacgccgcgcggcgcaccctggacaccgcgcacgccgagatccggaagctgcgcgcgaagctcgacgccgacacccgcgcgcacgccggggccgaggcgcgcgtggcggagctggacgagcgcgacaccgagctggagacgagcatcgactcgctcaagtcgctgcccgcctaccagggcctgcgcgacctgcgggaccgggagaagctggtcgagcgcacccgggaggccgccgccgccgcgctggacaacgccgccgtgcggcgcaaccacgccgaccgcgcggtggagacggtgctgaccgtgctgcgcaggctcggcggcgacgtcgaggacgcgggcgagctggcccgcaccaccaccgtcagcctggtggccgcggggctcgacccgagcctgtgcccgccgctgcccaccgccccggacccggtgccgcggctgaccaccgaccgggtgcgtgccaagccggacccggaggccgagccgctggagatccagcgccgcaccccgccggagatcgccccggacgtgctcgccgacgcgctggccgccgccgcggacaaggtggaggcgatcagctccgaggtcggcggccgggccgcgctggcgatgagcctgcacgagcgggcgctgcgcctcgaccgcgaccgccaggacctggagaggttgcaggccaaggcccgcgacgcgcagatcgaggcgaccgaggccgcgggcaggcgcaacgaggccaggcagcgcttcgccggttccgccgaggtgtggtgcgagcgggcggcggcgtgggccaaggccgggccgttcgccgacgaccacgccccgcgcccgccgcagccgccgaccgccgcggacgtgctggccgccgccgacgcgacccgcgccgcccgcgacaccgcccgcgcctgggccgccccgcacctggccgggctgcggcagcgggtggtggcggcccggcaggtggtcgacgacctggtgcggcgcatccagtcgaccgaggcgcggctgatcgagctgcgcaacggcgtcgacgccacgcccccggccccgccgtacgcctccgccgagcgcgacccggccaccggcgccccgttctaccggctggtggacttcgcccccggtctcgacgccgccgcgcgggccgggctggaggcggcgttgcaggccagcggtctgctcaccgcctgggtcaccgcggacggcaccgtcgacccggagctggccgacgtgctcgcggcggccggtgacgacgtcgcctcgccgctgagcggcgcgctcgtgcccgccgtgaccggctccccggtggccgccgccgtggtcgaggcgctgctggggtcggtgtcgtacgacgccgacggccccgggctcgcggtgtggtcgaccggccgctggcgcgcgggcgtgctgcgcggcgcactgtccaaaccggacgccgagttcgtcggcgccggtgcccgcgaggccacccgcgagcgcaccaccgccgagctggccgccgagctggagcgggtgcacgccgagcgcgccaccgccgaggccgaggcgcgcgagcggaccgcggcggtggcggcgtgggacgcccacctcgacgcgttccccgacgaccgggagctgatcggcgccagggccaccgccgagcaggcgcgcgcccaggccgaggagtccgcccgcaaggccgaccggcgcaagggcgagcacgtggccgccgcgggccgggtcgcggcgtcgcaggccgagctgtcccgggacgcgggcgcggccgggctcaccgccgacaccgaggccctgcggcacgcccagcgctcggcgaccgccgcccgcgacgccgccgcgaccctgcgcgacgccctggccaagcggtgcgcgggcacggtccgcgacctggtcgaggcgctgcacgaccacaatgccgccgtcgacgaccgcgcggcggccgagcgcgtcgccgacgagaagtgcgtggtgttccaccgggaggcggcggcgctgtccgagctgacctccgccgtgggcggcgaggccgaggaggtgtcgcggcagctcgccgagctggagcgccgccgccgggccgggcgccaggagctgccggaggcgcgcaaggccgccggggagctgtcgaaccgggtggtgaagacgcagaccctgctcgacacccgcgacggcgagatcggcggcaggcgggcggcggccgaggcggcgggccgctcgttcgccgaggccctggccgcgcccggggtgtgggaggcggcgctcgacgagcagcggcccgggtccgacgccgaggcgttcgaactgctcgcggcggccgtggccgagagcaagcgcttgcccggcgaggagagcgcgctgaccaagttgcaggggttgcaggcgtcgctggccgggacgcacaacgtgctgcccgagcggcacgcgggcatcctcaccgtggtcgtctccggcgaggagggcccggccccggtggcggtggccgcccggcgggtggccgaccggctcgccgagcggcgcgggttcctctccgagcagtaccagggcatcttcgcgctgcacctggtgcgcgagctggccgagcggctttccgcgcagatcaccgtcgccgaggacctgacccggcggatgaacgaggtgctcgactccgcgcgctccagccagggcgtgcacgtgcggctggactggcagcccgcggcctggctcgacgagcccacccaggaggcgatcaagctgctgcgactgccgttcgccgagcgcaccgaggagcaggacacccggctccagcaggtcttcaccgagcggatcgaggccgagcgcgacaccgccaccggcgggttcaccgaaatcctggcccgcgcgctggactaccgctcctggttcgccttcaccgtccgcgtccgcgacaccggcccggacggcaagccccgctcgcggcggctgcgccagctctcctccggggagacccggctgatctcctacgtgacgctgttcgccgcggcggcggcgttctacggggcgatctcggccggggtggtggcctccgcgcggctggccccgctgcggctggtgctgctggacgaggcgttcgagcggctcgacgacccgacgatcgcccggatgctggggctgctggtcgacctggacatggactgggtgatcacctggcccagcggctggggcgtgtcggagaggattccgcggatgcacatctacgacgtgctgcgccccaggtccgggcacggcgtggcctgcacgcacaccacctgggacggctccgggatggaccgggaggacccgtga

SEQ ID NO: 50741 - DNA, 1131 bp, Actinokineospora spheciospongiae
gtgagcgacctggcggagaccttcgggcggcccgagtacgcggtgctgtggaagcaggcgcgggcggcggtgcagcgcgggcaggtccgcttcgggttcaagaccccggacgcggcgtcggcggcggcggtctcggaactgctcggggtgccggtcaccgccggggtggggcagacgttcccggtggcggagctgcaggcccggctgcgcgccagcgcgttccgctgtggactggacgacgtgctcgccgcggtgcacgggcgcgaggtcgtggccggggagtcgggtccgtcgcgcgacgagtgggtcgacgggctgctgcgcgacgcgctggcgggggcggggctgggcgaccggccgtgggccggggcgtgggtggaccaggtgcgccgctacgccaaggtcgcgccggagcggctgtcgggtccggccgagcgcgccgcgtcggtcctggcccggatcaacctggaccccgccgcggtgccgtcggtgtgggtgacgcgcgcggagctggccggggtggagctggaccgcgggcggaaggtggccgcgctggtgctgcgcgcggcggcgctggcgcacggggtgccgctgccgaagtcggccgccgaggagcggcggctgtgggagcgctgcggggtcgccgcggacgggctgacctccaccgtgctgtggcgcgggtcggtggtggcgctgcgggacgtggcctcggtggacgtggtcacggcgcggacggtggtgtgggtgtgcgcgagcccgcgcctggcggaggccgcgggcggccgggacgtggtgtgcgtgtcggggcggctggggatcgcggcgcggatgctgctgtcgcggctggtctcggtgggcgcccagttccgggtgcacggcgacttcgacgccgcgggcctgctggtcaccgggcaggtgctcgccctcaccgacggcgcgccgtggcggatgggcgccgaggactaccggtccgcgctggactgggcccgggccgagggcctggacctgccgccgctgggcaccgaaccgggccccaccccgtgggacccccggttgggtgatgccctccgcgcgggctgggcggtgccggaggagatgctgctgcacctgctgttacccgatctggtgtag

SEQ ID NO: 50742 - DNA, 1599 bp, Kutzneria sp. 744
gtggctcagcggccgggcgcgggccggttaatgtggccgaccgtggagcaggagcagcacgtccaggacaccctcgtgggcgcggagtcgaccgatcgccggctgctgctgtacgcgtacctccagccccgcgagcaccaccgcacctatctgacgacgatgcgcctgttcgcctcgacgctgctggccgacctgtcggccggcgaggtggcggccaagctggcggcggccgagcgggaggggctgatcgacccgggcgagtcccggatcgagacggtcatcgcgcggctcaagcagctggtggagtggggcaacctggtgccgggccggcgcgaggtgatcgcggccagcatcgccgagttccagcacggcagcgtgcgctaccaggtcagcaagctggcggtgcgggtccagcgggacgtggacgagctgctgcgggtgccggaaggcgcccgggaggtgtcccgggagctgctgccggccatcgagcgcggcctgggcgcgctgggcaagtcgttgtcggacgcggtgttcaccgagggcgggccgggcgcgaaaagggcccgggaggcgctggccgagcaggtcacgacgctgttcctccagcacgccgagctcgcggtgacggtccgcgacttctacgcctacctgggccagatcgtcacgcggcaccacctggccccggacgagatctccgggttccgcaacctgctggtcgagtacatccagatggtcgtggaggacgtgctgcggcacacgccggccatcgcggagtcgctcgggcagctggcgcggggccgcggcgagctgctgcgcctgctgggcccagccaacgccctgggttccgaagacctggccatcgagcgctcgcgcggccggaccatcgccgactggcaggacctgaccgactggttcgtcgaccgtccgggtcgacccagccaggtgacggcgctacgcgaggcgaccggccgcgcgatcggctcgctgctggcgagcgtgaagcgggcgacctcgggcggcgggctgctgccgggtcgccgggccgagttgctgaagctggccggctggttcgacggggcgaccgcggaccaggcgcactcgctctacgccgccgcgttcgggctctattcggcccggaacctgctgccttctccggagcacgacggtgacgacgaacacactccatggcgcgacgggccggtgctcgatgtgacggtcagtgtccgcagccggggtgaccgcggcgcccggggtcggacgtcgcggatcgtcgacgatccgatcaccgagcaggcgctgctggccgacgcccgcgccgtggacaagaagcgctcggaggcggtgaccgagctggtcgaggcggcgccgacgatcgaggagagccggctgtctcatggcgccctcgacgtgctgtgcgagctgttgacgatggcgatggcccagcgcgagcgggccgaggacgtcggcgcggcggccgacccggtgcgcggactgaagctcaccgtcactcccgaggaaggccggacgacgaccatcaagaccgcgggcggaacgctgaccctgcacaacgcctcggtcgcgctggaggccggcgcatga

SEQ ID NO: 50743 - DNA, 1242 bp, Kutzneria sp. 744
atgaaagacgtgctcgacggcctctccgacatcgacgcggccaacgtggtccgctgcgcacgagtgctgctaaggcggcctttgttgcgtgccgacggaccagatggcgatctgctaccgctggtctaccggcatcgcacgaccttgcaggacctgttcgccggcctgctggcgtaccggctcgtggtggagcggcgcttcgcccgcctgtacaagccggggccgggcgtggacccgacccggggagaggcgacgctgtccccgcgtggctacacctacttcgcgttgacgatcgccgcgctgaccggcgtcggccgacaggtgctgctgtcccggctggtcacggacgtgcgggcggcagcggtcgaggccggtgtcgccatcacggacgacctcccggaccgccgcgcgctgacggcggcgctgcggcatctgctggcgttgggcgtgatcacggagaccgagggcaccgtcgcaccgtggggcaccgagggcccggccgaggcgctgatcaccatcgacaccgatctgctcggccagctgctgtccggcccgctgctggaggcgaccagccccgaccacctcatcgagctggccgcccggcccggcccccgcggcgccgagcatgccgtgcgccgcaagctcgtcgagaatccggtggtgctccagaccgatctgccgcccgaacagatggagtggctgcggcgcaaccaacgtcgcgaatcgagcctgctggagcgcaacttcgggctggtcaccgagacgcggctggagggcgtcgcggtcaccgaccccgaggactacctcaccgacgttctgttccccgggtcgggcacggtcgcccggatcgcgctgctcgcgctgccggagctgatcgccgacccggatccggagctgttcgccgacgacgtcgagccgcccgagcctcgcccggacgggcggcatcccgtgacgtacggccaggtccgcgtgatctgcgcgcagctcgtcgaggactatccggcagcatggtcgcggcaggccaccgacgacctcgaccggctcaccaacgacgtgctggacctgttggtgcgtatgggactggccgtggacgacccggtcgacggctggctcgtcgcgccgaccgcgcaccgctgggcgccgcagccggacgacacgccggcccgcagcgccccgccgccaccgccggccgaacccgaagagcccggctggtccttgttcgatggagaaggtgagcagtga

SEQ ID NO: 50744 - DNA, 1834 bp, Kutzneria sp. 744
gtgagcacacagcgttggacgctgcaccgcggtggcatcgtcaacgtgtggcagtacgccgagcaggtcttcgacttctccggcgggcgggcgatcttccagggcaccaacggctccggcaagtcgcgcacgctggagctgctgctgccgctgtgcctggacggggacctgcggcagctgggctcgaagggcttcgacacggtcagcatccggcggctcatgctggacgactacgacggcggcccgaaccggatcggctacgcgtggatcgagctgcggcgcggtgaggacgagtacctgacctgcggcctgggcgtgaaggcgtccaagacctcgcagcagatcaccgactcatggcggttcgtcacgtcggcgcgggtgggcaaggacctgcggctggccgggcccgaccgggtgccgatcgggccggcgcagctgcgggacctgatcggcgcggactgcatgttcgaggacgcggcgttccgggccaaggtggccgagtcggtgtacggcgtgccggcggcccgctactccgacctgctgcacctgcaacggacgctgcgcaacccggacgtcggcctgaaggtgctggaaggccagctggagcagatcctctcggacgcgctgccgccgctggactcggccatggtcgagggcctggccacctcgttcgacgacctggagtcgatccgggagaacatcacccgcctgaccacggccgactcggcgctgacggcgtttctcggcacctactccggctacgccctggccggcctgcgcggcttcggcgacaaggtggtctccagccgcaagagcctgctgtcgctcggttccgagctggagtcgttggagcgcaagctcggctcggcgcgggacggccgggtcaccgccgagcaggcggtcgccgagcaggaggcgcgggacagccagctcgacgcgcggatcgaggcgttgaaggagctgccggcgtaccgcgggatgcgggatctccaggatcgcgagcagctggtggcccggtcgcggtcggcggccgaggcggcgctggacaccgccggccggcagcgtgcgcaggaggatcgggccgtcgactcggtgctggcggtgctgcgccggctcgggctggacatcgacagtgccgacgagctggccgggcacgcccgtgagcggctgatgatcgccggtctcgacggggacctgtgccccaaggtgccgccgatgccgccgaccgacgcgcaggtggcgcaggaccgggtgcgggccaagccggatccggaggccgagccgctgacgatcgaccggcggctgctgccggcgatcgatccgcagtcgctgctggacacgttgagcgacgccggccggcaggccgagcaggtcgcgacggaagcccggcggcgcaacgcattgacgctgtcgctgcacgagcgggcgctggcctcggatcgtcagctgcgtgacgtcgaggagctgcaccgcgcggcgcggcaggcgcagctgaccgccacggagggcgccgggcgccgcaacgaggccggtcagcagctcgcgacggccgtggatgtgtggcgtgagcaggcgcggcggtgggctgccgaggatgggccgcagccgccgactgcgcagcggttgaccgaggatcgcggcgcggcgcgggcggcgcgggacagcgtgcggcagtgggcggcgccgaagtcgcacgagctgcggcagcgcgtcgtgggcaccgagcagcggctggacgacctgcgggcgacgatcacccagtacgaggccgaggttgtcgcgctgcggtccggcggctcggacgagcagtcggatccgtcggcgttccaccggt

SEQ ID NO: 50745 - DNA, 969 bp, Nocardia seriolae
ttgcgggcctggttcatcggcgacgacgagggcgggctcaccgaatgcgagcgcctgcgcgaggccaccatgagcgccatcgccgccgtgctgtcgctgctgcgccgtgtcaccgagacccgcaagggcggcgtcagccgcgaatccgcgctgcgccatctcgcgggctggttcaccgccgcccccaccgccgaggccgcccacgccctctacgacgccgtcttcggcctcggccgcccccgccacctgtccatgtaccatccggacgccgatgtcatccccgccatccgatcctggtgggacgcaccgcctttggagatagcgcgcaccctcgccgaaaccggccgcccgcccacgccgggcgcgcccgcccgcctgcaacgcaatgacgcgggcatccgccgcctgcgtcaggtccagctcgacgcccagcgcgcccgcgccgaagcggcccgctccctcgcctccgccgacctctacgaccgcgagctcgacgagggcgaaaccgaggtcctgctcaagcttctcgacgccgcctccaccgcgtgggtcccggtcagcggccgcgtacccggcacatccggctcggacaacggcgtcacgctgacggtgtccgaacacaccggttcgaccctggtccgcacctccaaaggcgtactgcacctgaacaatcgacgcctggaagtgcgcgagaccgcctcgctgcgggcacgcgggtccggtgcgcgcgcaggtcgcggcgtaccggaaccgacgaccgccaccatcgaggagccgacctcacgccaggccgatggcgcgccggaatcgtctgccacccggcaggttccacccacgccgtcggcacacgacgtcaccgacggcagtgacagcgagcacggcagcgacgcggggacccacatcgacagcggcagtggcgatcccggcagcaccggtggagatcctcgcagcggcggggaggtgggctga

SEQ ID NO: 50746 - DNA, 1440 bp, Nocardia seriolae
atgcatgcgcggagtatcgattcgctggcgttggacagttatcagcgcgcggcgcgggtgatccttgccaaccatctggtgacgcggacttatccggatcggattgcgctgccgctgcttcggcggtgggcgacggagttgcgggaggacccggccgagctgttcgggtatcggctggaggtgaccgagacgacggcgcggttgttcccggtgctggatcggctcgatggcgggcggcccgcacgaaccacgggcgaccggctgttcgatcgacggcgttactcctatctggcgttggcgctggccgcgttggggcgggccggggatcagatcaccctgtcggagttggccgatcaggtggcggcgtataccgagcgggtggacgggctggagctcgcgccggatcgggccgcggatcgggatgcgttcgtggacgcggtcggctggctggcggcgcgcggcgcggtcaccctcgccgacggtgacgccgggggctgggccagtgatcccgaggccggtgaggcgctctacgacatcgaccggtcggtggtgttcgcgctgttccggccgccgcgggcgctgcagcacctgcagagtgtcaccgggttgctgggcgaggaggccggtggctccgatactcgttctcccgcaatggctctggcggcgcggaaggtgcgccgggccctggtggagcagccggtcgtctacgccgacgagctcaccgaacccgagcggtcactgctggcgcaggagaaactggtcaccgaggtcgagtatctgaccggcctgcgggccgagcggcgcgcggaaggcgttgcgctgatcgacagttcggggcggctctccgatgtccgcttcccgggcaccggcacgctcgcgcaggtggcgctgctgctcgcgggcgagatcgccgatctggtgctggatctcgacaatccggtgcagcgcaggccccgccctgaccgtccgttcaccgatctggccgagcagctcgacaccgccatcccggtgacgaccgtcttcgccccgctggccgatcccgtggatgtcttcggcgcgcacgaggattcggaagaggacgccgaggaacccgagatcccggatttcccgttcgtcgaatcgtcctggatccgcgacaccgtgcagatgctgaccggccgctacggcaacaccttcgccgcccagtggcaggccgacgtccccggcctgaccgccgaggtggtgtccctgctcgagcggctgcgcctggtcgagctcgtcgacggcgggctgctcatcctgcccgcgctggcccgctaccggggtgcgatcgtcaccatccgcacccgtgcggaatccgaattgttcctctccccaacgcaactcgactctcacgcgcaaaccaactctcccgcgcacaacgacgcggacagctccgcacagaagggatccgggcactga

SEQ ID NO: 50747 - DNA, 4464 bp, Nocardia seriolae
atggccgaccacattcacggtggagtgcgcttcgtccccacccgggcgggcatcatcaacctgtgggactaccgcgaccaggagttctgcttcgccgacggccgcctggtgctgcgcgggcccaatggctcgggcaagaccaaggccctcgaggtgctgttcccgttcgtgctcgacggccggatcgagccgcgccggctcaacccgttcgcgggtgaggaacgcaccatgaagtcgaacctgctctaccgcaagcaggaatcggcctactcctacgtgtggatggagttcgcgcgcggcagctgggactccccggagacggtgaccatcggcatcggcatgcgcgccacccgctcaaacgacaaggtgacccgctggtatttcgtggccgacggccgggtgggcgtggacttctcgctgctgggccccgacgaccggccgctgacccgcaagcagctggccgagcagatcggctccgacgccatcgtggaccggccggtcgagtaccgcaatgccatcgacgcccgcatgttcggcctcggtcagcagcgctacgaccagctgatcaatctcattctgacgctgcgccgcccacagctggccaagaacctcgacccgcgcggactgtcccaggccctcaccgacggcctgcgcccgctcgacgagcagctgatcctcgacgccgcccgctccttcagcgatatggaggaggtcggccgcaccctcgagggcctgatccaggccgacaccgccacccgcgatttcgtcaaggtctaccacaaataccttgccgtgcaggcgaagacggatatcgaccaggtgcgcacccgcctggacgcggtcacccactccggcaccgccctgcacgcggccgccgcgctgcgccgccgccgcgacaccgagcgcgccgccgccgagacccgcgccgaggacgccgaccgcgcctacgagcaggccctcgccgaccgcgagaccctgcagcgctccagcgcctacgagggcaaacagcagctcgacgacctcgccgacgcggtccgccgtctggagacctccgccgccgtccacaacgacaaggcgttgaagtcgcgccagaccgtcgatcagcgtctcgaggaatccgaacgcgcccaggccgccgtgacgaacgcatcgtcggccctggcccgtggcgaggacgaattgcgttccgccgccgaggaagcgggcatcccgtggacgacgctgcccgagtccgcccgcgccgacaatctcaccaccaccgtccgctcccacgccgaggaacgtgacgccgacgtccgcgccgtccgccgcgccctgaccctggtcgaccaggccgtcaccgaacgcacccgcgccgaacgcgccgcccagcgtgccgtggaggcgcgcgagtccgcggccgccgaattggccgcggccgaagccggagtcgcgctcgcccgatcgaataccgctgtgtccctgcgtgactggtgggacacgcaccgagaggtctactcccccatccggaccggcctgttcgaggccatcgacgatgcgctcgccatggtcggcaccgagcaggcccctccccgggacgccacctccggcggcaaggcgaagaaggggcgcggtaccgcgtccggcgaggcggccggaaatcgttccgccacaacgggcgcgggcggcgcggcgttggaagccgccgaggcgagggcagcgctggccatcgccctcgacgacgacaccgctcccgccacaccggcggaggtcctcgccgagcgcaccgaaccgctgaccgacgagatccgcgcacggcggcaggaggcgcgtgcgcgcgccgcgcaggccaccacccgggcgggtgagctgcgcgccgagcgggagtcggtcgcggccgaacgcgacgacgcgccagccggtttcgcggcccgcaccgatatccggccggaccgcccgggcgcgcccctgtggcgtctggtccgtttcgccgatgccgtccccccggcgcgggcggcggggatcgaggcggccctgcaggccgcgaacctgctcgacgcgtgggtgtgccccggcgaggaactgcccgagcacgcctccgatcaattcctggtgccgctgccgccgggagagcggccctccgggcgcacgctcgccgacgtcctcgtggtcgaggacgacaccgattcactgaccgtgccacgacagaccgtggccgacgtcctggcctcgatcgccctgcacgaatccgacgcggccgacggcaagcgggcctccggcaaggacgaccccgcgcccgggagcggttccgcacagcgggtttccggtgcggcggcccaaccggtcgcgtccggcggcggtgtcgccataggcgccgacggccgcttccggcagggggttcaggtcggccgtcacgtcaaggcggacgcggagttcatcggcaccaccgcgcgtgcccggcgacgcgagctgcgcctggccgagctggccgctgcgatcgaggcggccgtgaccgaggccgagatcgccgcggccgccgaacaggccgccaccgacgaactgggccggatttcggccgccgccaaggcgcttccgcgcaccaccgcggtcaccgcggcgctgcggggcgtcgccgaggcggcgggcatgctgcgctcgcgggccgaggccgccgggcaggcggagcgggatctggatcaggcggtggcggaatactccgcggcggacaagaaggtccgggccatcgcggccgatcacaaggcgccgcgggatccggccgaactggacgcgttggccgctgccgtaaggcatttcgagaacgcggggaccgcgctgctgcgcctgcgcggggatcatcagcgtgagcacgagcgggcgcgggaggccggggatcggctcgaggagtccaaggatctggccgaggcgttcgccgaggaggccgaggccgcgcgcagcgggtatcaggagcagttgcgcaagctggagacgctgcgcgacgcgctgggagccggtgcggccgatatcgatcgggagctcgaggcggcccgggagaagatcgacgcggcccgcgccgagcagaaggcggcccgcaaggcggccgcggaggccatcgaggccgtcggtaccgccgagggcgcgcatcgggccgcacacgacacgctgggcaccgcgctgaccgaattgctcgccgacgtccggcatctggcgccctacgcgcgcccggacctgctgagcctgctgggcgcgcccgccgagatccgctggcccagcagcgatgccgcctggccgacgcccgagcagctgctgtaccggatcgagaacggcgacccggagcaggcgccgaaggtgctgcccgacgaggtgtcggccctgttcgaaaccctcgccaccgcaacggcttcggtgcgcgccggtgaggcggcgcgcaaggccacccgcagcgcggtcaccaccgccctgcaggaattcgacgcggcgctcaccgccgcccgccaggactaccggctgcactgggatgccgccgacggcctcaccgtggtccaggtgcacgacgatcacggcctgtccgcgctggccgatttcgccgagcgcatcggcggcgcgcgccgcgaccaggaactgctgctcaccgacgccgagcgccgcatcctggaggacgcgctgctcaccggcctggcccagcagatccacgaacgcacctccgacgcccgcgatctcatctcccgcatgggcaccgagatgaagcagcggcgcatgtcctcgggcaacaccatcggcgtgcactgggtgctggccgacaacctctccgaaccggcccgcgcggtctgcaagctcctcgaccgcgactccgccgacctcacacccgaggacctgtccaccatccgcgcctacttcgccgccgagatccgcaccgcccgcaccgcgcacccggaacgctcctttcccgagatcctggccgccaccctggattaccgcgcctggcgcatcttctcgttcaccatcctcaccgccgacggcaccgaggaccgcctcaccgtggcccgccacagcgccctgtccggcggcgaacagtcggtctcactgcacctgccgctgttcgccgcggcccacgtcatgctcgactcggccgacccgcaggcgccccgcctgctggccctggacgaggccttcgccggtgtcgacgacaacggccgcagcgaactgctcggtctctccgtgcaattcgacctggacctgttcatgaccggctacgacctctggatcacctacccccacgtcccggcctgcgcccactacgatctggcccactcggcggccgagaacaccgtcagcgcaaccctgctcgtctgggactccgacgatctgctcgccgagcacgacggctccgatctcaccaccgccctcggctcccccaaccgccgccgtctcccgcacggcctcgaaggcgcgatcccgctcgacgaggaactcgaaacggtgggctga

SEQ ID NO: 50748 - DNA, 1536 bp, Nocardia seriolae
atggacccgattcgcgttccgcctgagatgttccgcttcaccagcggggagcgggccgggctctacgccgaggtgctgcacgccttcgccgaggcgaacgagcgcatggagaccgcgctgggactcgatgatgtgcgtgtcgggttgcgctcggtgggctggctggagtcactcgaggacgaggatctcagcgcggcactcgatcagctgcgcgcttggaatctgctcgacatgattcagaaccactccgagaactaccgcaccgctgccgaatacgagcgccgcaatctgcagtactcgctgacccgccagggtgaggccgccttcgccggtgtcgtgcacgccatggcgctgctcgcctccaccggagccctgcagaccgcggtgctcgacgccatcgccgatcggctcggtgatctgctgcgggaattgaattccggcaccgaccgccgggtgtacaccctgctgtcggaactggagtcgcatctggaggcgttgcgcgccaacaccaaacagttcaatggcgagttgcagcggctgctgcgcgccgacggggtggacctggcggtgttcggtgaggtcaaagcggcgacggtcgcctacctgcaggagttcctgaccgatctggagcatcgggcgcacgtggtggccgaacggattgcccgtatcgaggactacggtgtggcccggctgcatcggcgcgcgctggcgggcgcggagctaccgcaattgcccggcgcggatccgggaatcgaatggctgaagcatcggcgggctcgctgggacggcctgcgcgcctggttccttcccgcggacggttcggcacctcgcatcgaacagctgaatctggtgggtcgcaaggcgatcgtatccctgctgcaggtgctggaccggatcaccgcgtcccggcggcgttccagcagcgccgtcgccgactttcgcgagctggcccgatggttcacggtattaccggattccgatgcgctgcaccgcctgtggtccacggccttcggactggggtcggcccggcacgcgcacctggtgcatccggacccggagctggtcagccccacggccggctggtcggaggcgccgccggtggatgtgtcggcgttgctgcgatcctccgggcggaccgaacgtttcagccgcgccgggaaagtgcgcgacgtggccgtggtcaaggctcgccgcgccgagtcggcggcccgggagcgcgccgagctggaagcggcctgggacatgctcgataccggtggcgcggtgcgattgtcggcgttcggacggctcgatcacgaggtgttcgaacggttgctggatctgctgggccgggttctgggcgcggccgccggtaccgacggggtgcgtcgtggcagcaccgccgatggtcgggtcgagatcgtgctgcgcccgccgcgggatcgggcacaggcgcgattgacgacgccgcgcggagtgttccacgggcccgactacgtcctcgagatcacggcgcggggccggcggaacaccggacgaaccgggaggccggcatga

SEQ ID NO: 50749 - DNA, 1308 bp, Nocardia seriolae
atgagcgagctggcgaatcagctggtgatcgccgagcgggacgaggtctcccgcggcgtgcgcaggctgctggcggaaccgctgatcaccgagcggggcgcgccggatgccttcgacctgatccgccgtcgccgggatccgatcgcgaaatggttcgactactactgtggctggaccctgatcgtcgagccgaggctggggtacgcacgcctggtgaaggtgcggatcgccgatggcacccggcccgcgcgccgattacgttccggccgtgcgcctttcgaccgccgacgatacgcgctgtgctgcgtggtggccgccgaactgttcgccgctccggtcaccacgatcggcctgctggccgaccgggtgcggaccgcgaccgccgcggatccggtgctacccgccttcgacaccgcgagccgggccgaacggatggcgttcgtggatgcggtgcggcttctggagtcgttcggagtgctcgacgcggtggacggcagcgccgagtcctttgttgagtcctccgaagcaaaggtgcttttccgcgtggacaccatgctgttgctgcgcctgctcgccttgcctatcgggccctctcatctgggggtcccggtggaggaggtgcccttgcgattcgacgagctgctgaccgagctgtcgcgcgagcggcgctacggtcccgtcgcgagccgtgacgatgaaacttcaggatcctcaccgacacaacggaatctgtggttgcggcattcgatattccgccggctggccgacgacccggtgctgtatttcgacgagctgagtgccgacgagcgcgcctatctggcgtcgccgacgggtcgtcagctgttgcgacgggccgccgaacagggcggattcgtcctcgaggagcgcgccgagggcgtcctgctggtggacccggacggcatcgccaccgacggccgcttccccgacgacgccgccaccgccaaggttgcggcgcttctgctgctcgacgagctgcccgggccgaccacgcgagaacagttgctgcgcagtggttccgcgctcttggaacggtttccgcgctgggcacgaggctatcggggcgcggacggagtgcgggagctggtggacgacgccctcgccgtgctggcgtcgttccggctggtccgggtgacgcggtccgggctggacgtgccgcttgcggcggcggctcgctaccgggtgcgggagatccgcacgacgggttcggaacctctgggccaactggagccggcgggcctacccgaggcggcaggtcaactctcgacggaagggcggtccttcgaatga

SEQ ID NO: 50750 - DNA, 1224 bp, Nocardia seriolae
atgacggatcatctgctgtcgagcctgcccgcggacctggcgccgctgtggcgcgagctgcatcgccggaggacggtcggccgtccggtggtgaaggtcgttgtgggaccgttggactcggcgcagcgggcagcgatcgcggatttcttcgggatgtcgcggttgccgggcgagcacctgcgaatcgcggtgaccgaggtcgaatcggtggtccgagaggtgacgggcatgtcgctgcgggaggtgctcgagcggctcctcggtccgatcggtgatcgtggatccgatattcggcacgccgacgctgatcgtaaagagttgtgggagtggctgctcgagcatgaaggggtccgcgggcagccggcgctgggggagtgggcgcgggccacacgccgtacgggcgtcttcggcggttcggtcgcgcgcacccggatcgagctggagcgagtgctgacggtgttgcgtgaactgcccagtgctggaacgccgttgccggtgttcgccgatgcggtgctcggcgatccgcatgcgctggacgaggatcgtcggctgcacggtctcgtggtccgagcgctggccgcggtgtacgggatagatcctccgtcgaatcgcgcgcaggtgcgcctgctctgggatcgggcggggctcaccgacgacgagttgtcctcgtcggtgctggttgccgggttggcggtcgggggtcacggtgtggccgcgcgggtgctgaacgtgtgcgccgagacgggtgtcgcggcgtcgctgacgttgcagcaggtgcgtgcctcgcaacggctggaacatgtgccgccgagagtgtgggtggtggagaacccgagtgtgctcgcgctggcgctgactcgtttcggtgaccgctgtccgccgctggtgtgcacgtcgggttggccgcgcggtgcggcggtttcgctgctgcggcaattggccgccgcgggagcagagttgcactaccacggagatttcgacggcgagggattgcggatcgccgcgcatgtggtggcgcgggtgggcgcgataccgtggcggatgaacagtgcggcctacttggcgaccgtcggcggcgatgccccgccggtgggccgggtcagcccggtgccgtgggatccggagctttcggggcatctgctggcgacgggaaagtcggtgcccgaggagcgggtggcgcccgggttgctggatgaactggcgcggacggtggcgcgggactga

SEQ ID NO: 50751 - DNA, 1542 bp, Rhodococcus wratislaviensis NBRC 100605
gtgagtgaatcaggcagcgatccaggtcggtccccctcggggctgcgtgcagcgcgcccggcggttccacccccactccgggacgaccggttgaaactgttcgcgttcaccactgccgagaagcgcgcggagtacctgtgggtgctgcgggccttcgaccacgcccgcgccaactacgtcgtcctgctccacgccggcgacgtcgcccgcattctgaacggcctcgccggcgacgatccggccggacaactcggcgccggagacatcactcccctgctcgagcaactccacgtctgggaggtgctcgaacgcagctacgacggaacacgcgccgcgacgctggccgaataccggaaccggcacttcgtctatcagttcagtcaggccggctaccaggtgttccgagcagtcgaggacgcactggcggcccggctcgacgacgcgtcactgtcccggctggcgctgcccgacctcctcgccgacatgaacgacctggccgccgccaaccgcgcggccgacaacgacctcgtgtaccggaaactcaaccgtctcgatgcgacgctgtcggacatggccggacgcgccgcccagttctacctgaccctgggcgatctcgtccgcaccacggagatcacccccgagacgttcatgtcccacaaggacgctctcctcacgcacatgcgcgaattcagctccgacctctcgcgctatgcaccgaaactcgcggcggcgatcgcgctcgtggaagacaccggcgtcgagacgatggtgacgcgggccgccgccagcgacgagcgagtgttcctcggcatcgaagagcgcgaagccgattggcgcgcgcggtgggcggggctgacgcattggttcgtcgggagcgaggcgggtctcagcgagtcggagcgcctgcgcgagggcacgatgagtgccatcgccgccgtcctgtcgctgctgcgccgcgtcaccgagacccgcaaaggtggtgtcagcagagagagccaattgcgccacctcgcaggctggttcgccgcagctccgaccgaggacgccgcgcatgcgctgttccaggccgtgttcgatctcggccgtccgcgccacctctcgatggtgcacccggacgccgacatcattcccgacacacggtcgtggtgggaggcccagcccgtggagatctcccgcacgctggccgagaccggacgtcccccgtcgcccggcctgcccgcgcgggtacagcgcaacgagggcagcgtgcgccgcctgcgggaggaacagctgaccgcacaacgacttcgcgccgccgccgcccagtcgctggcccgaggcggggtctacgagcgggagctcgacgaggccgaaaccgacgtgctgctgagtctgctcaacgccgcgctgacggcgcgggttccggtcagcggccgcgtgaacagcagcacaggatcggagaacggcgtgaagctcaccctcagcccacacagcgaatcgacggtggtgcgcaccgcccgcggacgtctgcacctcgacggactgcaggtgagcgttcggtga

SEQ ID NO: 50752 - DNA, 1395 bp, Rhodococcus wratislaviensis NBRC 100605
gtgaaggcacgggagatctcgccgctcgccctcgattcgtatcagcgcgccgcccgcgtcatcctgtcgaatcacctggtgacacagacctatccggatcgcatcgcactccccctgctccgccggtgggccaccgaactacgcgacgatctgatgacgctcttcgggtaccgactcgaagtcaccgagacgaccgcccggctgttcacggtgagcgaccggctcgacgccgggacgcccgccaagacggccaccgaccgcacgttcgaccggtaccgctacgcctatctcgcgttggcgctggccgcactcggccgcgccggaaaccagatcaccctgtccgaactcgccgatcacgtggccgccgacgccgcacaggtcgacggtgtggatctgtccacggaacgcgcgtccgaccgggacgcgttcgtcgacgccgtcggctggctcgccgcccgcggcgcgatcgccctcgccgacggtgacgcgggcggctgggccgccaatcccgatgcgggagaagcgctgtacgacatcgacaggtccgtcgtcatcgccctgttccggccgccgcgcgcactgcagcacctccggtccatccgcggactgctcgccggcgcggacgcggtgaccgaggacgacacctcggatttcgggacaacccggccggtcgacgtgaaggagaccgcgcggcgggtccggcgtgctctcgtcgaacggccagtggtctacgccgccgacctggacgatcacgagctggtccaactcgcgctcccccgcaccgcggccgacgtcgagttgctcaccggactggtcgcggagcggcgtgaagagggtgtcgcgatgatcgactcctccggacgtctgtccgacgtccggttccccgggacgggaacggtcgcgcaggtcgcgctcctgctcgccggagagatcgccgatcgcgtactggacccggacgccccggagacggcccggatgccgctgccgcagggccggatcgacgacctgatcgaacaggtcgacagcgccattccgcagtccgggatcttcgacagcctcgccggcaacgacgggttcgaacccgcagaccccgcccccgcggaccggctgttccccctcgtcgaggacgagtggatcaccggcaccgtccggacactgaccgaacggttcgggcgcacattcgccgccgggtggcaggcggacccggacggtctgggacgggcggcgctggcgctgctcgagcggctacgcctcaccgcggccgtgccgggtggtgtgctcgcactcccggcactcgcccgctaccggggtgtggtggtcacgatccgcgaccgcacacccgagatcgacctgttccagagctcagcgaacgacagcgaggaagtcacagcatga

SEQ ID NO: 50753 - DNA, 4158 bp, Rhodococcus wratislaviensis NBRC 100605
atgacgagtgcgcgtttccggcccacccgcgccggaatcatcaacctctgggactaccgcgatcaggagttctccttcgccgacggtcgcctcgttctccgcggtcccaacggctccggcaagacgaaggccctcgaagtgctgttcccgttcgtcttcgacggccggatcgaaccccggcggctcaatccgttcgccggcgaggaacgcaccatgaaatcgaacctcctgtaccgcgggcaggagagcgcgtactcgtacgtctggatggagttctgccgcggcgcgaaggacgaccccgaggccgtcaccgtgggcatcggcatgcgcgccacccgcaccaacgacaaggtcacacgctggtacttcgtcgccgacggtcgcgtcggcgtcgacttctccctgctcggcaccgacgaccgtccgctcacgaagaagcaactgggcgagcagatcggcaccgactccatcaccgaccggccgctcgactaccgcaccgccatcgacgcccgaatgttcgggctcggcgtccagcggtacgaccagctgatcaacctcatcctcacactccggcggccccagctcgcgaagaacctcgaccccaagggactgtcgcaggcactcaccgacggtctccgaccactcgacgagcaactggtcctcgaggccgcccgctcgttcagcgacatggaggaggtcggccgggcgctcgaggggctggccgcggcggaccaggcggcgcaaagcttcgtcggcgtgtacgcgaaataccttcgccagcaggcgcgtacggacgtcgaccacctcgcgacccgtctcgaggccgtgcggtccggcatcgccgccctccacagggcggccgccgaccgggcccgcagccaggagagccgggcggccgccgaggaccgcttcaccgccgccgaacgcgcactcgaccaggccaatgcaaccctcgacgcactgaagcggtcgacggcctacgagggacggacgcagctcgacgacctcgcgcaggccgtctcgacgctcgagaaatcgaccgaactgcaggccgagaaggcacgcaaggccaaggcgaccctcgaacagcgagccgaggagcacgacaaggccggcgacgccgtcgcccgcaccgtcgaggcgctcacccacgccgaagacgaacttcacctcgccgccaaggacgcgggaatcacctggaccgcactgcccgagaatgcgcggaccgaccaactgaccgcggcgctgcgcgggcacaccgaggaacgcgacggcgacatccgcgcggtccgggcagcgctcgccaccgtcgagagggcggccaccgaacggaccagagccgacgaggcggcacgccgcggcaaggagcagctcgacaccgcgacggtggccgttctcgaagccgagaccgcggtcgaatcggcccgcagccgctgcgccaccgaactccgatcctggtggacggaacagtcgtccctctacgccgagatcgacgcgcccgcttcactgttcgaggccctggacgccgccctcgcccggatcggcgacgacgacgccgcgaccctgacggagacgctgaccgaacagaccacggacgccgtcgacgcgctccggctgcgccggcagcagtacgaccgcgacgccacctccgccgaggaggcgatcgccgaacacgaatcggcacgcgccgccatcgaatccgagcacgacgacgccccaccactcttggccgcccggcatgacgcccgctcccggctgaccggtgcgccgctgtggcggctggtccgattcgccgacagtgtcgacgccgccgcggcggcgggaatcgaggccgcactgcaggcggcgaacctcctcgacggctgggtgaccgtcgacgacgcgctccccgacgtcgaatccgaacaattcctcgtggcccttccggccgaggatcggcccggcggcacgaccctcgcggacgttctcgaggtcgagcaggacacgggtgttcccgacaatcgcgtacgcgggatcctcgaatccatcgccctcgaatccctcgacctgtccgaaggaccggtgggtgtcgccgaagacggcgcgtaccggcagggaatccagcggggacgccacacgaaatcggacgccgagtacatcgggaccacggcacgggcccgcaggcgcgctgcccgtatcgccgaactcgacagcaccctcgaggaaacccgggctacgctcgacgaagcccgggcgtccgcggatgcggcggcgtcgctgctgtcgcggaccaccgcggcggcgcaggccctgccccgcaccggaacgatcctcacggcgctgaagaaggtcaccgaatccgcaggcgcactccgcagccgctccgacacggcgacaacggtcggtcgcgaactcgaccaggccatcgcagacctgtccgcgaaggagaagcaactccgggccactgcgtccacgcaccggactccccacgtcgcccgcgagatcgactcgctcgccgcggccgtccggcacttcgagaagcagggcgagatggtgcagcggtgcaggcgcgaacacgccaaggaggtggagcacacccgcgagtccgaggaccgactgcacgaggcgcgcggcagcgcggaggagttcgcggaagaagctgccatcgccgaagaggttctcgcgcaacagatccaacgcctcgagacgctgcgcgacacgctgggagctggggccgagcagttggaccggcagctcgaggaggcgcacacgcggatcgaggcgtgcaagaaggagcagcgcgacgcccgcaaggcggacaaggacgcgggtgaagccatcggcaaagccgagggtgcgtacaacacggccgtccagacgctccggctggcgctcacggaaacacacgccgacgccgcccgcctcgcgccgtatgcccggcgcgacctactcgaactcctcggcgtcgacggcggccacacctggccggcgagctccgcggcgtggatgagtgccgaacagctggtgtatcgcatccagaacgccgaagacgacaccccgatcctgccgcccgaagtggacgcgctgttccgcgcactggacggcgccaccgaatcggtgcgggtcagcgactcggcgcgcaagtcgacgcgcaccgcgctcaccgccgcgctgcaggacttcgacgcacagttggcggccgccggccaggactaccggttgcagtgggacgccccggacggcgtgaccgtggtgcaggtgcaggacgacgaggggtactcgtcgatcggcgagttcgccgcccgcatcgcgtccgcgcgctccgatcaggaattgctgctcaccgaatccgagcgtcgcatcctggaggacgcgctgctcacgggtctcgcacagcagatccacgaacggaccgtcgacgcccgcgaactcatcgcccggatgggcaccgagatgcgggagcgccggatgtcgtccggcaacaccatcggcgtccactgggtgctcgccgacaacctcgacgacagcgcgaaggcgatctccaaactgctcgagcgcgacacctcggcgctggggccggacgagctcgccacgatgcgcgcccacttcgctcaccagatcaggactgcccgcgccgcccatccggagcgttcgtacccggagatcctggcgtccgccctcgactaccggcggtggcgggtgttctcgttcaccctcatcagcggcaccggcaacgaagaccggctgaccgtcgcccggcacagcgccctctccggcggcgagcagtccgtctcgctgcacctgccgttgttcgccgcagcgcacgtcatgctcgattcggccgacccccatgcaccgcgactgctggcgctggacgaggcgttcgccggcgtcgacgacaacggccgggccgaactgctcggcctcagcgtgcaattcgacctcgacctgttcatgaccgggttcgacctgtggatcacgtacggcggtgtgccggggtgcgcgcactacgatctggcgcactcgacggccgagcagagcgtcagcgccacgctgctcgtgtggtcggatggcgaactactcgccgaacacgacggcaccgacctggcgcaggcgctcggttcgcccctccgcaggcgggtcccgacgccggcggagggtgctctcgagttcgcctga

SEQ ID NO: 50754 - DNA, 1608 bp, Rhodococcus wratislaviensis NBRC 100605
atggacgccatcgccgacccggtcgacccgaagccgttcgcgcatctccatcagcagaacgccgcggtgtaccgacagatcatgggcgcctttgtccaggccaaacgccggttcatcgtgcacctgcgccccgaggacgtccgcgacgcgcttaccgcggcgactggcggtgcaccggagctgccggcgatcagcgatgcgctctcgtcacttgagcactgggggaacctgcactccgacccggacaccagccgcgtgaccaccgtcgaggagttccaccgcgcacgctacctgtaccagatgactattcacggggatgcggccgaggaggccctcgacacctatgatcaggcactcggccggcggggcgcgttgcagtcggtggcgctggtcgacatcgccgcccagctgcgcatcctgctcgagctggcccgtgtggccgggccggacccggccaaggcccacctgtccctgctcgccctcgtcgaccggttcaaggacttggcggcgaatgcgcaggcgttcatggggtcgctggcccgcacaatcgacctgcaggacgccgaggccgaggcgttcctcgcttacaaagaccagttgatcggctacctcgagcggttcatcaaggacctcgtcggcaccggtgcggagatcgccgggctcgtcgaacaactcgagcaggccggcgtcgggcgtctgctcgacatcgccgccgaacgtgcggcgcaggacgcggcccccggtggccccccggacagcgcctccaccgatgccgagaagaccggcgaggatccccgccaggtcgaacgcaccaacagcaggctgctctggcaggaccgttggcaaggattccgggtgtggttcgtcagcaccccgcaccacccgagccaggcgatgcaattgcgcacccaggcacgggcgtcgatcccccgcctgctgcaggtggtttccgcactcaacgaacgccgctcgggccggtccgatcgcgctgccgacttccgcacactcgcgctgtggtttgccgaggcgcccgacgaggcctcgatgcaccggctgtggcgctccgcgttcggcctctccccctcccggcacctgaccgtcgacgcggacaccctcgaggcccggcaggaagatccggtctcgcccggcaccgcctggaaccaggcgcctgcgctactgatcagtccgcggctgcgcaaaaccggcagctacgagcgccgcggcaaaccgaacaaggtgatcgaccgctcggagcaaagacggtatctggcagatctggccgcccgcgaggcccaggagaccgccgaggcccgcgcccggctggcgacccccggcccgattcgcctctccgacctcggcgcgctcaacccgcccgagttccggctcttcctcggactgctcggggacgcgctggccaccaaggtccccggtgcacggcgggtggagaccaccacctccgacggcaccatggcgatccagctggtcgagctcgaccggccgggcaccgccgaggtccgcaccccgcacggcattttccgcggtcccgaccacctcgtcgagataaccgacctcaccgacctctcccgaactgaggaacggagcgcttga

SEQ ID NO: 50755 - DNA, 1155 bp, Rhodococcus wratislaviensis NBRC 100605
atgccgggccgcgcgggcgatcctccgcaggccgctgctgcggtgcgtcggcatgcgtcggcgctgcgcgaatggttccagaccaacaccggttgggcactgatcgtcaactccgagctggcacgcttggtcaagtccgtcgaagcgaacgacgccgtgcccggcgaacacacccatccagcggtcgacacccccagcaagcaacccttcagccgccgccggtacgtcctgacctgcctatcgctggccgcgctctcccgctccgacgcccaggtcaccctcgggcggctcgccgaacaggtggtgctcgccgcggccgatcccgacctggtcgacgccggcatcgttttcacgctcgagcaccgcgacgagcgctccgacctggtcgcggtggtgcgcctcctgatcgattacggggtgctcacccgggtcgcgggcgacgaggactcgttcctcaacgacaccggtgatgtgctctacgacgtgcagcgccgggtgctgtccgccctgctcgccacggcgcgcggtccgtccaccgtcgacgccgacggcttcgacgagcggctcacccggctcaccgaggaactgccggctaccaccgacgacctgcaaaaccggcagatccggcaccggatcacccgtcgactgctcgacgagccggtgctctactacgacgaactgactgaggccgaactggcgtatctggccgggcagcggacgtcgatcaccggcaagatcgccgtcttcaccgggctggtggccgaggtacgcgccgagggcatcgccatggtcgacccgcacgatgacctgaccgacgtgcggatgcccgaggtcggcaccgacggccacgccgcgctgctggtcgccgactatcttgtcgccgccggccgcaccgcagtcccggtcgccgagctccacgagtggatccggaagcaatccagcatctttgttgcacaacgagtctggcgccggagtgcgggtgagcccggggcggagacccggatcgtcgacaccgccctcggcaagctcgaggcgctgcgcctgatccgccggatctctgacgcggtgcacctccgcccggccatcgcgcggtactccctcggcgaacccaccgttaccggcatccccgagcccgcaggaagcaccctcgcgtga

SEQ ID NO: 50756 - DNA, 4131 bp, Rhodococcus wratislaviensis NBRC 100605
gtgagcacccgtacccccaccccgctgccggccccgtcgctcgagcggtggcaacccctccgcgccggacttgtcgacctgttctactacgaccgcgaggagttctggttccgcgacgggcggctgctgctgcgcggcaacaacggcaccggcaagtcgaaggtgctcgcgctgatgctgccgttcctgctcgacgcggacctgtccgcacaccgggtcgaaccggacgccgacccgaagaagcggatggactggaacctgctgctcggcggggcgcacccgcacggggagcggctcggatacacctggctcgagttcggccggctcgacccggacggcgtagcccactaccgcaccatcggcgccgggctcaaggcggtctccggtaagggcatgctgccgccgtggttcttcgtgaccgggcaacggatcggtgacgacctctcgctgatagaccacaccggtaccgccctcaccaaggaccggctcgcccaggccctcgacgacacaggaacccgttacgaccgggcccgcgaataccgccgcgcggtcgacgagacactgttcgggctcggcgagcagcggtacggcgcactggtcgacctcctcatccagctgcgtcaacctcagctgtccaaacgccccaccgagaaggcgctgtccgccgccctcactgaggccctcccaccgctcgaccaggcgatcctcgccgacgtcgccgaagcgttccgcagcctccaggaggaccgggaggccctggccgacctgcgggagtcgatggagggcaccagctcctttctcacccactaccgtcgctacgcgcggatcgcgtcccggcgccgtgccaccgttccccgaaaagcccagtcgcacttcgagaaggtctcccgcgatctggccgatgccgaagctgcccacgcggaggccgaacagcacagcgctgccgctcgcgccgagatcaagcgcctcgagatgcaactggcggcgctgcacgaacgggaccgtgccctgcgcgacagcgaaaccatggacagcgcaagcgaactcgaaatcgcgggagcacatgcccgcgaccgcgtcgccgataccgagcggatcttcgacgaacaacgcgacgcgcaggctgcggtcgagcgtctgcgcgcccgcgacgagaccgcgcacacccggcgcgccgacgctcggacccgactcgccgacgctcgcaccgacgcccaggactgcgccgacgacgcgcggatcggccccacgcaccggcagcaggtcgacgacatcatcgacctagaagccgcctccggcggcgaggcccgtacggccgctgagcggctgatcgggtcccacggccgggccatcgcccacatccggacactgatcgagggggcacgcaccgcgcagcgcgcgctcgccgaggcgcgacggcggctcgtcgagatcgattcccaagcagacgaactcggcgaacgagtcgtcgctgcccgggctgctgtcaccgccgagtccacggcgctggtcacgaacatgcgcgggcacctcgacgctgcccgcgagttgcatccggtcgagcccgccgaactgctcgccgaactcgaactctgggccgagtcgatccagggtccgaacccggccggcttgcgcctggcggcgacggtgtcggcggccgcggacgagatcacccgacaacgcgccgatctccgatcacagacgaacacactgcagcaacgccgcgccgacctcgccgaggagatcgcccggctcgacgccggcgaggacaccgcacctcccccgtctcatacccgcgccccgggtatccgcaccgaccggccaggtgcgccgctgtggcgggtgacggagttcgtcggcagtgccgccgacaccgaccgtgccggtctcgaggccgcgctggaggcctccgggatcctcgatgcatggatcaccccggacggcaccctgctcgacccgatcagcggcgacgtgctactcgcaccgcacgagccgcgcgacaccaagggccctcgcctgtcggccgtgctgcgccccgccatcgaccacgacgacacgcagtccgcggcgctgaccgaggacaccgtcgccgccgcggtctccggcatcggcctcggcgccgacagcgacctgcacagctgggtcgacacggacggccggttccgcctgggtgtgctcaccggggcgtggcgcaaacccaccgcggagttcatcggccgcggcgcccgagaatccgcccggcgggcacgcctggtggtcctgcgccaggacctcaccgcagtcgacgaacaactgtccacactctccgaccacgaccgaaccctggcgcagcgccgcgagaccctcaccgcggaagccgccgcggcaccctcggacgacgcactgcgccaggctcattcgaccgaggccgccctcgagagcgagcagctccggctggtcgagtcccggtcctcggcgacggcgctcgtcagtaccgccgacgccgtgcaccgcggtgccgccgacaccctcgcgacggacgccgacgacgccggactgccgaccgatcaggccgagctcgacgcgatccgcgaggcactgggcaactatcgcgtcgccgtcgccggactgtggccggccctcgccgccgcgggcgccgccgcggacgtcagcgcggaagttcgggccgatctggaacgcagcgaacgagcgcacgcggtgatcgccgaacgcctggccgaggccacgatcgtcgccgaggccgcgcaggagcggtaccgcaccctacgcgagaccgtcggcgccgaggtcgaggaactcgaacaccagttgagtctggtcgaggcggacatcgaggcgaaccggcagacccaccgccgcgccagcgcagccaacgacaccgcgctggaggcacgcggtaaggcggatggactgcgggggcagcttgccgagcagttggaagcggcgcgcgcgacccgcaccgaggccaccgagtcgctgcgtcggttcgtggggacggggctgctcactgtcgccctgccggagctggaggtccccgataccgcgtcggcgtggaacccggatcctgccgtccgtttggcacgccgggtcgaccaggagctcgccgaggtggacgacggcgacgacgcgtggaatcgcgcgcagcgccgggtggtcgaggagcacaagagcctcggcgacatcctcggccgccaaggcaactccaccatggcgcagctcctcgacgacggcatcgtcgtggaggtggccttccggggccggccgatcacggtgagcgggctggccgccgctctgtccgaggaagtcgccgaccgtgaacggctcctcaccgaacgcgaacgcgagatcctcgagaaccaccttgtcaacgaagtggccagcaccatgcaggaactcatctccggtgccgaggcccaggtcgcccgaatgaacgccgagctcgatacccggcccaccagcaccgggatgcggctgcggctgcactggcaaccacgcgaggacagccccacgggcctggccgcggcccagcagaaactgcgccagaccgccgacgcctggtccgaggaggaccgcgtcgcggtcggcactttcctgcaacaggagatcaccgaggcccgcgcgcgcaacgtcggcggcacctggctcgagcatttgagcgaggccctcgactaccgatcgtggaaccgattcgcgatcaggcgtcaccagaacgggcagtggaaatccgccaccggcccagcgtccggcggcgaacgggccctcgccgcgagcgttccactgttcgctgcggcctccgcccactacggatccgccgggaacccccacgccccaaggctggtcaccctcgatgaggccttcgccggagtcgacgacaatgcccgcgcacagtacctcgggctgctcgccgcattcgacctcgacgtagtgatgaccagcgaacgggaatggggttgctacccagaggttcccggactcgccatcgcacagctgtcccgaaccgacgacgtcgccgcagtgctggtcacccggtgggaatgggacggcgcgggacggtcccgggcccccgaaccttccctggccgcgacgcccgaggcgcccgccccgaccgggcaggatggtctgtggggatga

SEQ ID NO: 50757 - DNA, 1251 bp, Rhodococcus wratislaviensis NBRC 100605
atgaccgcagaccccgaccggctcgcgcgcctgctcggcgacagcgatctccactggctggtctcacgactacgggcacggatcgagcacgggcggccgctggaaggaaccgtgaccctcgccgatccctcccccggccagcgcgccgccgtcgaacgcctgctcggacgccgcccccgaacaaccgggagtatcaacgttccactgccgcaggtagagaaggtgctgaccgactccggcagctggtccgcaggactcgcggcggcgatcatcgaactgaccgggtcggtcaccgtccgcgccgaagccgagcaacgcctcgaggcgtcctggcgggacgccttcgatcccctcgccactgtcgtcgaccgtaggaccgaactgctcggctggtacgaacgtctctccgcgacggggagggtgcgccgactcaccggaacaccggaggccgcatcccccatcgtcgccgcgctggcgcgagtggtgacgaacctgccctcgtccggagaaccgttgggccggttcgccgcgcgggtgctcggcgacgcgcacgcgctcgacgacggacgaccactggcaacactcgcgctgggcgccgcgcgggcgttggcgcaactcccggacggacccgacacccgcgacgccgccggacgtcgcgaggtatgggcctcggtcgggctgctgcgcgacgaggtgtcgagcactgttctggcgctgggtctccccggtgacgcccactcggcgaccggtcgtgcgctgggggaatggcgggaggccggggaaccggccgtgctcaccctgcggcaactggtccgatgcgagccgcagctcatgctggcgggccggtcggtgttcgtgtgcgagaaccccgtcgtcgtgacttcggccgcggacgagctgggttcgtcctgcgcgccgctggtgtgcaccaacggtcagccgggcagcgcggtgctgcacctgctgcgcctactcgcccggagcggggcaacgctgcgatatcacggtgacttcgactggggcggcatcaccatcgcgaatctgatgatcgaacgcctcgacgtgcagccgtggcgattcaccgcgaatgactaccgtcaggcagtggccgccgggctcggcgggccactctctgatcggcggatcgaggcacgctgggacgcggcactgagcgcagagatggaaagcgcacgtcgcaaggtcgaggaagaactggtgctcgactcgctgctcacagacctggggcggtaa

SEQ ID NO: 50758 - DNA, 1590 bp, Streptomyces sp. PRh5
atgacgtcaccagcttccggtccgcgcggcagcgagcatgcgccgttcatccatctgaccgtgccgaacgcggccttgtaccgtcaggtgatgcgtgcgttcctcgcggcgaaggagcggttcgcggtgcatctgcggcccgaggacgtgcacgccgcgctggagccggagcaccggccgacggatccggacgcggtggtgaaggctctggacagcctcgtggagtggggcaatctgcgggcggatccggacacctcgcgggtcaccgcggtcgaggacttctaccgcaagcggttcatctaccagctcacgcaggccggggaggccgccgagcaggcgttgtcggtgtacgacgaggcgctggggcggcgcggtgcgctgcaggcggtggcgctgcacgacatcgtcacgcagctgcgtgcccttctggtgatcgcggccgagcgggaggagggcgggccggacgcggcgaaggcgcatctggcgctgtcggcgctgacgggccggttcgaggcgctggcggagaacgcgcgggcgttcatggggtcgctgcagcgcaccatggatctgcacggggtggaggtcgaggtgttcctcgcctacaaggaccggctgatccagtacctggagcggttcatccaggacctgatcacgctgggcgggcggatcgcggtgctcatcggcgagctggagcaggacgggcgggccggggtgctgctgcggctggcggcggcccgtgaggcggccgacgccgcgcccgaggacgccgaaagcgccgaggagcaggcgtatgagcggtgggcggcgaagtggtcggggctcaccgcctggttcgtctccgcggacggccgtgagtcgcaggcccggctgctgcgcgggcgggccctcggggcgatcccgcagctcctcgcggtggtcaggcagttgaacgagcggcgggccgggcgttcggaccggtccgcggacttccgcaccctggcgcgctggttcgccgaggccccggacgacgaggcgcggcaccggctgtggcgcgccgccttcggtctgtactccgcgcgtcatctgaccgtggacgccgataccctggccgagcgcacggcccgcccggtgcccgcgtccacgtcgtgggccgaggccgagccgctgcggatcagcccgcaactgcgccgtaccggcagctacgaacgccgcgggcgggcccgccgggtgcgggaccgctccgaggagcgacaccggctcgccgagatcgccgccaggcaggcggaggagatcgccgccgcccgtgcccggctcgcgacggacgacaccatacggttgtccacggtgggagaactggacccggtggccttcgggctgttcttgcagctgctcggcgatgccctggccacgtggcgacccggtatgacgagcacggtggcgaccagcaacgacggctcgatggagatccggctgacggccctcgccgacgggacgacggccgagatccgtacgcccggcgggaccttccgcggccccgaccacctgatcgagatcaccgacctcacccggcccggccgcgcaggacggccacccaccggccgagacgattga

SEQ ID NO: 50759 - DNA, 1266 bp, Streptomyces sp. PRh5
atgaccacgcccctgggcgaggtactggacggccggcgaacggccgaggtgcacaaggcggcccggacgctgttgaaggagccgctgttgctggcgcggggcccgtacgcggacgagttccggctggtgcggcagcacgcctcggagctgcgcgactggttcgaccgcaacaccggctggtcgctgcgggtggacgcggaggccgcccggctggcccggacgcccggcaccttggccgatcccacccatccggcgcgcgaggcgtcccgtggccgcgccccgttcacgcgccgccggtatgtgctgctgtgtctggcgctggccgcgctggagcggggtgaggcgcagatcgccctgggccgcctggccgagcaggtggtgctggacgccgccgatccccacctggccgccgccggggtggagttcaccatggagcgccgcgacgaacgcctggatctggcggcggtggtgcggctgctgctgcgccatggggtgctgcgacgggtggccggcgaggaggaggcatacgtcagcggtagcggcgacgtgctctacgacgtgcagcggcgcgtcctggccgggctgctggccgcccgccggggcccgtcgaccatcatcaccgaggacttcgaggaccggctggccgagctgaccgccgagagcgcgctggacagcgacgagctccgcttccgcgcgatccgccagcggctgacccggaggctgctggacgacccggtgctgtactacgaggagctgaccgacgaggaactcgtctacctgacccgccagcgcgccttcctcaccgcccgcatcatggaactgaccggcctggttcccgaggtgcgggccgagggcatcgccatggtcgacccgcacgacgatctgacggacgtacggatgccggagcagggcacgcacgggcacgtcaccctgctgctcgccgaacacctggcggccatggacggcgaggtgagccgcgccgacctcgaacgcaaggttcaggagctggccgccgaacacggtgcgttctggtcgaagagcgccaagcagcccggcgcggaggcggagctggtcggccaggcgctggagaggctcaccgcgctcggcctggccgccgccaccccgaagggcatcgtcccgctgcccgcgctcgcgcggtacgcggtcggcgagaccgtcgtgacggaaccgggacaggcatcctcccgcacaccccgtgctcctcgcacgccccgcacacccaagcgaaaggcaccgcagtcgtga

SEQ ID NO: 50760 - DNA, 4146 bp, Streptomyces sp. PRh5
gtgaccgccctgcccgacccgacacccggccggtggcagccgctgcgcatcggcctggtcgacctcttccactacgacacggaggagttctggttccgtgacggccgcctgctgctgcgcggcaacaacggcaccggcaagtccaaggtgctcgccctgaccctgcccttcctcctggacggcgacctgtccgcccgccgggtggaacccgacgccgacccgggcaagcgcatggaatggaacctgctgctcggcggccggcacccgcacccggagcggctcggctacacctggatcgaattcggccgccgtgaccaggactcgggccgggcccgcttccgcacgctgctgtgcgggctgaaggcggtaacgggccgcggtatcgcccgccactggtacgcggtcaccgaccagcgcgtcggcgaggagctgaccctgctcgacgccaccggcaccgcgctgtcgcgggatcgtctggccgaggccgtcgccggacgcggcatgatctacgaccaggcgaaggcataccgcagggcggtcgacgaggcgctgttcgggctcggcgagcggcgctacgccgccctggtcgacctgctcatccagctgcgccagccccagctgtccaagcgccccaatgagacggcgctgtcccgcgcgctgaccgaggcgctgccgcccatggaccaggcggtgatcgccgatgtggccgaggcgttccgctccctggacgaggagaaggaggaactgcgagcggccggtgaggccgaacgggccgcctccgccttcctcgaccactaccgccgctacgcccgcgtggccacccgccgacgggcccggctgccgcgcagcgaacacgcccgctacgaacaactgcaccgtgatctgtcccaggcgcggaccgagcgggaggcggccgagcggcaacgggcggaggccgcggagcggatcgcccagctggaggagacggccgtgcggctgacggcccaggacgccgcgctgcgcgcgggtccggagatgcgcagcgcccgggagctggagcaggctgcggccgatgcgcggcgcaccaccgacgagcgggcccgtgcggaggcggaccgggaccaggccgcccaggcgaactcccgcgctctcggccgcctgacgggcgccgaaggacggctggcggcggccgagcagcgggtcgggagcacgctgcgccaggcaggtgagacggccagagcggcccggctccacgacgtgctggggccccacgacacggtcccggaggcagaactgcgccacgcggccgaggagtcggtggcacgccggaggcgcaccctcgaccacgtggaggagctggccgcggacgccgagcaggccgccggcgaacggcgggccgccgcccgccgcctggacgaggcccaggccgaggccgcccacaccaccgaacgccaggtccaggcggaggcatccgccacacaggcgggccaagacctggtgggtgccgtacgcgaacacctcgaccagtgcacggaactggacctccccgacccgacggggctcctggacgctctggacgactggggcacgcatctgcacggccccagccccgcccgggaacagaccgcggcagcgcaccgcgcgcaggccgcggacctggccgaccaagccgccgcactcggccagcggctggccgaactggccgagcggcggaccgcggcggaacgggagctggcggagctggaggccggcggccagcacggaccggaggcaccccgcacccgtaccccgggcctgcgcgaccggactcccggagcgcctctgtggaggctggtcgacttccacgaccacgtcactccggatcaacgggcggggctggaggccgcgctggaggcatccgggctcctggacgcgtgggtgtgcccggacggcacccttctggaggcgagcgggcacgacgtgctgctgtccccgcttccttcgcatgcgccgccggtcggctccgtcctcgccgacgcgctgcggcccgccgtcgaccacggcgatccccgggccacgcaggtcggtgaaccggccgtgtccgctctcctggcggccatcggcctcggggacaccggtgcacccggcacctgggtggcggcggacggtcgcttccgcatcggcgcgctgaccggcagctggtcgaaagaagcagccgtgtacgtgggtgaaggcgctcgcgaggaagcacgccgcgcccggatcgccaccctgcgcggcgaactcgacgccctggccgccagcacggcacgccgcgaagccgaacgcgccacagtggccgcgcgccgacgcaccctggacgccgaactggccgccgtccccgacgacgcacccctgcgccacgcgcacgcggtggccgccgcggcggcggacgccgcccaccgggcccgcacccgccaggaggaacgcgcggccgaactcaccgaggcggcccgccgcgaggccgaagcggccaccgcactcaccgagactgctgatgccgtgaacctgcccgccgaccgaccggccctcacggccgtccgccaggccctggccgaccacacggccgccctcgccgccctgtggccggccctgcgcgaccgggccgaggcgcgccgcgctgtcgccgacgagcaggcggaagccggccggaccggggaacgggtggccgaactggaccagcgtatggccgaggcggcccggctcgccgccgccgcggacgaacaccacaccacgctccgctcgaccgtcggcgcggccgtcgccgagttggagcgccgtctggccgaaaccgcgggtgccctcgccacgtgcgagcgggaccagaagcaggcccgacacgagtactccgccgcggaccgccgcgccggccgcgccgagggccgtatcgagcagctcgacaaagacgtccatgaagcggcggccacgcgcgccgcggccatcgccgcgctccagcggttcgcggccaccggcctgctgaccgtcgccctgcccgaggctcccgtaccgccgctggacgacggctcctgggccgccaccccggcgatcgcgctcgcccgagcgatcgaggcggcgctgtccggtacggacgactccgagggcgcctgggaacgcgtgcagaagcggctcagcgaggagtacaagaagctccaggacgtcctctcccggggcggccacagcgccacggcgcgcatgaccgaggacgggatgatcgtcgacctcgtctaccagggccacgggcgggccgtgcccgaactggccggagcgctggccaccgaggtccaggagctgacccgcatactgtcggcgcacgaacgcgaaatcctggaaacccacctgctgaccgaggtcgccggcacccttcaggagctgatcgacaccgccgagcgccaggtacgcgccatgaacaccgaactcgagcagcggcccacctccaccggcatgaagctgcgcctgatgtggcggccctcccgcaaggcaccggccggactggcacaggcgcgggcgcggctgcgccagtccgccgacgcctgggcggccgaggaccgggcggcggtcggcgagttcctgcaagcccagatcgcccgcgcgcaggccgaaaacgccacaggcagctggctggaagtgctcaccaccgcgctcgactaccgcgcctggcacgaattcggcatcgaacgccaccagcacggcgcctgggtgcccgccaccgggcccgcctccggcggcgaacgcgtcctggccgtctccgtacccctgttcgccgccgcttccgctcactacgccaccgccgctccccacgccccgcgcctggtcaccctggacgaagccttcgccggcgtcgacgacgactcccgcgccaagtgcctgggcctgctccacgccttcgacctggacgtggtgatgaccagcgagcgtgagtgggcctgctacccgcaagtgcccggcatcgccatcgcgcagctctcccgcgtcgacgacatcgacgcggtcctggtgacccgctggcagtgggacggcgccgagcgggcacgggcccccgaacccgaccgccgcatggcgacggtccccgcaccggcacactcccccgcggcgcccgagcccacccccaccgagagccccgcacccgaccacgacgccctgtgggcctga

SEQ ID NO: 50761 - DNA, 1248 bp, Streptomyces sp. PRh5
atgagcgcatccgacacccccgccgggctcgtcgaccacggccgcctcacccgtctcctcggcgatccgggctgtgcctggctgctggaccggatacgccgccggatggaacgcgccgagccgctcaccggcccggtcatcctggccgcgcccaccgacggcgagcgggccgccgccgagcgcctgctgggccgagcccccggcggcgggcgctcgctgagcgtccggctcgacgccgtcgacaccatcctgcgccgctccggcgtcagtcccgacggcctcgccaccgccgtcatcgccctcaccggacccgtcaccctcctcagcgacgcacgccgacgggaggcggacgcctggcacgacgcgtacaccccgctcaccggtttgtgctccgagcggcccgaactggccgactggtgtgagcacatacgcgtgagcggtctcgtccgccgcctcgcacgcggcccggaggccgcccgcgccctggtcgcctccaccgcgacggcgctgcggagcctgcccgcggatccggccgtctccctcccggccttcgccgcccgcgccctcggcgatgcccacgccctcgacgacggcaccccgctcgccaccctcgtccactccggcatccgcgccctgaccggcttccccgacggcaccggagccgagtggcgccgcgaagcatgggcctccgcgggcctcctcaaggacgccctgtcctccaccgtcctgaccctgggcctacgcggcacacccgcactcgactgggccaccggcaccggggaacccgccgtgctcaccctgcgccagctcacccgcacccctccccgcgaggcgcccccggtggtgcacatctgcgaaaacccgaccgtgctcgccaccgcggccgacacctacggcccggcctgcccacccctgatctgtctccagggccagccctcggccgccgccctcaccctcctgcgccacctgcacgccaaccgggcaaagctgctctaccacggcgacttcgactggggcggcatacgcatcgccgccgcattgctgcggcgcgtgccctggcgcccctggcgctacaccaccgccgactaccgcgccgccgccgacagaagccccagggcaccatccctgacgggcacacctgccaccgctccctgggacccggccctgcgggcagccctcagcgaactcggcgtacgcgtcgaggaggaaaccgtcctcgacgacctcatgaccgacctcgcaccctga

SEQ ID NO: 50762 - DNA, 1503 bp, Paenibacillus polymyxa SQR-21
atgagctttctattaaatcccgtaaaagaggcgacatatctttctgcccctaaagcagaaagataccgtcctatctgttacgttttctatcagaagtaccgtcaagaatataactcttacatgttcctggatgaagtgtatcgagagttagtaacgtcagagcagtttggctctcactttacgaattacactgaaaaggaattggaagaagaccttaaggcgctcgtgagatggaacaacctgatcgtccatcaagatgaatctcatgcacagcgcatcgaggatttttataaacgcaagaattattatgaggtcacgcaatataccatttcactggaacgtacgctggaggagatgcagcataatctgcaggcgatccgcggcggatcatttgagcgcgtattagcggactatattttagaggatctaactaaatttcgtaagtggaagcctatgaacaacggagcattaggcgatatccgtaacatctggcgcgacctcatgtcccgatttgaagcccttcgcaacggcaccgccgatttcttgtcgcacgtaaacagtgagccttatgaacgcctgatccacacggagtcttttttgccgtacaaagaaaaatttgtacgtctgttaagcgacttcgtgattggcattatggagaagaaagatttgattgaggagcgcctcgggtttatcgatgaaagtgagatcgagcacattatttccgcgattgtttcttacgaagcggagcagcagattaatgataagtttgaggtggagcttgcctccgagagaagaagggcagaatggcttggttttaaagggtggttcgtggagatcaacggtcgcaaagcgagttcccgatttctcatcgagcaaacccgcggcaccatccaaaaaattgtaaggattgcagatcagattagcgataaattcaactactttaaaagccgtaagaatgactatttggaactggcccgtatttttgcaaacacttcgaacttacgggagtgccatgttattgctggcgcgatgtttggcgcttccaccacaaaacacttcttagtcccccgtaaatccgaggatgataacactaagcatgtgtgggaatgtgatccgttcgaactgccgctcaacaaaaagacgcctgggaaccgcaacggacgcaccaaactgcctgtatacgaggatcccttagcacagatgtctctagttcaggagcatttggagaaaacgcgcatggtgcaggagcagttcaacaacctgatcaagaacggcaaaattacgctgaatgagatcggtgtcgtgtatcccaaagtgcgggatttgctgcttgagttattgggacaagccatgattacaaaaagcttgaaaagccaaacggaagacgggcgtcgattttatcttaggcttcgttctaacaaacacatccgcctgcgttccactgacggtacactgacgatggatgattacgaattcgtttttatggaggaacagaatggataa

SEQ ID NO: 50763 - DNA, 1152 bp, Paenibacillus polymyxa SQR-21
atggataaagatcggttggtgctgcaggagtgcattgaagccctgtttcattaccactggattcatcgggatacgcaggcagatttgtattttcagattcttgctcgaaaagcagatatcgccgacaccgtgcgcgaatattttggctatcgtctactcttgcgtaatgaatttatcaaactagagaaaattcccgtctcgtcaaagatgtttatgggcattggcggctttacaaattcgcttcactatatgtttttctgttgttttcttgcttatttggaagacaaaggggaagagcagcagtttactttacaaaacgcttgtgatgccatccgtatgtattatcctgaagtagccactcctttcgcctgggaggagcgttcgcaccgtagggcctttgcagatgttctgcagcatagcgtgaaattaaggcttgtctatgttgtagaccgtgacattgatgggtttcgagacgatgaaaagcatgatgttttgtttcagaccacgccatatttccgtcatttcgcaccgctgtacttgtttgatcttagtaaaatccaaaatctaagccaattggaagaatatattgcgaaagagatcgccaatggcacaactcctaaacaacgtcttctgcgcagattctttttggaatctgctgtgtatgatgacgaactgtcagaagaggaagtcaagcttctggaagatagagacgagctagagagactgaacgaaatgatttcagaaccatttgaatattggcacctcgaacggtaccatcgcacgacgatgctcacccatgcagaaaatcgttatggagactatcatccaaaagatgagcagatttcaaatacagctgtgcaatatgcaaccctcatttgggataaagtaaacggccaagaagtaactctcgaccataacggccgtgttctatgttcggaacatgaggcgatcaaatggtttcaagagatcaaagatctgcatagccatgggtggaccaaatcgtatacagaacggcccgtcaccgccacttggagagaagttatggagtatatgtctgactttcaaatggcggatgtacttacgggcaagcaagttgtattttattccgctgcgggccgtgttactggggaatacgtatctcaatctatataa

SEQ ID NO: 50764 - DNA, 4065 bp, Paenibacillus polymyxa SQR-21
atggataggtttcatttgaatcgcttcggtctcatcaatttctggtatcacggtgacacggtttttgagtttagcaatggacgcctttttgtccgcggtgccaacgctgctggaaaatcagtatccaccaccatggcagtgccgtttttgctcgatggagataagcgcccgtcgcgccttgacccattcggttctcaagatcggcggatgatcgatcttttgctcggcaataagcatgtatcgaagcgtgaggaaggcataggatatctctacatggagtaccgcaaaggaaatacctttgtgaccgttggtatcggcttgaatggaaaacggcgggaaggcgacaacactatgcgtacgtggtatttcattctccataacaagcgcattgggaaagatattcaattgtacaatgaaaacattgtaagcggggaagtaaaaaagtttcctattaccagaggggacttggcagatcgcattggtggggacggagaagtcactgacagccagcagcgttatgtggagctcgtgaatcaggaaatttatcgatttaataccgaacaggaattcaaagaactgatcggtgtgctgctccaactccgcagtccgaaactttcaaatgccgtgaaagcgagtgaggtgtccaacgttctctccgatgctcttccggaattgtcgcaatatgaattggccccgctttcctcgtcgctggagagcatggatagcctgcaagaaaagaagtctcgtcttggccgcgaactcggcgtccttacgattttggtggatgcgtacgacgcatacaaccaactctctctatatgagaaggcgaaacatctcgtatccagcgagaaacggttcaatgattctatgaagcgtatgaaggattataaaactgccgaagcagcggaattagtaaccaaaatagatttagaacggcaatggagagagcaatccaacatcaaagagaccctccagagaaaaatcgtctccatgcagggtcaccccctctttacactggaggaagagttaggcaaggtaaaggaagttttgcaggagtcagagaaaaaactagaaagtaaggtcgacgccttagaaaagaataaagcagagcaacgcaaggtggagaatcggatcaagcaaagtgaggaaaaggaatacaaagctgccaaaagccgcgaagatgcgctttcggagatggagtcgctagcggctgaggcctatttcataccccacaccgccttgcgtcagtactttgaagccaggctcgaaagtttctcagacacaggatttcataattggcatgaagcccttcaggagtatcacaacaaggtggaggacatcgcgagtcaacttcattccatgcaatctcgcctcgaacacgaggatcggatgcagcgaaatgtggctgctgaagaagaacaaacagaaggattagaggcagagattcgtgcctcggaaaaagaaattgctgaatgcgctgccttagtcgaatacgccgttaaagaatgggtagaaggagcccgacaattccaagttcagcctactgagtttctcgaagcaaaggaaattttgcaagggattggcgatcttctagatgactcttcccctacggcgattacggattggttaaacggtttgtacaacaagcgtcttaccgcacttcaagaagagcgagcaaagcttatggcctccatcagtcttctacaaaagcaaattgaagaagcggaatcaaagctggaggagctgtctgctcaaacagagatagagccagactttaccgcttctgaggtggtgaaaatagagcgtttgcgagtacagaatatccgcgccgcttatttttacgagacggttgaatttttggaacacatagagccttccgtgaaagaagccatcgaaggcgctattacccgcgcgggccttctaacggctcttgtggtgcatgaaagcgatcgttcgatggctgccgcttccatgaccgtggtacaaaaaggctcttataaagaagaaaatctgctgacttatgtgcgcccgacaccgattaaagggctctccgaggatgacattagcgctgtgctgcaaactatatccattgttccccacgaggaagggtatgtgcttgaaacaggagaattccgcagtggtatggtcggggggctggcacctcgatatgaggatgcgtacattggaaaatctgcgcgggaacaaattcgagcacgtaagttgaaagaactgcaaaagttacgtgaagaactcatgcacaaaaaagacgatctggaatctgaatgcttttcggtggaaaagcagcagcgtctgcttcatacggagcgggatatattcccgtctctcgaggggctaaaggattctcttgcccgccatgaaaacaagacccgcaagcgcgtcgctcagctttccttattggaacggctccaaaatgatctgcgtgtgtatcgtaacgagacccaagtcgcgcgcaatgcgctctattatgcagcacaggagttggagcttccgcttacgcacgctagttatcaaaaggcgcttggcgatcttgcacgttaccagaaaaagctcactgaccttcgcgtggcgcacatcgggtggctttctgagcttaacttactgtctagccttagggcagaaaaagaacgcttagttgacgattttgggtctctaatggatgagaaaacggatcttgagcggagtattgccaggaacagatcgctggaggcgatgtatcttgaacgaattgaggatttcggcgatacagacgtgaaacaggagatcgaggaagcaagaaaggcagcactggcggcggatgaactactggaaaattatcgcaaacaaatcactaatgcagaaattaatatgcgcacatatactgaaaaccatgcgaaagaacagccgcagatggaagagcggctgaggctgttgaatgcgtggacgaaaatattccaagaggagctatctctaggttttgtatgttctccgcaaagcgcttctcagatcgtagaggcgctggaggaatcgtgcaaggcactttcatctgatgtggcgctttcggcgctaaaagatgcagaaggccacgcacagcacgaacttgtggattacaatcttaagcagacacgacggacgatcccgcctgagattcaggcaaaagataaggaagacccttactggcagctccttgtacagcactgctcgcggcagttcttggttttttcgccccagcatgtggagagcacgcctcgggaagtacaccgtgatgtagatgatcaactaaagcgtatttcggggcatattcaggaagaggagcggaagttgtttgaaaaagtgctgattgacgtcataggtaccgcgatcctagagaaagtgcgggacgcgaagcgctgggaacaagacgcgaacgtgatgctgcagcgcgtaactagtatcattcaaatgcggctcgaatgggttcctctcacaagtaaagaagaagatcaaatttcgacgacggagctgctgtcgtacctgtctaaggagtccatctacttgacgccgtcgcaaaaggaaaaagtacgcctgcactttatgtccaaaatcaatgaagctcgcaaaaagtgcaaggacgacgcgagtttctccatgtttgaagaaatgaagaaggcgctggattaccgcagatggttccgctttgacatgttcatcacgcgcaagggcattccagaggaacgctttacaaacaaggtgttcggggagctcagcggcggggaaaaggcgatgagcatctactcgccgctgtttgcggcaattgcagccaagtattcgtacgccgcttccgatgcaccgcgtatcatttcattggatgaggcgtttgcgggcatcgatagcgaaaacattgcgcagatgttccaactcgtgcatgactttgagttcgattatattatgaactctcaggtactgtggggctgttacgaaacggtagatgaactctctattgcccaaattctccgcccagtggactcccctgtgctcgctgttgcacgttactattgggatggcaaagaaaaacatcatttatcatag

SEQ ID NO: 50765 - DNA, 1404 bp, Paenibacillus polymyxa SQR-21
atgcaggataacaggcaacttgttgagatttttcggcgaagcggcggctttggccgccttttcgacttgtatcgtaagaagtttgaaagctatggggcattcggcacggtgcaaatgcgacccaccgaagaagaggaaaaagctctacgtggttttcttggcgttcgctacaagggatctcgtttcccagcctccgactttgaaaaagcggccacagaggcaggatactcagtttcactgcttgaattgttggagttatattacagtcgtcaactttccaccaaacgcgaacagaaagagttaaagctatcagcttggacgaatcttttttttcaagtagaacgagaatttattaaccgatttaatatctcaaatactgatcttgaaagttttattcaaaagacatttaactggtttcaaagattgaaggaaggagaagccaaaggttatagggttctgagaacggtttttgacagaggcacacatgcctatttagaattgttagcatgtctgagtgctttatggcatttacttatgagaaaagacgagatgtttaaagaatgtggaatctctactggcaagattagattacctatgtttgctgcctatgttactgaggattcacatgcctttgataaaacaaatgcattaggaagattattatggagtgccctaaatgatataaatagccaaagtataaaactaagcggaaatgttgataactatatgacagtcatgccagagtatttttttgaacgtcaaatttatagggatttcgacgtactggacgatgatcttagttcgatttcacatgtttttgtcccccatctagttaaaggcacatctcctcgcacgttaaatttacgggaaatcgaagagatgaagcaatttccaaagtactcgtcattatatattatcgaaaatccgtctgtcatttcttatctagttgatgaaaccattcattttcttaatctaaacaaattttcattagaacaacttccattagattttccagttctactttgtactatcggacaggcaagaactgcttctaaagtatttatagaaaaatgtctagatgcaaacccaagctgcgttatttactattctggggaccttgatcttccaggcattcagatgttaaacaatatgaaagagcagttctcagcagaattttacgcttggcgtatggaggcttccatatatcgtaattatgttgcacccaaaagcaaacctttatctgatgcagacttaaaaatccttcaaggattagaaagcggcttagtaaaagagatgatacagattaaagcaaaagtttatcaggaatcatttggaaaagaactgagaagtaattggatcagagaagtttcttctgtgatttctaaaaatcaagttgataaatga

SEQ ID NO: 50766 - DNA, 1542 bp, Paenibacillus darwinianus
atggatgcgggattttcggggctgcagccgcaatcgctgcgccaggtgccggagctgaaatatgtgaacgccgaaaatgtggtgcgctaccgggccattatgcgtttcttttaccaggagtataagcggttaaggtattggttgaagcctgaagaggtgtttgcgggcgtgagcgaatggagcgtatggccgggctacacgctcgagcagtgtcagacggatctggatcagctggtggagtggcagaacctgacggccaggcatgacggggggcgttcgacgacactggcggagtacctgaagaaaaaaatgcaatatttgctgcgtccttattccattgaaattgagagattgcttgagacgctcgaaaaggtgacgggctacggaggttcgctggaagcctccttgttcgatacgattgcggacaagctgtttgccgttcgcagggatgccggtcaactggagccggagacggcgcttgagctttggaatatactctaccgatcgtttgtcagcctgcacgaaaacgctgcggattatatcgccagcctgcataccgccaaggccgaggagatgatggtggccgaagcgtttctggttttcaaggagaagctgacgaattatttgcagaatttcgtgcaggccctgcagcgaagcgcctacaaaatcgaaggcaatctgctgcggatcaacgataatgtccgcgatatgttcctggagaaggtcgtggaaggagaattgaacaagccgcggcttgaggatgtgcccgatcggcaagcgctgttgaaggagcttcggcaaggctgggacaacattcagcgctggtttatcggcgaaggcggttcgcccagcgagcttacgctgctggagcgcgcaaccaaggacgcgatcgcgcggatcgtccggagcgcgattcggattcaggaacgcaagcgttccggtctaagccgcaaaaaggagctggagcatctggcccgctggttcgcgggcctgcatgtgatggatgatgcccaccgtctggcgggattcgcttttggattgtttccgacgcgtcatctgcaaggggaggacctgcgcgattcggaccgggccgatatgtcgatgtgggaggagcggcctacggtgcggacacttcgttcgcgcagccggaagcgcggcgagcggcagcagtccgagccggtgcgcgacaacgagcagcggaagcagcgggaacgggaagcgttcctgctgcggcaggcggaggagtggaacgcgatcgaagcgcttttggcgaaaggaagggtgcggatctcggagctgggcgaggtgccgagccagacgcggctgcggctgctccactggatcggccggtgcatgacggccgggtcgaaccactccttcgtgacgccggaaggcgtccgagttcgcatgaccaatccgcgtacggaacaaagaaccgtcctcgtctcggaggacggcgagctgcatatggccgattatgagctggtatttatactgacggatgctgcgagggaagcggcggccgcgaggatagaggagtga

SEQ ID NO: 50767 - DNA, 1224 bp, Paenibacillus darwinianus
atggctgcatcggggaaatcggcagtaagcagggtcggccgcagccgggccggagcggagcaggcggcggagcgcaaaagagcttgcgttcatgcgttgctgaaccggccgtgggtcgcgaagagcgaggacccggagctttattttgccgtcaaggactactatgaggagctgcgcgattggtttatggacaaagcgggcttcccgcttctgatgacccggtcgatcgccaagctggacaaggcgccggttaaagctttgccgtggatgggctttccggagtttcgcgaaccgagagactatgtgtttttcacgtatgggctgtggtatctggagagcaagacggagctggaccaatttctgctctcggatattgtggaggagatccgggatcaaatggccggcgaggggctggatgcggattggacgatctatcatcatcggctgtcgatggcgcgggcgctcaagaagctgaaatcgctcggcgtgctgcatgcagtagatggcgatgaaggtgactgggcgcagaaccgagagaagaacgcgttgttcgaatgctcgtcgaatacgcgctacgtgctgcgccggtttccgaaggacctgacctcatacagccgaatggaagagttgtctgatccgattccgtacgcggatacgcaggacggacaggcgatgcgcagacggcatcgggtgtaccgcaggctgctgctggagccggccgtaccggatgcggaatgggacgaggaggaggacctgaattacgtacggtggcagcggcgggccattatggatcagctcgggaaaacgttcggttgggaagggcgacggtaccgggaagggctgctgttttttcacccggagctgacgagcgaagccgcattgttcccgacgctgtcgggggtttccgacctcgcgctgctggttgccggagaactgcgaaggcagctctatgaagagggcagcggaacgtacacagagcctcatggaagcatccgggttacacgggccgagatggagacgattctatacaagctgcatttacggcataaagaatattggagcaaggagtttcgcgagtcgtcctctcaggagttggcggacctgtgcatcgcgcatttggaggactggcgtctggggtcatgggaggactcggcgcattttctgatctctccggtgctgggccgctggaatgcggaatatgcgaacacggattttgacgggtga

SEQ ID NO: 50768 - DNA, 1453 bp, Paenibacillus darwinianus
atggcggatgatcaaaagagaggcgcggagcggacggatgcgcgttggcggatgaatcgcgtcggcattctgaacttctggtattacgacgaagaggaatttcagttggaggatggccggctcatactgcgcggcgccaatggctcgggcaaatcggttacgatgcagagcttcttgccgctcgtgctggacggagacaaacgggcgcaccggctcgatccgttcggatcgcgggatcggcgcatcgagtactatttgctgggggaagaggacggcggtaaaacggatgcaaccggctacttgtggatggaatttcaccgcccggataccggggcgttcaagacgatcggcatcggccttcgggcaaggcgcaacgctgctcaggtgcagttctggggattcctgctcgaggacgggcggcggatcgggtatgacttctggctctacgaccggaacgattggctggagaggggcgaccggattccgctcgaccgaaaggatttagagggcagaatcggcgcaggcgggcaggtcgttcacgatcaaggctcttatcgggaactcgtcaacaagcagttgttcggctttgccgaaacggaggctttccaggatctgcttcagctcatgattcagctgcgaagcccgaagctttcgaaggatttcaagccttccgcgatatatgatattcttcatcaggcgctgccgccgctggtggaggatgaattgcgccccttgtcggaagtgctggaggatatggaccagctcgccgaccggctggatgaaatccgggtgcaccgcaaggagatggccgggctgcaggagagctatgaccgttacaacaagcatgtgctttatttaaaagcgggcgagctgctggaagcaaagtcggaacacgacgtttatgcggctcgggcgcaggcgtctgcacttgcgctggaggaagcggaacgggacaaaacggctgcacaaggggaacgggggcgcattcaagagcggcttcaggcgatcagcgtcgagcggaatgtgctggagaagcatgaggcaatcggcaagcaacgggagtttgagagtgcgtcggcatcgctcgaggatatggagaagcagttggagcgttcgcgggagcgggaacaaaaaagccgcctgcgggaggataaactgaaccgggagcgggcacagtcggctgaccggcgattggccgcacgtcgtgagcaggaggcgactctggaagaactggagtccatggcgcaggagatggagttcgccgagcatccggtctatcatcgctattggatgccggacatcccggctgatgaatcgtggcgggaagcctggcggcgcgatgtgaaaggccatcgggagcgtgtggaaacggcggcgggcaaggcgcgccaggagcgggagtcggccgtattggcccgggagcgggagacggagctcggcgaagcgagccggc

SEQ ID NO: 50769 - DNA, 1452 bp, Rhodococcus opacus PD630; identical to SEQ ID NO: 50214

SEQ ID NO: 50770 - DNA, 1395 bp, Rhodococcus opacus PD630; identical to SEQ ID NO: 50215

SEQ ID NO: 50771 - DNA, 4158 bp, Rhodococcus opacus PD630; identical to SEQ ID NO: 50216

SEQ ID NO: 50772 - DNA, 2031 bp, Frankia sp. Thr
gtgctggtccaggcctgccagactcggccgtcgcttcagccaccgacgaccccgcagactcccgtcttccccagcagtgtcactggtagccggtcacccgccgttcacgcggtagcatggtgggcgatactgggcggtgtgacgagcgacggacagaccgggccggcagccggcggtgatgcgccgccccggcagccgttcgcgcacctgagcgcccccaacgcggacgtctaccgggaggtgctgacgacgttcgcgcgggcgcgggaccggttcatcgtccacatgcgccccgaggacgtgatcgcggatctggggcggccggggcagaccgagtcgatcgtcgccgcgctggacaagctcgttgagtggggcaacctgcgggccgacccggacaccggccgggtgaccacggtggcggacttccaccgggcgcgctacctgtaccagctgaccccggccgggcaggcggccgaggaggcgatcgccgtctacgaggtggcgatcggccgccggggcgccctgcagtcggtggcgctggaggacatcgccgcccagctgcgcgccctggtggagatgacggccggcgacgccgccgatctcgacccggcgaaggtacacctgctgctgctggggctggcggagcggttcaccggactggccgacaacgctcaggcgttcatgacgtccctccgccgagtgatcgacttctcggacggtgacgtggacgcgttcctcgcctacaagcaacggctcatcgactacatcaaccggttcatcgccgagctggcgaaccggggcgcggagatcgccaccctgctgggtcaggtcgagggggccggcgtcgaacgcctgctgctactcgcggcccgtcgggaggcgaccgacgccgtgcccgacgtgcccgaggtatccggctccggggcatccggctccggggcatccggctccggggcatccggctccggggcatccggctccggggcatccggctccggggcatccgattccggccggaccggagccgggcgaaccgacgctgagcggattcggaccgcctacgacgccgcggtcgccgcggccctggacggctggcgcaaccgctggcgcggcctgcacgactggttcgtgtcggcggattcgcgccgtccctcccaggcacggttgttgcggggcgcggctatcaccgcgatcacccagctcatcgataccgtcgccgcactcaacgagcgccgtaccggccgttcggaccggtcggcggacttccgcacgctcgctcgctggtttgccgaggctcctgacgacgcggcggcccaccggctgtggcgggccgcattcggcctggcctcggcccggcatctcaccgtcagccaggagaccgtcgccgcctggcaggaggacgagccgacaccgaacacgccgtggcaggatgcgccgccgatgcggatcagcccgcagctacgccggaccggttcctacgagcggcgcggaacgccgaaccgggtcacggaccgcgcgcggcagcggcggctgctcgccgagcaggccgcgcgggaggcggagcaggccgcgtccgctcgggcccggctcgccaccgacgggccagtgctgctgtcccagctcggcgtcctggaccggcaggcgttccggctgttcctcggcctgctcggggacgcgctcgccgccaggctggcgggcgataccgaggtggagaccacgtccagcgacggcacggtcctgatccgcctcaccctcgtccccggcgggggggtggcgcggatcgagaccgaggatggcgtcctggacggcccggaacacaccgtcgagatcgtcgacctggccggtgcggcatcgcgtccggcggcctggaacgacctgaacgacctgaacgactggagcgactcgaacgacaggaatgaccgaaaccggcaaaacgatctgaatggccggatggacggcctcgctccggtcgtactcgccggtgggccggaccggctcgagctgctggagaccggacgggtgtccggatga

SEQ ID NO: 50773 - DNA, 1269 bp, Frankia sp. Thr; identical to SEQ ID NO: 49804

SEQ ID NO: 50774 - DNA, 4332 bp, Frankia sp. Thr; identical to SEQ ID NO: 49805

SEQ ID NO: 50775 - DNA, 1305 bp, Frankia sp. Thr; identical to SEQ ID NO: 49806

SEQ ID NO: 50776 - DNA, 1572 bp, Streptomyces sp. PCS3-D2
atggacacgacttctccgccggcggagtgcctacccgacgggtacgggcccttcgcgcatctcaccgctccgaacgtgctgctctaccgggcggtgatgggggccttcctccacgccaaggagcggttcgccgtacacctgcggcccgaggacgtgtacgcggggctggccggcgagaaccggccgaccgagctggacacggtggtcaaggccctcgacagcctggtgggctgggggaacctgcgggccgacccggacaccgggcgggtcaccgccgtcgaggacttctaccgcaaacggttcatctaccagctcacgcgggcgggcgaggcggcggagcaggccctgtccgcgtacgacgaggcgctcggtcggcggggcgcgctgcaggccgtcgcgctgcacgacatcgtgacccaactgcgggcgctggtcgtgctggcggccgaggaagagcccgatccggccaagacgcatctggcgctggacgccctcgcgagccgtttcggcgcgctcgccgacaacgcgcgggccttcatgggctccctccagcggaccatcgacctgcacgacgtgggggaggaggtcttcctcgcctacaaggaccagctcatccggtacctggaacggttcatccaggacctgatcaccctcggcgggcgcatcgcccggctgatcctggagctggaggagcgggggagcatcgaaccgctgctgcgggccgcggccgcccgtgaggccgcggacgccaccccgcaggacgccgcccacgcggcgcaggccgcgtacgagcggtgggccggccgatgggcaggactggcggcctggttcctcagccgggacggccgggagtcgcaggcccggctgctgcgcggccgggcgctgggcgcgatcccgcaactgctggccgtcgtacggtcgctgaacgagcggcgggcggggcgatcggaccgctccgccgacttccgcaccctcgcacgctggttcgccgaggcacccgacgacgacgcccggcaccggctgtggcgcaccgccttcggactgtacccggcccggcacctcaccgtggacgcggagacgctggccgcccgccgcgcccgtccggagcccgcggccaccccctgggccgatgccgcacccctgcgcatcagcccgcagctgcgccgtacgggaagctacgagcggcgcggcaaaccgcgcagggtcgaggaccggcaggaagcacgccgactgctcgccgagacggccgccaagcaggccgccgagacggcagccgcccgggcccgtctggtcacccgcggcatcaccaggctgtccggactcggcgagctcgaccccctcagcttccggctcttcctccaactcctcggcgacgcgctcgccacctggcggcccggcatgacgtacaccgcggccaccagcggcgacggctccatggagatccgactcaccgcaccggccgacggggccgtggccgaggtccgcacaccggacgggaccttcacgggcccggaccacaccatcgaaatcgtcgacctcaccgagacaccaggaaggggcggagcgcgatga

SEQ ID NO: 50777 - DNA, 1272 bp, Streptomyces sp. PCS3-D2
atgacgaccccgctcgcggaagtactcgacgggcagcacgccgcggagcgccgcaaggccgcccgcgccctgctgaagcagccgctgctgctcgcgcacggcgcgtacgccgacgagttccgcctggtccgccggcacgccggcgagctgcgcgagtggttcgaccgcaacaccggctggtccctccaggtcgatgccgagacggcccggctgggcaggatccccggcgtgccggacgacgccacgcacccggcccgcgaggtcagtcgcagcgccgtccccttcagccgccgccggtacgtcctgctctgcctcgccctggcctccctcgaacgcggtgaggcgcagatcgcactgggccgcctcgcggaccagatcgtgctggacgcgaaggatccccgactggccgcagcgggcatcgagttcaccctggaccgccgtgacgaacggctcgacctggccgcggtcgtccggctgctgctccacctcggggtcctgcggcgcgtcgccggggaggaggacgcgtacgtcagcggagccggcgacgtcctgtacgacgtcgagcggcgcgtcctggccggtctgctcgccacccgtcggggaccttccaccgtccgggccgaaacgccggaggcccggctcgccgaactcgccgccgaaacagccctcgacagcgacgaactgcgcttccgtgccatgcgccgctcgctgacccggcggctgctcgacgaccccgtcgtctactacgacgagctgacggacgccgagctcggatacctcacgcgccagcgcggcttcctcaccgcccgcatcaacgaactgaccggtctggtcgccgaagtgcgggccgaaggcatcgccatggtcgaccccgaggacgacctcaccgacctccggatgccggaatcagggacccgcggccacgtcaccctgctgctcgcggaatatctgacggcggtcggaggcctggtcgtccccatggtcgacctcgaacgccgcgtggtcgaactggcggcggagcacggcggattctggtccaagtcggcccgtgaaccgggggccgagggcgacctggccgagcaggccgtcgcccggctggccgctctcggcctggtcgcccgtaccgctgacggggtcctgccgcgcccggcgctcgcccgctacgcggtcggcgagaccgtcgtgctcgaaccccgcaccggtaccgggccccgtacccgcacctccggtaccacgcaggtgccggcgcagcgaaaggcgtacctgccgtga

SEQ ID NO: 50778 - DNA, 4167 bp, Streptomyces sp. PCS3-D2
gtgacgacccgcccagagccccccgccccggcgcgtccccgctggcagcccctgcggacgggcctcgtcgacctcttccactacgacgtggaggagttccacttccgcgacggccgactcctgctgcgcggcaacaacggcaccggcaagtccaaggtgctggccctgaccctgcccttcctcctggacggggacctcagcgcccgccgggtggaacccgacggggacgcgggcaagcggatggaatggaacctcctgctcggcggtgagcacccgcactccgaacgcctcggctacacctgggtggagttcggccgccgcgacgcggcgagcggcgaggagcacttccgcacgctcctgtgcggactcaaggccgtcagcgggcgcgggatcgcacgccactggtgggccgtgacggggcagcggatcgaccacgggccggccgacgcgcgcgcggacgggtcgctgagcctgctcgatgccaccggcaccgtgctgtcccgggaccggctcatcgaagccgtcgccggccggggccgggtctacgaccaggccaaggcctaccgccgcgccgtcgacgaagcgctgttcggcctcggggagcagcgctacgcggccctcgtagacctcctcatccagctgcgccagccccagctgtccaagcgccccaacgaggccgccctctcccgcgccctcaccgaagccctgcccccgatggaccaggccgtcatcgcggacgtggccgaggccttccgctcgctggacgaggagaaggaggaactgcgttcggccggcgcggccgaacgcgcggccgcggtgttcctcgaccactaccggcgctacgcccgcacggccgcccgccgccgcgcacgccttccgcgcagcgaacactccaagtacgagcaactcctgcgcgccctcgccgaggcccaggccgagaaggccggtgcggaacgggaccgggccgccgcggaggaacgcgtggccgcgctcaccgagacccgggccaggctggaggcggccgacgcagccctgcgcgaaggccccgagatgcgcagcgcccgcgaagtggaccgtgcggcgaaggcggcggagcgggccgagaacgaccgtacccgcgctctcgacgaccaggaggaggcatcgcatcggcacaccagggcgctcggccgcctcggtgccgccgagaacaggctcagggccgcccgggagctctccgaggacatgctgctccgggcccgggagacggctgcggcggcccggctggaccttcccacggacaccgggcaggccgttgccggcctgcgggctgcggtggccgaagcgaccgaccgcaggcaccgcacgctcacgcacctggaggcgctcgccgaccgggccgaggcggcggcggccgggcgccgcagcgccgtgctccggctcgacgagacggagaccgggctgacccaggccgccgaggcgctgggcgccgcccaggacgcggcgcgggccgccggacgggccctggtcgacgccgtacgcgagcacgcgcaccggtgcggagagctggtgtacgccgatccggccggcctcctggacgagctccaggagtggacccggcaccaggacggcccctaccccgcgcgacgccgtgccgccgaagcacaccgcaccaccgcggcggcactcgccgaccaggcggcgcgggcggcgcaccaccgggccgctctggtctcccggacccgcgacgccgaacacgaactcaccgccctggagtccggcggccggcgcgggccgcaggccccgcacaccaggacccccggcctgcgggaccagcagcccggtgctccgctgtggcggctcgtcgacttcagggaagaggtcgcggagcaggaccgcgccgggctggaggcggccctggaggcatccgggctgctggacgcgtgggtgtgccccgacggggcggccctcgccgcggaaggccatgacgtgatcctcgccccggactccggaccggtcgccggggcatcgctcgccgacgtactgcgcccggccgtggaccgcggcgacgcgcaggccgcggcggtcggtacggaggcggtggcccgcctgctggaggcgatcgggctcggcggggcccgcgaggacacggtaccggccggcgaaggggaggcacccggcgccggcccgacgggcaccgcggtcccccacggcacctgggtcgcgccggacggacgccaccgcgtcggcgtcctcaccggccggtgggccaaacccgctgccgagtacatcggggagggcgcgcgggaagccgcgaggcggaccaggatcgccgccctgcacgccgaactctccctccttcagcggcagtccgccgccgccgacgcgcaggcccaggtgcttgcggcccgccggcacaccctcgacaccgagctggcgtccgtgcccgacgacgcacctctgatgcgggcgcacgccgacgccgcggccgccgccggcaccctgcgccgggcccgggcccggcgtgacgggcgggccgccgaggtgacggccgctgccgagcgggccgagtcggccgccgccgaactgcgggagaccgcagccgatgtggggatgccccgggagcgggcggagctggccgccgtacggcaggccctcgccgagctcgacgtcgtcctggccggactctggcccgccctgcgcgagcggcacgaggcgtcccggcaggcggacgacgaacgcgaagaggcgctccgggccggggagcgggccgccgaactcgccgtacgggcggaagacgccgcccgcgaggcagccgccgcggacgaacggctggccaccctgcggtcgaccgtgggcgccgccgtcgcagagctggagcgcctgctcgccgagaccgcggacaccctgcgcggctgcacggccgacgaacagcgcgcccggaccgagcacacggaggcggaccggcgggccagccgggccgaggggagcatcgaacagctggagaaggccgtcaccgaggccgccgcgacccgttcggaggccgtcgcagcgctccagcgcttcaccggcaccggcctgatcgccgtcgcgctgcccgacctcgccgtaccggccgcggacgagggcccgtgggcagccaccccggccatcgccttggcccgtgccctcgaatcggagctggcgacgacggatgactcggacggtgcgtgggaacgggtgcagcggcgtctgggcgaggagttcaagaccctccaggacgcgctgtcccggcacggcaacaccgcttcggcccgcatggtcgaggacgccgtgatcgtggagatcgtctaccagggccgagagcgagccgtacccgaactcgccgaggcgctggcggccgaggtcgcggaactcacccgcatcctctccgcacacgagcgcgagatcctcgaaacccacctcatcaccgaggtggccggcaccctccaggagctgatcgcagccgccgaacggcaggtgctggccatgaacgcggagttggaggaaaggcccacctccaccggaatgaagctgcgcctggtgtggcggccttcccgcaaggcaccggtgggactcgcccaggcccgcggccgcctgctccagaccaacgacgcatggacggccgaggaccggtccgcggtcggcgagttcctacagacgcagatcgcccgccagcagaccgaggacgcggcgggcagctggctggaacacctcaccgccgccctggactaccgttcctggcacgagttcgcggtcgaacgccaacagcacggccgctgggtgcccgccacgggaccggcgtccggaggcgaacgcgtgctggccgtgtccgttcccctgttcgccgcggcctcctcgcactacgcgagcgcgggcagcccgtacgcgccgcgcctggtgaccctggacgaggcgttcgcgggggtggacgacgattcgcgggccaagtgcctcgggctcctgcacgccttcgacctggatgtggtcatgaccagcgaacgggagtgggcctgctacccgcaggtgccgggcatcgccatcgcccagctcgcgcgcgtcgacgaggtggccgccgtcctggtcacccgctgggagtgggacggtacggcgcgcacacgccgcgaggaccccgtgcgtcccgcgcacccggaagccttgtgggtgtga

SEQ ID NO: 50779 - DNA, 1242 bp, Streptomyces sp. PCS3-D2
gtggacgaagcgcgcctgcgccgcctgctcggcggcgccgacctggcctggctggtggagcgggcgcgccggcggctggagcgcgggcagccactgaccgggccggtctcgctggctgcgccgagcccggcggagcgggcagcggccgagaggctgctgggccggacgcccggtgtcggcaaggcgctcacggtccggctcgacgccgtggacgccgtgctggtcagagcggggatcagcgcggagggcctgggggcggccgtgaccgtactcaccggacgggtcgtccccctcgacacggcccgccggaacgagcaacaggcctgggaggaggcgtacgcacctctcaccgacctggctgaggaccttccagcccacgcggcgtgggccgggcgggtgcgggccggcggcctcgtgcgccgtctcgccggcacccccaccgccgcccgtgccctcctggaggagacggtccgcgtgctccgggagctgcccgtcgcgccggcacggtcgctcgcggtgttcgccgccgacgtcctgggcagcgcccacgcactcgacgacggcacgccggtggccacgctcgccctctccggcgcccgcgcactgaccgggcaccccgagggcgcgggagcggcctggcggcgggtcgcgtgggcctcggtcggcctgctccgggacgacgtctcctcgacggtgctcaccctcaacctccgcggaactccggccctggactgggcggccgacgcgggtgagccgtccgtactcaccctccggcagctcgcccgccgtccaccccggacggccccgcccgtggtccacatctgcgagaaccccgcggtgctctcggccgcggcggacacgcacggaccggatggcctgccgctcgtctgcgtccagggccagccgtcggccgccgcgctgaccctgctcacccgcctgcacgagctcggcgccgctctccgccaccacggcgacttcgattggggcggcctgcgcatcgccacgacgctgtcggggcacgtgccctggagcccctggcgctacaccgccgccgactaccgtgcggcggtggcggccgggggacccggtctgcgccccctggacgggaaaccggcgccgtcgccgtgggacccggacctggcactcgctctcagcgagcaggccctgcgcgtcgaggaggaggccgtgctggacgtgctgctgggggacctcgcgcggtcgggcggggaagcgctccggtag

SEQ ID NO: 50780 - DNA, 1545 bp, Castellaniella defragrans 65Phen
atgactccaccagccgccgcccaagccgatctgttccgccacgtcagtgcggaaaaagccgcgctgtaccgctgcatcatggagtgctttgccgccgccaagcggcagttccggctgcatcttcgccccgatgaagtgctggaagacggcgactggtcggcgctggccggcccggccgcgccgcggctggaagagatccaggcggcgctggcgcaattggccgaatggggcaacctcgaatcccagccggacaccgcccgcgtggccagcatcagcgatttctaccgcgcgcgcttcgtctaccggctctcgctgggcggcgaggcggtggaagcggcgttgacggccttcagccgcacgctgcgccggcgcgccgaactgcagaccatcgcgctcgaggacatcgcccaccgcctgaaggcgctgctggccttggccgacagcgccgagcccgacaccgtcaaggtgcacgagaccctgcgcgacctggtgcgcgtattcgagagcctggccgacaacgcgcaggccttcatggccggcgtcggccgcggcgtcgaactgcagcaggccgaagccgcggccgtgctggcctacaagcggcggctgatcgactacctggaacgcttcatcggcgacctggtggcccgctccggcggcatcgcccagcacatcctcgcgctgcagccgcgcatcgatgcgctgctgtggcttgccgcccagcgccaggcccgcgacagcgcgccaggcgacgaggccgggcagatcgacgcggtggcccgcggctggcaggcctggcgcgagcgctggaaggggctgcgccgctggttcctggccaccgggcacgcgccggcgcagtccgaactgctgcgcgccaaggcgcgcgcggcgatcccgcaactgctgtcggccgtggcgaccctcaacgagcgccgcagcggacgcagcgaccgctcggcggacttccgcatgctcgccggctggttcgccgcctgcgaggacgacgtccaggcccatcgcctggcgcgcgcggccttcgcgctcaacccggcccgccacttctcgctgaaccccacgctggcgcccggcgcgcgggatctgcccgccagcacgccctgggccgaagcgccgccgctgcgcatccacccgcgcctgcgcgaatacggccaggcatcgccgcgcggcgcgctgccgcgcgtgcaggcgcgcgacgccgagcgccaattgctggccgcccggctgcatgaggagcacgcgcagatcgaagccgcccgccagcgcctggccagcggccgcggcacgcgcctgtccgaactcggcacgctcgacccgcatgccttcgccctgttcctcgccttgctgggcgaagcattgaccgcgcaatcctcgcccgacgccgaggtggacgtccccagcggcgacggcctgctgcgcatccgcctgcggccgctggccgcggacagccgggccacgatccacaccgccgccgggtcgttcagcggccgcgatcatctggtcaccatcacccgcacggaagcagcaccatga

SEQ ID NO: 50781 - DNA, 1251 bp, Castellaniella defragrans 65Phen
atgatccgcagcgacagccgcgccatcggacgccagcaggcccgccaccgcgacgacgaacgcagccaggcgctgcgcgccctgctgatgacgccgctgatgaccccggcccatgacggatttgctgccgtacgccgccatgccgacgaactgcgcgcctggttcgcgcgcgagaccggctggacgctgcacatcgaacgcgactgcgcgcgtctgtacaagcggccggccgacctggacgacgccagccgcgggctgcccggctacgagcgcaggcgctatgtactgctgtgcctggcctgcgcggtgctcgaacgcgccgacccgcagatcaccctgcgcgtcctgggcgagcggctgctggcgctggccgccgatcccacgctggaatcgcgcggcttccgcttcaccctcggcgccgcgcacgagcgccgcgaactggtcgccgtctgccgcagcctgctggagctcggcgtgctgcagcgcgtcgcgggcgacgaagaaggctacgtgcgcggcggcggcgaagcggccgagggcgcggacgcgctgtacgacgtgcgccgccgggtcctggccggggtgctcgccgcggtgcgcggcccgtccacctggcccgccgagcaggccccggcggatctggcggcgcgcctggcatcgctggtcgccgagcatcagcccgacagcgaagaaggacggcgcacggccctgcgccatcatctcgcgcgccgtctgctggacgatcccgtggtctacctggataccctcgacgccgaattgcgtgcctatttcatcaaccagcgcggcgcaatggccaaccgcctgtgcgaagccgccggactggtcgccgagcagcgcgccgaaggcctggctctggcggacgaagacggcgaactgaccgacatcgccatgccggccgaaggcaccgaggcccacgtcaccctgctgctcgccgagttcctctcccggccgcgggaagccgccgatccgattagccacgacgacgtcatcgccttcctcgccgaggcccgcgaagcacacggcagctactggcgcaaatcggcgcgcgagcccggcgccgagcgcgagctcgccagcctggcgctggagcgcctgcggaaactgcagctcgcgacctgcgacgacacccacgtccggcccctgcccgcactggcgcgcttcgcgctgggcgaggccgacatccgccagccggccgcgcccgcggccgcccatccgaccctgttcgaatga

SEQ ID NO: 50782 - DNA, 4128 bp, Castellaniella defragrans 65Phen
atgaccgacaccgcctccccgtccctgcccgtccccgcccgcgcgcgctggcagcccctgcgcctggggctggtcgagctcttccactacgacagcgaggaattctggttccacgacggccacctgctgctgcgcggcaacaacggtaccggcaagtccaaggtgctctcgttgaccctgccgttcctgttcgacgcccagctcaagccttcgcgcatcgagcccgacggcgatgccagcaagaagatggcatggaacctgctgctgggccgccacgaccgccgcatgggctatgcctggctggagctgggacgcgtcgacgccgacggccggccgcactacctcacgctgggctgcggcatgctggcggcggccgcgcgcgcccaggtcgacagctggttcttcgtgctcgaccggcagcgcatcggccaggacctctggctgatgagccctgcgcgcgtggtgctcacgcgcgaacgcctgcgcgacgcgctgcaggatcacgggcaggtgttcgacaccgccaccgcctaccggcgcgcggtcgacgagcgcctctttcacctggggccgcagcgctacgccgcgctgatggacacgctgatccagctgcgccagccccagctttccaagaagccggacgaggccagtctttccaacgcgctgaccgaggcgctgccgccgatctccggcgagctgctgaccgacgtcgccgacgccctgaaccagctcgaggaataccgccgcgaactggaggagtacgaagccctggagcatgccgtcgtccagttcaaccagcgttaccagcgctacgccgccacccaggcccggcgccgcgcccgcagcctgcgcagcgcgcagacgggcttcgacaacgccagccgggaactcaacgaggaccgcctcgccctggacaccgcgcgcacggacgaagccggtgccctgctggcgcagcagcgggcggagaccgcgctggccggcctgcgcacccggctcgacgaactgcagaacgacccggcgatggccgacgccaaggccctggacaaggccgccgccgatgccggccagcgccagcacgaggccgatgccgccctcggcgaacgccagcgccggcaggcccgtttcgagcaggaacagcaggccacccgccaacgcgccctgcgtgccgaggacggcggccgcgcactggccgatgcccgcgcccaggcccgcgaggcggccggggcggccggcctggcgtccatctacgaaaccagccccctggcctgcgccgacgcgcaggccttgactgccccggtgctggaatcggcacagcgggaattgcgccacaccgcagcaacccggcgcgagcaggtcgcacacctgcagcgccgctgcgacgaagccgagcaggctgcgcaggcccgggaccgcgcgcaggacgcgcgcgacgaacgcgccgacgaggccgaggccgccgccacgcgccgcgaagaggccgacgccgccgtcgaacggcagggccgggacgcactggaagcctggcaacaccatctggatgaagcacggcagctgcgggtgcccgacagcggcggcgtcctcgaagcgctggccgcctggaccgcgagcctgcagggcgacaaccccgcgcgcaccgccctgcacgcggcccagcaggccgccagcctgcggctggcccagcgccaggccgcgctgcaagccgagcggcacgccctggaacaggaacaggccgcgctgcatgcggagcatgcgcgcctgcaatccggcgacgacacccagcccccgccgccggcatggcgcgcgcccgatgcgcgcgcgggccgggccggcgcccccttgtggcaactggtcgaattcgcgccggccgtgccggccggactgcaggccgggctcgaagccgcgctgcaggcctcgggcctgctcgatgcctgggtgacccccgacgggcgcttgcaggatctcgatggcgcgccgccgccccatgacacccaatggctcggccggccgtcgcgcccggattccctggctgcctggctgcagccggcggcgccggccgatgccacgccggcggtcgcccccgccgtgctgcggcgcctgctcgaaggcgttgcctgcggcgagcgggacgacccggccgccgaggcctggatcggccccggcggccgcttccggctgggcgcattggccggtgcctggcacaagccccgcgccgagttcatcggctacgcggcgcgcgccgccgcccgcgcgcggcgtctggccgaaatcgcccagcggctggagatgctcgacgaggcgcttgcgcagctgcgggccggcttcgcgcaactcgatgccgatcagcgccaggcggccggcgaatggcgatccgcgcccaccgacgatgccctgcgcgccgcgcatctgcaagccagcacgtgcgtgcgcgagttcggcgaggccaggctgcgcctcgaccaggccgagcaggcgttgcgccaggccagccagcagtgggaagcggccagccagaccctggaacaggacgccgcggatctcgcgctgccgccggcgcgcgaagccctgcgcaccatcgatcaggcgctgctcgccttcggcgaccggctgcatgccctggccggcgccgcgcgcacctgccacgacgcgctggccgaacaccggcagcaggtcgaacgcgaacggcaggcccaggccgatgccgaacaggcggccgagcaatcggtcgaacgcgatctcctggccgaaaacgcccgcatccgcctgcagacgctgcgcgaatccgtcggcgccaaagtcgaggaactgcagcagcgcatccgggacgcccggctggccgtcgtccgcgcagaggcggaacgcaagtcgagcgacgaagcgctccggcatgcgggcgaggcgcgcgccagggccgaacagaaggtcgaagccgccgaggccgtcctggccgagcgcatcgacacacgccagcacgccatcgcgcactggcagggcttcgccgccaccgggctgctcgaaatcgcgctgcccgatgccgaactgccgccgcacaccgcgccctggaccatcgaacccgccctggcactggcacgccgcgccgaacaggcgctgctgcagatcaaggacgatgacgacgcctggaaccgcgtgcagaaccagatttcgcaggactacaccgaactcggccgcgcgctggccgcgctcagccaccgcgcccaggccgaaaccagcgatttcggcctgatcgtcagcatcgtctaccagaaccggcccgagcgccccgaccagctgggcgcgcgcctggccggcgagatcgcgcagcgccgggagctgctgaccgccggcgaacgccaggtgctggagaaccacctgcaggccgagatcgccagcgccatccacaagctgctgcacgatgccgagcggcaggtgctggcgatcaacgaagaactggccaagcgcccgacctccaccggcgtgcgtttccgcctgcaatgggagaccctgccggaaggcggcgaggacggcgccccggtcggcctcaaagccgcccggcagcgcctgctcaacaccagtaccgacctgtggagcgccgaagaccgccgcgtggtcggcgaaatgctgcagcagcgcatcgccgccgagcgcagccgcgccgatgccgaccagggcggcagcctgcacgagcagctggcgcgcgcgctcgactatcgccgctggcaccgcttccgcgtccagcgctgggacggccaatggcgcccgctgtccggtccggcctccagcggcgagcgcgccctgggcctgaccgtgccgctgttcgccgccgtctccagctactactcccaggccgattccacgcatgcgccgcggctggtgctgctcgacgaggtcttcgccggcatcgacgacgccgcccgccatcattgctgggcgctgatccgcgaattcgacctcgacttcgtggtcaccagcgaacgggaatgggcctgctccgccgaactgccgggggtggcgatcgcccaattgcagcgccacgaaggcatcgacgcggtccacgtctcgcgctggacctgggacggccaggccaggcgccaggcatccgaccccgaccgccgcttcccgccggccgcctga

SEQ ID NO: 50783 - DNA, 1320 bp, Castellaniella defragrans 65Phen
atgtccgacgacgccatgctcccgcccgatccacacgatgaaccgcccgattcgcgcctgcaacgcctgctggggagcgacgccctcgccccgttgcgccagcggttgcgccagtacttcgagcgcatcggccccgatgccgccgcatcgacgctgcggctggccgggctcgaccccgccgcgcacacggccctctgccagctgaccggcaggcccgtgcggctagcacgctcgatgaccctggacatcccccggctggacgcggcgctgcgcgcggccggcctggcggattccctgcgcagcgcgctggaacgcctggacggccccatcgtctacaagacgcggcagcgcctggaactgcaggcacgctgggcggccgcgatcacctcggcccgtgtgtgcccgctgttgcgggcgtggctggacaccccctcggcccggccgttgctcaagcgcctgagccgcgtcccggaacgcgccgcgcccctgctggatgccgccgaccgcgtgctgcgcgcccttccggcgcaaggacagccccgctcgcaactggcggccagcctgctcggcgatgcccacgccctcgatgccgggcggccggcggccaccctcgtcctggccgcctggcgccatcatgaacagcgccacccgacgaaccgcacagccgccgacgacgccgaaacccgccggaaagaagaaggcgcggaagaacgccgccgcgatgtctgggcgcgcgccggcgtcctggtcaacgaactggcccggcccgcgctcttcctcaacctgccggtcgccgatcccgctcccgcgccgggacggccgggcgagccgtcctacctgtcgctgcggcagctgcttcggactcctccggcctgggcggtcgccgactgggccgtccacatctgcgagaaccccaacttcctcgccatcgcggccgaccggctgggcgcccgatgcgcccccctggtctgcacggacggcatgccgtccgccgcgcagcgcatcctgctcgaccaattgcacaccgccggcgcacggctgctctatcacggagacttcgattggcccggcatcggcatcgcgaatttcgtgatccgcacctggaacgcagctccttggcgcatgggcacccgggactacgaggccgccgcaggcaccgccacgcacctgcggcatgagctcggcaccgcgcccatcgacgccgactgggatcccatgctcgcatccgcgatgcgcaagcacgggaccgccatcgcagaggaagccgtggcaaccgcgctgctggaagacctatgcatccccggcacggaagaaaactga

SEQ ID NO: 50784 - DNA, 1494 bp, Oceanobacillus picturae
atgcagcaaccatttaaaaaagttatagaagctagctatttaacggcagataaggcttggcgataccgggctattctacgttatttttatatacagcatgaacggatgcgggagtttttatttcctgaagaaatcttggcatacttaacagattttcaagaattcaaagactatacggaagagcaactacatcaagacttggaccagctggttaaatggaataatctacttgccaggcaggagatgggacgagctcacaccattgaagaatttaaaaagaagcgttttcgttatcaatgtacgccatataccgtggaatttgaacgtatgttaatggaaatggaaaagggcggcaatgcatttggtggctcattggagaagaaggaatttgaaaggttgtttcaagctttagcggatataaaatctatgattaataaaaaggaattcacggatgctagtgaatgttcacagctatggaacgatgtctttacctattttcggtccattacccaaaatacatcggactatattgcccatataaatagtgaagaagcagaggagcgaatgcaaaccgaggcttttctcgtttttaaagaccaatttactacctatttgcgtgattttattattggcttgcaacaaacagcgtggaagatccagcaactattacagtcaatgggaacatctcatctgcagcctttcctccatcaagtaattcttcatcaacagcaagtgccacgttttgaggacatcgcagcagatgagcaggaattaatgacagaacaagaggagaagtggcatagtttaacctcctggttcctcggaaacgctcacagggagagtgaattggacagcctgcaaactcgtacaaatgaacagatacgacggattacaagagtcgttcaacgtttgggtgaacgtcatcaatactttcgcagtcgaaaaaaggattttatccacctggcaaagtggtttgattcgctagaggacatcaatcaagcacatgagctatctgcagtgtcctttggtgtattccatacccgccatatgttcagcgaccatgttcccacagatgacatttatacagatacatgggaagaacaaccgatccgtcatgagacaaagccacggattcgtcaatatcgcgaaaaaacgcgtgcaggggcgatcgttagccaacagcaaaaaaaagaggcggcgaaagaggattatttgcgagataaaatggcggaagaggaaacgctgaatgcctatatgcaagggaatgaaatcaagttgggtgcattgccaattattgaaaagcatgtgcggaaaatgttactaagttggattggtaaggcaatggccaaaaaggatcatacatttaaaaccgagcatggacgcacggtacatgtcatggtatcgaaacaagaacgtatccaacttcaagctgaagacggtgtgatggaaatgccagcagtgacgtttcgatttatggacgaggtgaagaactaa

SEQ ID NO: 50785 - DNA, 1176 bp, Oceanobacillus picturae
atggagataactacttttgatgaaaaggcccgaactggattacgcctattatttgaaaagttttggatcttaaggtcaaaagagcctgaagtatatcagcaaattagggaacgtgaaaagatcataaaacggtatgttgatgagaagtttggctttgaccttattgtacatcagcattttataaaattagaaaaaataccagttgagacgaaaagctggatggggatgcaaggatttctggagccacgcgattacgctatgttttgttgtgcattagctttcacggagaatcgtaccgtggatgagcaatttcttttatcggatgtttgtgaggatataaaggatttgtatcctggtgaattcccgttggattggaccaattataaccatcgtaaatcacttgttcgtgtcattaaacaattagaaaaactctcgatccttgcggttgttgaaggagaaattgaacagtttgctcttaatgaagagcaagaagttctttatgaagtgaccgtctatgcgcgttattttatgcggtcgtatcctaaggatttagttcaatataaaagcattgaggaaatacttgagggcgaatgggaaaggcatgaaacagatgttcgacgaaaacgcgtctatcgtaagctgcttttctcaccggctgttcatcgagaaagtgagcaagatccagatttcgcctacattcgaaatttccgaaatcgattgcgggatgatatggaggaacatacccttttccgctttgaacttttcaaaaatgcagcattgcttgttacagatgagcggaaacaggagcttaccttgtttcctgatcaaaaagcaattatggatgtagcgttacatttcagtcattttctaagagaaaacaaacaggaatacctaccggatacgttaggaaatattcgcttaactgctgttacctttgaacaaattattagccagctacatgccgaatatggaaagggctggagtaagcagtatagggaaggcacggtgaaacaaaccatgcaagagctttcggcattgatgaaagaatgggaaatgcttgagcgagatcctttcacgggcgaatatcttatcaagcctctcgctggtcggatttcaggtcactatccgaaaaattttgatgcggaaaagggtgttaccaatgaaaaaacacaataa

SEQ ID NO: 50786 - DNA, 4146 bp, Oceanobacillus picturae
atgaaaaaacacaataaatggaaaatgaatcgagcaggactactaaatttctggtattatgacaacgaaatttttgactttgcagatggaaaattattactgcgagggagtaatggctctgggaaatccgttaccatgcaaagtattttgccggttttacttgacggcaagaagtctcctgatagacttgacccatttggctccaaagctcgtaaaatggaagactatttattaggcgaaaaagacattgtggatagagaagaacgtacgggttatctatttattgaatataagcgggaagataccaatcagtatataacaacaggaattggactgcaggcccgccgtcataaatccatgaattcttggtacttcatcatcacagataaccggagaattggcgaggacttcgctttgtatgaaacagagcggcatggcggagaaacacagcaaattcctctctcacgtacccaattggaaaatcgcgtgcaggacggtggccatgttgttcgaacacagggcgaatatatgaaactggtcaataaatatatctttggttttgaagaaatagatgcttacgaggatttaatcaagttgctcatacagttgagaagcccaaaactatctaaagattttaagccgaccgtcatttatgaaatcttggaagcggcccttccccccttaacagatgaagatctccgccatttatcagacaccattgagcatatggaccaaacaaagcagcagattgaacagctggaacgagaacaagacgccctaaacaaattaattaagcggtatgatgcctacaatgagtatgcgattgctgatcgagcccatgaatatgtggaagcgaagaaacgccataccaaggaagaacgcttattaaatgagaaggaagctatcgaagcaaccctaaaggaagaaattaagcgagggcaagaacaaagcgtaaagcttgagcaaacgaaggaagtactggaaaagaaacaggaacgcctgcgccagcataaagtttggaatttggaaaaagaacgcgcaacagagcaagaagcattagaagaagtaaaaaaagagttggaaagaaaaaatcaacagctcaccaacaaaaagaatgatgagttagagacaaaaagccgattaaaagcattggatgatgaactgtataatcaagaacagcagatgggagaaacattgcgagatcttgaagcagatgctgaggcatcatctttcacaggacattcgctcaatcaacaagatttccatcgcaataaagaaagtgactttgattttaaggtatggacacaggaagcagaaaaccattttcaaaacttggaatccattacggagggtctgcgttattatgagaatcttcgcgagcaaattgtggcattccagaaaaagctttcagatttaacgatggaaagggataaaacgaaacaagtggaacaggactggcttgctttatttgaaaaagataagcaagagaagctggacgaaattcaccgatgggcagcggaccattcctttttgcccattgaagaaaaaacactccaacagagcgccagacaaatggagcagctttatgagcccttatcctttgaaacggttcgaaatccatttgtacaagtaagcaatgattttcaaatggatgtaaatcaggaaatcgctacaaaaaaaagtgatctaagtaccttagaaaaagagaaaacggggaaagaagctgaacttgccgaatggaaggcaaaacgggaccccgagccgccgaaccaacgggaggaaacgagagaagcgagaaaattgctagaagcatcaaaccacgcatttgttcccttctatgaagcggtggaatttcaagaccatgtaccagaaaatgtacgaaaccaaatcgaagcagtgctgctagatacagggttgttggatgctttgatagcggaagagcagacgaccattacgcatgaccgaattattaaagccgacccgcacatgatggcacacactttacgtgattacctaacaccagatttggctgcagagagacaggtttcttctgagttaatcgatgaggtgctgcgaagtatcctcgttgatgaagaggttgaaggaaagatctccattcaggaaaacggctcctatacgatcggcatagtccatggccatgcagtgcctgtgaaatctgtacgttttatcggaaaaaatgcccgaaaacgttatcgtgaagaacaaataacccgattggaagaggaaattactggacttaacagtaactaccagtcgattgagcaacacgttcatgccttatcagaaaaggtagaagatgcaaaacaggccatgatcgcttttcccgttgatcatgatttacaagttagcttttcaacgattaaagaaaaaaggtttgacttagagcaacttcaaaaatcgcttcaacaagttgatcgcgatatggagataacgacaaaagcgtaccaagaaaagaaacgagagcttgatcgtaaaactcgggaattaaatattacgttttcctttactgcatacaacgaggcgaaatcaattatgcgggattacgaaaaagcgttacgttcgctgataacgacgcatacgacttatgttctgcaacagcaaaaccgcagaggagtaatagaaagagtcgatgagcttatggaagaagtcgacgaattgcaaggcgagttaaatgagcgtacggataaggaaagcaagcttgtaggtaatattgaggaaattgtgaaacaactggaaatgcaaggcgtcgccgatatacgaaaccagatacaggaggtacaagcttccttaaaacagacagaacaggagcttatgcacaatcgaacgacattacctcaaaatatagcgcgacttgagacgctgacggaagagattagtcagcatcatcaaaaactacattttcagcaacagatgattcatgtatgggcagataccattggtcaagagatgaactatggatttatcgatctccccgatgatcttcagaagatggaagaacgggccaagtggatagataagcattttaaacagctattaaaagaaaaagacccagcgtcaattgaaggacaattaacgagcatttattttgaacaacattccaatctaatggaatatcgtttatctgatcagcatgtcccagcagtagaggctccatggatgcgggagcaagaatggacagatgaacagcgtatgcaaatagaacattggcggcaaaaagcagcaagacgattaattcaattggattatcagggcaaaaaggttgatccttactttgttcgagaccgaattgatcaggaccgcttacaacaacagcatctactggatgaccaggatcgtcaattatatgaagaaattctctttgattctgttgggaaaaaactgcgcagtcgcattagcaaggcgcaggcatggacagaaaaaatggataagctgatggcagaaagcgactcttcctccgggctatctttttccatacgctggaaaccacggacagctgaaacagaggaagaattggatacgaaggagctagtggagctgctcaggcgagattcccgcttactaaaggatgaagacatggatatggtcattgatcatttccgttccaaaattgaaagagccaaggaacttgttgatatcaaaggggaaggaagtacgttgctgcaagtattaaaggatgttctcgactatcgtaactggttctcctttgtactttcctataagcgggagcgagaaccgaaacgagaattgacaaaccatgctttttacaaattcagtggtggggaaaaagcaatggccatgtatattccgctattcaccgcatgttattcacgatattctgaagcagaccctactgcaccttacattattacattggatgaggcatttgcgggtgtggatgaagataatattagtgtcatgttccggatcatggaagagcttggatttgattatatgatgaattcccaagtgctgtggggagattatgatacgatcagcaacctatccatcaatgaacttgtccgacctaaaaattctgatttcgtgaccgttattcgctatcattggggtggcaaaaaacgatcactgctcgtgaaggatcaagcagagactgtcacgaataggtaa

SEQ ID NO: 50787 - DNA, 1284 bp, Oceanobacillus picturae
atggataagcaaacaaaacaagccgcaaccttttttaagtgcgagcgcctttatgattccttatttaagcaacttagaaaaaaatatgaatccataggccgaattgggggtacgattcccattcggcttttctcctatgaagaattggaagcaattgctgggctatttggaaaatcagtggccactttagaacgaaaagggacggtttcgatagtagaattagcagaagcgctaaatgatacaaggtttagtggggtggatctaaaagctttactggatgcctattttggcgaggaacttgtctccaagaaggagcaaagacttgcgacggcagcacgaattacatcttttttggaacgtttagcaaagtcctaccccatattaactgattggttcgcgtacatacagacctccacatctgaagggcgttggatattacgtcaggcagaaaaaagtccagaccagtttgaacaaaatgttgcattattagcacgtgcggttactgcgttgccaacacattctgagcgacttccgatgttcagtcagcgaattacagaggatccacatgcatttgacctccatacggatcttggcaagatgtttttatatgttttggcagtgcgcacaggtgatgaaaagccggttgccataccgaaaagtacagaaaccattaacaaactgctccaaacgtcaaatatttaccgggatgaccttttaaattttgtaacatgtgccaaccttttggcagtagatcagtcaggagaacagcatcctgtctggcaggcaactggagcaagtcatactgtgcaaaatgtcccactgcgggagatcgtttcattaagtcggatctacccagcacaaggaaaaaaagtatggatcgtggaaaactctggtgtctgttctacgttgcttgattaccagcgtgacatccccatcatcagtacgaacggacaatttaagttggctgctctcatggtaatggatcttcttatcaaagaaaattgttcccttcactatgcaggggacttggatccagaagggttacaaatggcagaaaggctgttcaatcgctatccagatcacgtgcaattatggcatatggatggaaaagcatataaggaaagtgcaccttccaaagagctgtctcaagaaagattagcgaagctggatacgattgaacacaaaacattacgagaagttgccgatgccatgcgcctgtctggtaaagcgggatatcaggaagcattagttgcacatatgctggtagacatacggagtagttaa

SEQ ID NO: 50788 - DNA, 1545 bp, Xanthomonas arboricola pv. pruni; identical to SEQ ID NO: 50718

SEQ ID NO: 50789 - DNA, 4128 bp, Xanthomonas arboricola pv. pruni
atgaccgacaccacctccccgtccttgcccatccccaccctcgcacgctggcagccactgcggctggggctggtcgagctgttccactacgacagcgaggagttctggttccgcgacggccacctgctgttgcgcggcaacaatggcaccggcaagtccaaggtgctctcgctgaccctgccgttcctgttcgacgcccagctcaagccctcgcgcatcgaacccgacggcgacgccagcaagaagatggcctggaacctgctgctgggccgcctcgaccgccgtatgggctatgcctggctggagctgggccggctcggcgccgacggccagccgcactacctctcgctgggctgcggactgctggcggtggccgcgcgcccccaggtcgacagctggttcttcgtgctcgaacagcagcgcatcggccaggacatctggctgatgagccccgcgcgtgcggtgctcacgcgcgagcgcctgcgcgacgcgctgcaggaccatgggcaggtgttcgataccgcgaccgcctaccggcgcgcggtcgatgagcgtctgttccacttggggccgcagcgctacaccgcgctgatggatacgctgatccagctgcgccagccgcagctctccaaaaagccggacgaggccaacctctctaacgcgctgaccgaagcactgccgccgatctccaccgacctgctggccgacgtcgccgacgccctgaaccagctcgaggaataccgccgagagctggaggagtacgaggccttggagcgcgccgtcggccagttcaaccagcgttaccagcgctacgccgccacccaggcccggcgccgtgcacgcagcctgcgcagcgcgcagaccggcttcgacaacgccagccgcgacctcaacgacggccgcctcgccctgggggccgcacgcgccgccgaaaccggagcgacacaggcgcaacagcgggcggaaaatgcgctggccggccaccgcagccggctcgacgagttgcagaacgacccggccatgaccgacgccaaagccctggacaaggcggcagccgacgccgagcggcagcaacgcgacgcgggcgccgcccgcactgaacgccagcgccgacagacccgcttcgagcaggaacagcaggccacacggcagcgcgcccagcgtgcagaggatgcgggccacgcactggccgaggcccgcacacaggccagcgcagcggccgaaaccgctggcctggtgtccaactacggcgccagcccgctggcccacggcgaggcggccaccctgacgccagcggcgctggcatcggcacagcaggacctgcgccacaccgctgccgcccgtcgcgaacaggtcgcccacctgcagcgtcgctgcgacgaagccgagcaggcggcccacgagcgggcacgcgcgcaggacttgcgcgacgaacgtgccgacgaggcagaggccgcggccgcccgccgcgaagaggccgacgcggccgtcgaaaggcaaggccagcacctgctcgaagcctggcaatcccatctggatgctgcgcagcagttgcaggtgcccgacagcggcgacgtcctcgaaacgctggccgcctggaccgcgagcctacacggcgacaaccccgcgcgcgccgccctgcaccgcgcccagcaggccgccagcctgcggctggcccagcgccaggccatgttgcagaccgaacaacaagccctggaacaagaacaagccacgctgcacgcggagcgcacgcggctgcaatccggcgaagacgccctgcccccgccaccggcatggcgcgcgcccagcgcgcgcgaaggtcggggcggcgcgccgctgtggcaactggtcgaattcgcgccggcagtgccggccgatctgcagcccggcctcgaagccgcactgcaggcctcgggtctgctcgacgcctgggtgacgcccgacggacagttgctggatgctggcggcgcgccgctgccgcacgatgcccagtggcttggccggccagcgcgcccggattcgctggccgcgtggctacagccggcgcccccggccgaggccacgccgatggtcgcccccgccgtgctgcaacgcctgttcgaaggcgtcgcctgcggcgagcaggacgacccgggcgccgaagcctggatcggacccggcggccgcttccggctgggtgcattggccggcgcctggcacaagccccgcgccgagttcatcggttacgcggcacgcgctgccgcccgcgcgcgccgcctggccgagatcgcccagcgactggaggaactcgacctagcgcatgcgcagctgcaggccggctccgcccaactcgctgccgatcagcgccaggctgccagcgaatggcagtccgcgcccaccgacgacaccctgcgcgccgcgcacctgcaagccagcacgcgcgtgcgcgagctcgatgcggccaggctgcgcctggaccaggccgagcacgccctgcgcagtgccatccagcaatgggaagcggccagccagaccctggaacaggacgcccgggatcttgcgctgccgccagcgcgcgacgcactgcacaccatcgatcgggcgctgctcgccttcggcgatcggctgcatgcgctgaccagtgccgcgcgcgcctgccacgacgccttggccgaacaccgccaacaagtcgaacgcgaacagcaagcacggaccgatgccgaacacgcgaccgagcaagcggccgaacgcgacctcctggccgaagaagcccgtatccgcctgcagacgctgcgtgaatccgtcggcgccaaggtcgaagaactgcagcagcgcatccgcgatgcccgacaggccgtcagcagtgcagatctggaactcaagtcgagcaacgaagcgcttcgccttgcaggcgaaacgcgggcccgggccgaacagaaggtcgaggcggccgacgccatcctgagcgagcgcatcgcctcgcgccagcaagccatcgagcactggcagggcttcgccgccaccggcctgctcgaaatcgcactgcccgatgccgaactgccgccgcaggccgcgccctggaccatcgaacccgccctggccctggcacgccgcgccgaacaggcgctgctgcaggtcaaggacgacgacgacgcctggaaccgcgtgcagaaccaggtgtcgcaggactacaccgaactcggcagcgcgctggccgcgctcagccaccgcgcccaggccgaaaccagcgatttcggcctgatcgtcagcatcgtctaccagaaccggcccgagcgccccgaccaactgggcacgcgcctggcaagcgaaatcgcgcagcgccgggaactgctaaccgccggcgaacgcgaggtgctggagaaccacctgcaggctgaaatcgccagcgccatccacaagctgctgcgcgacgccgagcaacaggtgctggcgatcaacgcagaactggccaagcgtccgacctccaccggcgtgcgcttccggctgctgtgggagaccctgcccgaaagcggcgatggcggcgccccggtcggcctcaaggccgcccgccagcgcctgctcaacaccagcaccgatctgtggagcgccgaggaccgccgcgtggtcggcgaaatgctgcaacagcgcatcgccgccgagcgcagccgcgccgacgccgaccagggcggcagcctgcacgaacaactggcgcgcgcactcgactatcgccgctggcaccgtttccgcgtccagcgctgggatggacaatggcgcccgttgtccggtccggcctccagcggcgaacgcgccctgggcctgaccgtaccgctgttcgccgccgtctccagctactactcccaggccggccacgcgcatgcgccgcgactggtcctgctcgatgaggtcttcgccggcatcgatgacgccgcacgccatcactgctgggcgctgatccgcgaattcgacctcgacttcgtggtcaccagcgaacgcgaatgggcctgctcggccgagttgcccggggtggctatcgcccaattgcaacgccacgaaggcatagacgccgtgcacgtctcgcgctggacctgggacggcctcgccaagcgccaggaacccgaccccgatcgccgattcccgcctgccgcctga

SEQ ID NO: 50790 - DNA, 1299 bp, Xanthomonas arboricola pv. pruni
atgcgcgccgacgccacgctcccccccgatccgcgcttgcaacgcctgctgggcgacgatgccctcgccccactgcgccagcggctgcgccgatacttcgagcgcatcggccccaatgccaccgcatcgacactgcggctggaccgactcgcccccgacgcgcaccaagcgctctgccagatgaccggcagacccttacgaccggcgcgctcgatcaccctggacatccgccaactggacacggcattgcgcgaagccggcccagcgaactcactgcgcgacgcgctggaacgcctagacggtcccatcgtcgacaagacgcggcagcgcctggaactgcaggcacgctgggccgccgcgaccgactcgatcgatgcgtgcccgctgctgcaggattggttgaacacatcgtcagccccgccgctgctcaagcgcctgagtcgcgcctcggaaaatgccatgccattattgaacgccgccgacagcgtgctgcgcgctcttccagcgcaggggcaaccccgcgcacaattggcagccagcctgctcggcgacgcccatgccctcgacgctgggcgaccggtggccaccctcgtactcgccgcttggcggcattacgagcggcaacacccaacaaaccacgaaaccggggaggatccagaagatgctccaaagggagaaggcacggaggagcgtcaacgcgacatctgggcacgtgctggcatcctggtcaacgaattggccaggcccgcactcttcctcaatttgccggtggccacctcccaaggagcgctagggcatccaggcgaaccgtcgtacatttcgctgcggcaattacttcgagccagcacgatgtggtccgtcgccgatcgcgtcgtccatgtctgcgagaaccccaacgtcctcgccatcgcagccgatcagttgggcgccagctgcgctccactggtctgcacggacggcatgccatcggctgcgcaacgtatcctgctagatcaattgcaggccgccggcgcaaagctgctctatcacggagacttcgattggcccggcatcggcatcgcgaacttcgtgatccgcacctggaatgcaaatccttggcgaatgagcacccaagattacgaagctgccgctagttccaccacacgcgtgaggcatgaacttggtgccatacctgtcaacgccgactgggatattcatctcgcaaccgcaatgcagaactgtggcactgccatcgcagaggaagccgtagcgaccattctgattgaggatctacgcataccgggtccggcagaaaactga

SEQ ID NO: 50791 - DNA, 2007 bp, Frankia sp. BMG5.23
  modified_base (947)..(947): a, c, t, g, unknown or other
gtgctggtccaggcctgccagactcggccgtcgcttcagccaccgacgaccccgcagactcccgtcttccccagcagtgtcactggtagccggtcacccgccgttcacgcggtagcatggtgggcgatactgggcggtgtgacgagcgacggacagaccgggccggcagccggcggtgatgcgccgccccggcagccgttcgcgcacctgagcgcccccaacgcggacgtctaccgggaggtgctgacgacgttcgcgcgggcgcgggaccggttcatcgtccacatgcgccccgaggacgtgatcgcggatctggggcggccggggcagaccgagtcgatcgtcgccgcgctggacaagctcgttgagtggggcaacctgcgggccgacccggacaccggccgggtgaccacggtggcggacttccaccgggcgcgctacctgtaccagctgaccccggccgggcaggcggccgaggaggcgatcgccgtctacgaggtggcgatcggccgccggggcgccctgcagtcggtggcgctggaggacatcgccgcccagctgcgcgccctggtggagatgacggccggcgacgccgccgatctcgacccggcgaaggtacacctgctgctgctggggctggcggagcggttcaccggactggccgacaacgctcaggcgttcatgacgtccctccgccgagtgatcgacttctcggacggtgacgtggacgcgttcctcgcctacaagcaacggctcatcgactacatcaaccggttcatcgccgagctggcgaaccggggcgcggagatcgccaccctgctgggtcaggtcgagggggccggcgtcgaacgcctgctgctactcgcggcccgtcgggaggcgaccgacgccgtgcccgacgtgcccgaggtatccggctccggggcatccggctccggggcatccgnatccggctccggggcatccggctccggggcatccgattccggccggaccggagccgggcgaaccgacgctgagcggattcggaccgcctacgacgccgcggtcgccgcggccctggacggctggcgcaaccgctggcgcggcctgcacgactggttcgtgtcggcggattcacgccgtccctcccaggcacggttgttgcggggcgcggctatcaccgcgatcacccagctcatcgataccgtcgccgcactcaacgagcgccgtaccggccgttcggaccggtcggcggacttccgcacgctcgctcgctggtttgccgaggctcctgacgacgcggcggcccaccggctgtggcgggccgcattcggcctggcctcggcccggcatctcaccgtcagccaggagaccgtcgccgcctggcaggaggacgagccgacaccgaacacgccgtggcaggatgcgccgccgatgcggatcagcccgcagctacgccggaccggttcctacgagcggcgcggaacgccgaaccgggtcacggaccgcgcgcggcagcggcggctgctcgccgagcaggccgcgcgggaggcggagcaggccgcgtccgctcgggcccggctcgccaccgacgggccagtgctgctgtcccagctcggcgtcctggaccggcaggcgttccggctgttcctcggcctgctcggggacgcgctcgccgccaggctggcgggcgataccgaggtggagaccacgtccagcgacggcacggtcctgatccgcctcaccctcgtccccggcgggggggtggcgcggatcgagaccgaggatggcgtcctggacggcccggaacacaccgtcgagatcgtcgacctggccggtgcggcatcgcgtccggcggcctggaacgacctgaacgacctgaacgactggagcgactcgaacgacaggaatgaccgaaaccggcaaaacgatctgaatggccggatggacggcctcgctccggtcgtactcgccggtgggccggaccggctcgagctgctggagaccggacgggtgtccggatga

SEQ ID NO: 50792 - DNA, 1269 bp, Frankia sp. BMG5.23; identical to SEQ ID NO: 49804

SEQ ID NO: 50793 - DNA, 4332 bp, Frankia sp. BMG5.23
atgagcacctcgacccgcatgcccgcgacaccggcaccggcctcgattcccgcaccggcaccggcgtcggcctcgattcccgtaccggcccgggaggaccgctggcagccgctgcgcgccggcctggtcgacctcttctactacgacgtggaagagttccacttccacgacgggcggctgctgctgcggggcaacaacggtaccggcaagtcgaaggtcctggcgctgacgctgccgttcctgctggacggcgagctggccgcgcaccgggtcgaaccggacggtgaccgcaacaagcggatggaatggaacctgctgctgggcggccggcatccgcatcccgagcggctcggctacacctggctggagttcggccggctgggcggtgacggcatccccgagtaccgcacgatcggggccggcctgaaggcggtcagcgggcgcggcatcgtccggcactggttcttcgtgacccgccagcggatcggtccgcagctgtccctggtcagcccgacccgggtgccactgaccagggacaaactgaaagaagccgtcgacggccacggcgcggtgtacgacaccgcgtcggactaccgccgtgccgtggacgaagcgctgttcggtctcggcgggcaccggtacgaggccctggtcaacctcctgatccagctacgccagccgcaactgtccaagaagcccgacgagaagctgctctcccgggcgctcaccgaggcgttgccgccgctggaccccgcgctcgtggtcatcgtggccgaggcgttccggggtctggacgaggaacgggagacgctgcgcgccctcgccgaggcggaaacggctgcgcaggcattcctgacccattaccgccggtacgcccgagtggccgcgaagcggtacgccgcgccgccgcggcaggcgcacagccgctacgagcagcacgggcgggatctcgccgaggccgacgccgcgcatcaggcggcggtcgaggccctgacggccgcgcagcaggcgctcaccgaggtggaggaggcgaaggccacactgaccgcccggcgggacgcgctgcgggacagcccggagatgcgcgacgcggcggcgctgcggggcgccgaggaggatgccgggcggctcgcccggttcgccgcccagcgggagcgggacagccgggccgcggccgaggctgccggcgaccggaagcgccggctcacgggtgcggaacgcacggtccaggccgacgcggcgggcttcgacgccgcgatccgggccgccgggctggcggccgaggccgccctggtcaccggccggcacgccgcggtgctcaccgagctggacggcggggaaccgccgtaccgcgacgcccggcgatccgccgaggccctggtcgggcagcagggcaccgccgtgaaccgtctcgacgggttgctgcgcgcggcggccgacgccggcgtggcgctgcgcgcggcccgggacgacctggaccggatcactgccgagcagcaggccgccgccgagcggatcgcggcggccgaggacctgaccgcccagcgcggggcgggcctcgtcgtggcctgcacggcctacctggccggctgcgcgtacctgcggccggccgacccggacgccgcgctggcggccctggccggctgggtggacacactcgacgggtccaacccggtcgccaccgcggtggacggggcggcgcggctggccaccgccgacctcgggcgccggcaggccgtcctcgacggcgagcagacggccgcccggcgggaactcgaacggctcgccgaggagatcgagcggctggcggccggtggccacgactcgccgccggccccgcacacccgcgacgagcacgggcgggacggccgggacggcgccccgctgtggaaggtcgtcgacttcgtcgacggcgtgcccgacgagcaccgggccggaatcgaggcggcgctggaggccgccgggatcctcgacgcctgggtcggcccggacgggcggctgcacgaccccgtcagcgacgacgttctggtcacgcccgggcggccggcgccggggggtgggctggccgcggtgctcacgccggcgatcgaccgcgacgacgcacgcgcggcccggctgagcgacaccgcggtcgccgccgtcctcgcgacgatcggcctgcgcggcgggcccggcccggccggcggctccttggtccacgggccggcggccaacgggacgacggccaacgggacgacggccaacaggacctcgggcaccgagacctgggtcaccgtggacggccggttcggtaacggggtcctgaccggcggttggcgcaaggaaaccgccggctacatcggtgagggtgcccgcgaggcggccaggcgggtccggctcgaccacctgcgcgccgatgcgacccggatcgagctacggctcgaagagctggccgcggccgccgcggagctggccgaccggcagctctcgctggccgccgagcacggggcccggccctccgacggcgacctgcgcgaggcgcacgcgcagctggccacggagcacaaggccaagcggcggatcgacgcccagcaccaggaggcggccgctgtcgcggcccgccggcagcaggccgcgggtgaggcgcgggcggcggccgaggagttcgccggcgacgtgcgcctgcccgcggagccggccgcgctggccgacgtccgggacgccctgggtgactaccgggcggagctggccgcgctgtggccggcggcggaatcgctggaccggtcccgccgcgcggcgaccgaggcggaacacgaactcaccctcgcgctggaacgccaggaacagaccgccgaggcggtcgccgaggcgcagacgcaggccgacgcggccgccgaacgtcaccgggtcctggtcgagacggccggcgccgccgtcgacgaactgttccgcaaactggccgccgtcgacaccgaactcgaccggtgcgggcagcgggagaagcaggcccgggccgccgaacgggatgcgctcgacgcccggggccgggctcacggccggcgtgagacgttgcgggaggcgatcaccaccgccgcggccgaacgcgaggcggctgtcgcgaggctccgggcgttcgcggccaccggcctgctcgcggtcgccgtcccggacctggagatcccggacccggctgccggctgggcaccgtaccccgcgatcacgctcgcccgggcggtcaacgccgccctcgacgacgtcgacgacaccgaccgccggtgggagctggcgcagcagcgggtgtcggccgagcacaaggttctcaccgacgcgctgtcccggcacggccactcggtcgggatggtcgtctccgacggcgtgatcgtggtcgacgtcctgttccagggccgcaagcaggacatcccggccctggtcgccgcgttggagacggagaccgggcagcgggcgatgctgctgtccgcgaaggaacgcgagatcctggagaaccaccttgtgaacgaggtggccggcgccctgcaggaactgatcagcgacgccgagggccaggttcgccggatcaacacggacctcgcgcagcggcccacgtcgaccggcatgcggctgcggttgcagtggcgggtcgcgcgcagcgcccccgaggggctcggcgcggtgcgcgaccggttgctgcggcagacggccgacgcctggagccccgccgagcggaccgccgtcggcgcgttcctccaggaggagatcaaccgggagcacagcgcggacaccaccggcggatgggccgagcagttgacccgtgccctggactaccgcgactggcacgagttcgctgtgcagcggttccaggacggtcagtggcggccggcgagcggtccggcgtccggtggtgagcgggtgctcgcggcgtcggtgccgctgttcgcggctgcctcgtcgttctacgactcctccggcaaccggcacgcaccccgcctggtcgccctggacgaggcgttcgccggagtggacgacgactcgcgggccaagtgcctgggtctgctcgccgcgttcgacctcgatgtggtgatgaccagcgagcgcgagtggggctgctacccgcaggttcccggcctggcgatcgcgcagctgtcccgccgggacggcatcgatgccgtgctcgtcacgccgtggcggtgggacgggcacgagcgcacccgcgtcgaccggccggtgccctaccagcccgagcggcccgaccaacccgaccagccccagctactcgaccagcccgaccaacccgaccagccccagccgctccgtccggcgcagagcggcaacaccgagcccctgccgttcgagtga

SEQ ID NO: 50794 - DNA, 1305 bp, Frankia sp. BMG5.23
gtgagcgcgtcgtcgaccggggcctcccgcggtacggaagccgcccgcgatgtggaacggctgcgtcgtctgctgggcggtgagcacacggcgtggctgctcgaccgggtgcggcgcaggatcgagctgggccggccgctcaccgggacggtcaccctcggccgggccagcgcggaccagcggcggggggtcgagcggctgctgggccgccgggccggcaccggcgcctcgctgtccgtgtcgttggacgaggtcgacgcggtgctgcggtccagcggcgccgcgccggacggactcgccgccgccgtccgccagctcaccggggatgtcacggagcgggcggagctggccgcggcgcagtcacgagcctgggcgcaggcgcaccagcccctggacgacctcctcgcccggcgccccgaactcaccccctggcggtcctggctggacagcaccggcctgctgcgccggctggctggcaccccggacgcggcggggccgctggccgccgacctgctccgggtgctcgacgcgttgccctcacccggcgtggcgctgggccggctggccgccaccagcaccggtgacgcgcacgcgctcgacgacggccggccgctggcgacgctggccctggcggcggcccgggtactgggcggatcccaccctgcgggtgacggctcggccgcgggccgtcgcgccgcgtgggccgctgtcggggtgcaccgtgacgaactgtcgtccacggtgctctgcctgggtctgccgggcggggcggacagcccgaccggccggatcctggccatctgtcgcgaggcgggggagccctgcgtgctcactctgcgccaggtcggcccgggccaggaccgcggcgacctcggggtgggcctcggagtggtgtacctgtgcgagaatccgatcgtgctggccagcgccgccgacgagctggcgggccgcaccccgccgctggtgtgcgtgaacggccagccgtcggccgccgtcatcagcctgctcgcggcgctcgccggccagggcgcgcggtttgcctaccatggcgacttcgactggggcggcatccgcatcgccaacggcctgcgggaacggatcggctggcggccatggcgtttcgacgcccggtcctatcaggcggcgctgaccacggtgaccggcggcgagctggttggccggccggtcgacgcggcctgggaccccgacctgcgccccgcgctggagcaccatgcgatcagagtggacgaggaactcgtcctcgccgagctgatcaacgacctcggcgccccacacgcctggtaa

SEQ ID NO: 50795 - DNA, 1530 bp, Sphaerotilus natans subsp. natans DSM 6575
atgctcacgacctccgaccacgacctgttccgccaccttggcgccgacaaggctgacctctaccggcgcatcctggccgtgttcgccgccgccttgcgccagtaccagctccagctgcgcccggacgaggtgcttgcgcaaggtgaatgggctgcgggggcggtgccgcgcatcgaggacatccaggcggcgctgacacaactgtcggcctggggaaacctggaagcgcagcccgacatggcccgcgtgtccagcctgaacgattactaccgggcccgttttctctaccgcctgtcggcgggcggtgaggcggtcgaggccgcgctggacgtgttcgctgccagcctgcagcgccgggcggagctgcagacggtcgcactcgaagacatcacgatgcggctgcaggcgctgtgccggctcgcggccgaaggacgtgaaggggcggtccttgatgccgccaaggtccacgagaccctgcgtgacctcgcacagcgtttcgaggagatgacccgcaacgcgcagcacttcatggccggcgtggcccgtcagctcgacctgcgccaggcggacgccaccgcagtggtgcaatacaagcggcgtctgatcgactacctggagcgctttctgggcgacctggtacggcgctcgggcacgatcgccgcccacctgagtgcgctggagtcggacatcgattcgctgctgcacgccgtggccacgcgcgaagcccgtgacgccgcgcccgacgccacgaccgatctggctgccgatcggcttgcacgtcaccaggtctggcaaggccgctggcggggtctgcggagctggttcctgcgccagggtgacacgccgcctcaggcggaactgctgcgcgcccgggcccggtcggcgatcccgcagctgctcggcgccatcgctgccctcaacgagcgccgcagcgggcgcagcgaccgcgccgccgacttccgcctgctggccggctggttcgccgattgcgaagacgacgcccagagccaccggctggcccgtgccgccttcgcgctgcaccctgcgcggcatctggcgatgacggtgtcgttcgatgcgccgctgcccgccagcacgccgtggcaccaggccccgccactggccatccagccgcgcctgcgcgaactcggcgaagccgcgccgcgcggggtcgccccgcctgtgcacgaccgcgtcgccgcccgtgagcacatcgcccggcaactggcggaggaatcccggcagatcgaagcggcccgccagcgcctggccaccggccaggtgctgcggctgtccgagctgtcggccgagcgtccgctggagggcgaatcgctcgacctgctgctgagcctgctcggtgaagccctggcggagcaggccgaccccgaccagcccgtcgagcgcctgagcggcgacggcctgatgcgcatccgcctggagcccctcgctgccgacagccatgccgagatcgtgtcggcccgcggcgtgctcggcggccgggaccatctcgtcaccatcaccccggcatga

SEQ ID NO: 50796 - DNA, 1206 bp, Sphaerotilus natans subsp. natans DSM 6575
ttgcgcaccgcgttgcgggcgctgctgatgaccccgctgatgcccgccagccacgccgacttcgcggtggtgcgccagcatgcgcaggccctgcgcgagtggtttgcccgggaagcgggctggacgctgcaggtcgagcgcgacggcgcgcggctgtacaagcgcatggccgacacgggcgacgccacccgcggcctgcccggctacgaccgccgccgctatgcgttgctgtgcctggcctgcgcggtgctggagcgggcggagccgcagatctcgctgcgtcagctcggcgagcgcctgctgacgctggccgccgagccggcgctggccgagcgcggctgggggttcaccctcggcacggcgggcgagcggcgcgagctggtggccgtgtgccgcaccctgctcgggctgggcgtgctggtgcaggtggccggcgacgaagacgggtttgtgcgccatgccgatccgaccgacgccgccgcagcagcccagcacgatgtcctctacgacgtgcagcgccgtgccctgggcggggtgttcgccgccgtgcgcgggccgtccacctggcccgccggcgaggcccccgacacgctggaggctcggctgcaggcccttggcgccgacgtggtggccggcggcaccctcgacagcgacgaagcccgccgcaccgccgggcgccatcacctggcgcgccgcctgctcgacgacccggtcgtctacttcgacacgctcgaccccgacctgcgcgcctatgcggtgcagcagcgcggcccgatggcggcccgcctttcggaggccacgggcctgcagcccgagcagcgggccgaagggattgcgctggtggacgaggacggccgcctcaccgacaccgtgctgcccggcgaaggcaccgatgcccacgtcgccttgctggtggcgggtcatctggcgtctcgcgaaggggtccatcgtgacgaggtgatcgacttcgtgcgcggctgcatggcccagcacggccgcttctggcgcaagtcggcccgcgagcccgaggccgcgccggagctcgccgcgctggcgctcgaccggctggagcggttgcacctgatcacccgtaccggcgagtggctgcatccgcgcccggcactgtcccgtttcgcccccccgctggccaccgcgccgtcccgtccgacagggaccgacctgttcgcctcgccgcacacgacatga

SEQ ID NO: 50797 - DNA, 4203 bp, Sphaerotilus natans subsp. natans DSM 6575
atggactgcctgttcgacagccccgcccccgcccgtcccgccttgcccgagccacggcgcacacgctggcagcccctgcggctcgggctggtcgagctgttccgctacgacagcgaggagttctggttccgggacggccacctgctgctgcggggcaacaacggcaccggcaagtccaaggtgctgtcgctggtgctgcccttcctgctggacgcccagatcaagtcctcgcgcatcgagcccgacggcgatccgggcaagaagatggcgtggaacctgctgctgggcacctacccgcgccgcaccggctacacctggatcgagttcggccgccgcgacgccgacggcacgccgcactacctgacgctgggcgccgggctgcacgccgtggatggccgcgcccaggtcgagagctggttcttcctgctcgaagcggcgcgcgagcgccccgctccgcgcgtcggtcaggacctctggctggtgaacgcccgccggcaggtgctcgcccgcgacaagctgcgcgaggccatcgacggtcgcggccaggtgttcgagaccgcgcaggcctaccggctcgccgtcgatcagcgcctgttcggcctggacaccgagcgctacggtgcgctgatggacacgctgatccagttgcgccagccccagttgtccagaaagccggacgagggggcgctgtcgaacgcgctgaccgaagccttgccgcccttgtcgcccgacctgctcggcgacgtggccgaagcgctgcagcggctggaagaagatcgcctggaactggagggccacgaggcgctggagcgagccgtgcgccagttccagcgccgctacggccagtacgccgccaccctcagccgacgccaggcccggctgccgcggcaggcgcagaccgagttcgatcaggccagccgcgccagcaccgaagcccgcgagcgcctgcagacggcccggcagcaagaagcagccgcggaggcggccttcgagcagaccgagctgtcggtgcatgcctgccgggcgcggctggacaccctgcgggccgacccgaccctgcaggacgccaaccggctggccatcgccgagcgtgaagcccgggcccgcgagcgggccgcgcaggacacccagcgcgccctggaggccctcgaacaccgcatgatccaggaggccagcgagaccgagcggctggccggacagctgaacgccctgcgccaggcgtgcgaccaagcgcgccgcgaggccctgcatcaggcgtctgggctgggcctggacgccgaacacgccgctcacccgctgttcatcctcgacgacgaggcgctggccacgctggccgccccggcattcgacgcggcgtgcgagcagctgcaccagagcgtggctaaccgccgtgaagccatcgcgcggttgatgcagcaccacgaagtccttcgacaggcgcagtggcagcagcaggaacaccagcgccgccgtgacgagagccaggccgaggccgacgaggcgatcgaacgggccgcccgtgccgacgcggcggtcgagcagcaggcgcagcacctgaccgaggcctggcacgagcacctgcacgggttgcaagccctcccgctgtcgccagacgagcgcacgagcgccttgaccgcgctggccgactgggtgcgcgatccccaggcgctggccccacctcgccgggctcttgaggacgcgcgtcagcgggcgttgcaggcgttgatcgcacagcaagccgccctggaccagaccgcacgcaccctggccgagacacgcgaccggctcgaccaggagcgccaacgcctggcgtcgggggaagaggtcacaccgctggccccggcctggcgcgatcctgccagccgcagggaccgcccgggggcgccgctgtggcagttgatcgagttcaacgaccccgtgcccgatgacgcccgcgccggcctcgaagccgcgctggaagccagtggcctgctcgacgcctgggtctcgcccgacggacagctgcagcacgacccccggcacgacggcgcgccttggcaggacacgcaggtgcgggtcatggcggacgcaccgatggtgccgcgcgcgcagtcattagcgggctgggttcgcgtggcgcaggtcggcgctgttgaaccgccagtggccgccgcggtggtggagcggatcctcggcggcatcgcctgcggtggggacgatccggggaacgcggtggcctgggtgtcgccgcaggggtgtttcaggctgggcgcgctggtgggggcgcacaccaaggccgccgcctgccacctcggcttcgccgcacgcctggccgcgcgtcaacgccgtttggccgagattgcggccgagcagcaccaactggccgtgcagcagcaggcccacgcgcagcacgtgcagcaactggccgtgcaccgggctcgggccgacggcgagtggcgcagtgcgcccgccgacgatgcgctgcgccaggcccatctggaggcccaggcgagttcccgcaccctggcggcggctcgcacgcgcctgcaggccgccgaagaccggtgccgcgcggcccgtcagcaggtggacgcggcccgacaggtcttgcacgacgacgccacggacctgcggctgcccgagcgcgccgaggccctcgccgccctgcgcgagccgctggagcagctcgcccgggcgcagggtgcgctggtgcgcgcactgcaggcggcgcgcctgctgcatcccgaacaccagcgtcaacaggcccggcaggcgcgcaccgcccaggaccgcgccgagcgccagacccagtgggacctgcagcggcaggaggccgaggaagcccgtgcgcgctgggagaccttgcgcgacgccgtcggcgccgaggtggacgccctgcagcgccagatcgcccaggccgagcagcaggtgcaggcccaggagcgggccctgcgcgaggccagccagtcccgtcagcaggcgggcgaggcgcgggccgtcgccgacgctcgggccgagaccaccgcgcaggcgttcgcgcgcagcacgcaggcccgcgcggccgcggtcgcccagttccagcgctttgcggacacgggcctgctggccgtggccctgccggcgctcccgcagccggagggccgacagccctggaccatcgatccagccctgacgctggcccgctcggccgagcgtgacctgagcgaggtccgcgacgacgacgagacacgtgaccgcctgcagcgccagatctcgcaggatctgaccgagctgcagggcgcgctgaccgccctcggccaccgggcgcaggctgaatcgagcgacttcgggctggtcgtcagcgtgctctaccagaaccgcgccgagcggcccgaccagctcgccgcccggctggccgacgagatcgcgcagcgccgcgagctgctgacggccaacgagcgcgaggtgctcgaaaaccacctgcaggccgagatcgccgccgaggtgcagaagctgctgaaggccgccgaccgccaggtggaggccatcaacgccgagctgcacaagcgcccgacctcgaccggcgtgcgctaccggctgcgctgggagccgctggtcgagggcagcgaaggcgcaccggtcgggctggagacggcgcggcgccacctgctgcacaccaacgccgacctgtggtccgcggccgaccggcgcgtcatcggcacgatgctgcagcagcgcatcctggccgagcgggcgcgtgcggaggccgcgggcaccggcagcctgcgcgagcagctggcccgtgcgctcgactaccgccgctggcatgtctttcgggtgcagcgctggcaggacggccagtggcgcaagctcagcggaccggcctccagcggcgagcgggcgctgggtctgacggtgccgctgttcgcggcggtggcgagcttctacggcagcggcccgcaggcgcgtgcgccccgcctggtgctgctcgacgaggcgttcgccgggatcgacgatgccgctcgggcgcactgcatggccctgatccacgagttcgacctcgacttcgtcatcaccagcgaacgcgagtgggcctgctacgccgagctgcccggcgtgtcgatctgccagttgctgcgtcgcgaaggggtggacgcggtgctggtgtcgcgctggagctgggatggtcgcgcccggcgccgcgaggacgatcccgaccgacgcttcgagccggccgaggcatga

SEQ ID NO: 50798 - DNA, 1227 bp, Sphaerotilus natans subsp. natans DSM 6575
atgagcgcggaccgggagcggctgcgccgggtgctgggcggcgaggcgggatccgggctgcggcagcggctgcgccagcgtttcgagcgcagtccggccgacgccccgccgacgcggatgcgattgaccgccttggcgccgcatgagcacgaggtgctggtcgggctgctcgggcaggccgcccggcacagcggggcgctgcagatcgatgtgctccgcatcgacgaggcgcttcggcgtgccgggctggccgcttcgctgcgcgacgcgctggagcagctcgacgggccgatcgtggaccgcgccgccgagcaggccgacctccaggaccgctggaacggcgtcgtctccggggtcgcgcctggcaccgggctgcaccggctgctccagcgaccggagggccgggggctgctcaagcgtcttgcgggcgcgcagccgcagcgcgccgagcgcttgctgcaacaggcccaggccgtgctggcgcgtctgcccgcgcagggcctgacccgcgcccagctcgccgccgagacgctgggtgatgcccatgcgctcgatgacggacagccgctggccacgctcgtgctcgcgggtgcgccggaggcggaagacgatccggaccacgaaagccggcgggcacgctgggcgcggtggggcgtgctggtcaatgagctggcccggccggtgctgcacctgaacctgccgacggctgtggcgcctgacgccgggccctgccccggcgagcccgcctacacctcgctgcggcaactgctgcgggcggcacccgtctgggcggtcgagcaacggacggtattcgtctgcgagaacccgaatgtcgtggccatcgcggccgatcggctcgggcgcgactgcgcgccgctggtctgcaccgacggcatgcccgcggccgcgcaacgggtgctgctgaaccagctgcgcgacgccggcgcatgtctgcgctatcacggcgattttgactgggccggcttgcgcatcgctcggcaggtgctgcagggacagggggccgagccctggcgcttcggttgcgctgactatctggccgccgtgcagacgctgccgcccctggcccgcgaccacgcgctcgggctggacgtggccgaggcgccgtgggacgaagcgctcgcggcagcgatgcgggaacagggctgtgcggtggccgaggaggcggtcgtggatctgttgctggacgatctgcgcgaggctgcctga

SEQ ID NO: 50799 - DNA, 1491 bp, Geobacillus sp. CAMR5420
atggacgccacgtggttgaagcccattgtcgaaacaaaatatttatcgacggaaaacgcgcaccgctaccgggcgattttgcgctatttctacattcagcacgagcggatgcggcaatatttgtttccggaagaagtgtacgcctttttaaagcagcacgaggagtttgcggattacacggaagatgacttgcagcaagacctcgaccagctcgtcaaatggaacaacttgatcgcccgccaagagacgtcccatgtccggacgattgaagagtttaagaaaaagcggtttcgctaccaatgcagcccgtacacggtggagatcgagcggatgatccgcacccttgagcagctcggggattcgtttggagggtccctcgagaaaacacggttcgaccgtttgtatgcatctctttcccgcatggaggcgatcatcgcttctgattttcaagaacaagcggatgaaatgcatcaagtgtgggaagagacgttcgattattttaagaaaatcatccgaaattccgctgactatatcgcttatttgcacagtgaaaacttggaagagcggatgacgtccgagtcgtttctcgtctataaagagcagtttacggcgtacttgcgcgattttatcgtcgccttgcaaaaaacgtcgatgcagattgaacaattgcttgaagatctgccggaagaaggggttcggcagttcatcgagcgtgtcgtcgactatgagcggtcgatcccgcgctttgccgatgcgccgccgccgcgcgctgtgcagattgaagaaaaatgggaaacgtggcgcagcttgtgcgaatggtttttagggcgcgacgggcgcgagagcgagctttcgtttttgcaataccagacaaatgaggcgattcgccgtctgacgcgcgtcgtgcagcggcttggcgagcggcatcatcattttcgcagccgcaaaggcgactacttgcatttggcgcgctggttttcccgccttgaatcgattgaagaggcgcactgcctgtcagcggtcgtattcggctgcttccatacgaaacatctcgtggccgatttcggggcgacagacaacatataccgcgacgtatgggacgatccgccagctgagtgggtgacgaagccgcgcgtccgccattacggggaaaagaaaaagccgcaggcgatagaagataaagagcgggagaaagaagaagcgcgcctccgctatttggaagaaaaagcgcgcgaggaagcggcgcttaggcagcttgtgaccgacgggaaaatcgtgctggctgaccttcccgaggtgactccatatgtacgaaaaacgctgctcggttggatcgccaaggcgatggggcgcgaggggcaagctattaagacagaaaacgggtgggtggtcaaggtggcggcgaaagaggggacgatttgccttcgggcggaagacggggaactcgtaatgcccaactatgaaatccacgtgctggcaggaggtgaatga

SEQ ID NO: 50800 - DNA, 1197 bp, Geobacillus sp. CAMR5420
gtggagacggcgtttgacgacaaggcgaaggaagcgctcgccgcgctgtttgagcagttttggatcattcgcgaccaagagccggatttgtatcagctcatccgcgagcgtgaacatgtgttgaaacggtatgtggaggagaagtttgggtatcgactcatcgtccaccgctatttcgccaagctcgagaaaattcccgccgatcccgagccgtggatgggcatcgagtcgttccaagagccgctcgattatgcgctgttttgctgcttgatggcgtatttggaaggcaaggcggtggaggacaagtttttgctttccgacgtgtgcgaagaaatccgcgccatgtacccaggggatttgccggtcgattggacgaactacgcgcatcggcgcgcgctcatccgcgtgttgaaaacggcggaacaaatcgggctcgtccgccggatggacggggagattgaagcgttcgcgcaacatgcggaggaagaagcgttgtacgaagtgcccgtgctcgcccgctattttatgcgtacgcatccgaaagatttgcttcggtatgaatcgattgaggagctgatggccgaggagtggaaagcctcgccgcaagattatcggcgccatcgcctgtaccggaagttgtttttatccccggctgtgcatcggacggaaggcgacgagcaagatttttactacttgcgcaacttccgccatcggctgcgcgatgacatcgaagcgcatacgccgtttcggtacgagttgtacaaaaacgccgccatgttgacgttgcctgagcggcaggcgccgtacacgacatttcccgaccagaaaggaacgtcggagatcatccttcatttttctgccttggtgcgcgagcggcttcaggactatccgccggatgaatacggccgcattcgcttgacgccggaacagttttccgcttggcttgccgattgccgccgccgttacggggcggggtgggggaaaacgtaccgtgacatgtcggccgccgagctcgtccgcgaggtgcttgcggcgctttgcgaatggcgcatggctgatatagagcgcgacacaggaatgatcgttctctatccgcttctcggacgggtggcgggacggtatccagatgattttgacgcaaaagagggggaggaacatggcgaatccatggatgcttcatcgcgcgggactgattaa

SEQ ID NO: 50801 - DNA, 4122 bp, Geobacillus sp. CAMR5420
atggcgaatccatggatgcttcatcgcgcgggactgattaacttttggtattacgacgagcaatactttcacttcgctgacggcaagctgctgttgcgggggagcaacggggcgggcaagtcggtgacgatgcaaagcttgatcccggtgctgcttgacggcaagaagacgcccgaccgcctcgatccgttcggctcgcgggcgcggcggatggaagactacttgcttggagaaaaagatgtcgtcaaccgcgacgagcgaacggggtatttgtttttggaatacaaacgaaaagcatccgaccaatacgtcacaacgggcatcggcctgcgggcaaagcggcaaaaaagcctcgacttttgggggtttgtcattttcgacaaccgccgcatcggtcatcatcttaccttatataaaaaagaaaaaacaggagagaaaatcccgctcactaaacgcgagctggccgcagcgctcggcgcgggcgggacggtcgtcgacacgcaaaaagagtatatggagctcgtgaataaacatgtatttcgttttgaatcgctcgaggcgtttcaagaattgatcgaactgctcattcaactgcgcagtccgaagctgtcgaaagactttaagccgacggtcatttatgagattttggaaagctcgctgcctccgttgactgatgacgagctccgccatctatcggacacgatcgaaaacatggaccaagccaagcagcagcttgagcagctcgagcgtgacgagcgggcgttgaagcgcctttgcgatcaataccgcctgtacaacgaatatatgatcgccgaaaaagcggcagaatacgtaaaagcggtcaagcaggccgaacagctcgccgccgagcaacaacgcctgcacgatgaagaagagcgggcgcgaacgacgcttgatgagcttgaggagtccatcacccgccttggccgcgaagaagacgtgctgcgagcgcgcgaaatcgatttggccggccacgaagtgttccagcaggcggagaagtatgaacagctgaaagctgaacagcagcgcctagaggaacggcggaagcgtcacgaacaaacgattgcggaaaaagaacgacaggaacgtcagcaccgccgccgcctcgatgaagcggaagcacggttggacgaccttgagcggaagcttgaagacgagctggagcagctgcgtatggatgccgacgaaggatccttttccttgcatgaaacgaacgaaggcgactttcaccgccatcgccaaaaggagcaggagtttttgtttgccgcttggaaacaggaagctgaccgccatatcgagcggcttgaagggctggcccgcctttggcgcaggcatgacgaggtgaaacagcgctatgaggaagcgagcagcgaagcgggcgaacggcagcgggaaatggacgaatggcgccatcagcagcggaaatgggaagagctgctcgagcaggagaaagagcggtttgaacaagccgtgctggcttggatcgggcaaggagacgtcgacatttccgaagcggatattcagtcgtttttgcaacaaatggactccctctatgagcagtattcgctcgatgatctgaagcgcccgttcgtgcaagcgtattacgatgccgtcgggaagaaaaaggatgagaaatggcggctcgagcatgacatccgtctgttggaagaaaaacgggcagaacgtgaagccgaactgcgccgttggcgggaacaacgcgaccccgagcctgaacgggatgaacaaaccactgccgcccggttggcgttggaggagaaaggcattccgtttgtcccgctttatgccgcggtggaatttgtcgacgatgtgcctgacgatgtgcgcgagcgaatcgaatcggcgctttcgcacgcggggctgcttgacgccctcattactgctcgcgagatcgacgtcgcctgcgaccgtgtgctcattccgaaaccggtccatatggcgcacacgcttgctgattatttgcgcccagatgccaatgcccctgtgtcaatggagcggattgacgaagtgctccgaagcatcgtcatcaccgatgccgaccaagaaggcggcatgacgatcgatgaaacggggcgctattcgctcggccttgtccgcggccatgcaccgcggggatcgaaggcggcgttcattggccgtgcggcgcgcgagcggtggcggcttgaaaacatcgcggcgctggaagcggagatcgccgcgatggggcaagagatcgaccgtctgcgtggggcgcatgcggccgtggaagcggccattcaagcgctcgccgactggttggcgtccttcccggcggaccgcgacgtgcgcaccgcgtttgacgaagcgcaagaagcgcgccgccaagcggaaagcaaagagcgggaatggaagcggcaagaagaaaaagcggccctccttgcgcgcgaatggaaacaaatcaaacagcagcttcgtgacgaatcggctgagcttgatttagccttcaccttggacggctgcgaacaagccatgctcgccatgaaatcgtacgtccgccatttgcacgaattcgaagtgctttaccgcgaaacgcgccataccgaagccgtgatcgctcagcagcgcgagcagcttgcggtgctggaagcggagatcgacgaggcgaaaggcgaacgaaatcgacttcgggatgaaaccgagcggctcgccttgcgaatcgcggagatggagcggacgctcgcacaaatgggagcggatgacattcgcgccgaaatcgcccgcattcaagaacggttggcgtctttgcgccgcgaaattccgcgccttgtcaacgaacgggcgcggacggaacagcagctcatgcgcctggccgaagaacgggaaaaagaggcgcggcgggaagcgttcgcccgcgagctcgccgcgatgtgggaaaagtcgtttgcccgtgaagcggcgcttgggcttgtggatcttgatcgttcccgctccctcctggagcaggcgaaagaagcgaaacaacggtacgaagcagtgttaaaagagacgcgttcctcgcttctggcgcggctgaacaccgtctttttccaagagtcgtccaacttgaccgaataccgggcgtccttcgagccgctggaagaacaaacgaagcccgaatggaccgccgctgccccagacgatgagatggccatgaaagccgcggactggcgggagaaacaagaacggcacgtcatttacctcgactacaaaggcgagcgcgccacgccgtttgcggtgctggcggaagtggagcgcgacatcgtcttgcagcacgagtatatgaaagaacaagaccgcgagctgtatgaggacgtcatcttaaaatcagtcggccgcattttgcgcagccgcattcagcgcgccgaacggtgggtgaatgatatgaataaactgatgggcggcctcgacacatcatcagggcttgtgctgtccattcaatggaagccgaaaacggcggagacggaagcggagctcgatacgaaagaattggtgcgcctgttgcggctcgatccgcggctgcttagagaggaagatttacagcgagtgacgaaccatttccgctcgaaaatcgcccgcgcccgcgaattgcttgaagagcgcggccaaggcagcacgctccatcaaatcattaaagaagtgctcgactatcggaaatggttttccttcactttgtactatgaaaaaacaaacgagccgaaacgcgagctgacgaaccaccgcttttaccaattcagcggtggggaaaaggcgatggcgatgtacattccgcttttcgccgcggcgtattcgcgctaccaagaagcgggcgatgatgccccgtacatcatttcgctcgacgaggcgttcgccggcgtcgatgaaaacaacatccgcaacctgttcggacttgtcgaacagctcggctttaactacatcatgaactcgcaggcgctttggggcgactacgacaccgtgcccgcgttgtccatttgcgaactcgtccgcccgcgcaatgcgtcgtttgtgaccgtcattcattaccgttggaacggccgcgtcaaacagctgatggtcaatgataaagaatgggagacgatcgagacgtga

SEQ ID NO: 50802 - DNA, 1221 bp, Geobacillus sp. CAMR5420
gtgagcacggccaaggaggcggctgcctttttccgctctgaaccgggcttccgccgtctgtttatcgagatgaagcacaagtacgagtcgctcggccgcgtcggcggcgcggtgtctttagaggcgttcaccgatgaagagcgggaggcggtggccgcctttttcggcaaagacgtctcccgcgtctcccttatcgcgtttgaaaaacagctcggacagacgaggtttgcgggcgttgggcttgttgagctgcttgaacagtatttcggcgccccgcttgtctcaaacaaagaacggcgccaggcggaggaagaggaacgggatcgtttttttgcgcgtctgaccgaggagcatcattgggttgagtcggtccgccctcagcgcttcgtccaaacggcgtacgaaaccgaccgccgcagcctggaggaggccatccgccttgtcagcgcggctctcggccgcctcccgctcccgtcatacatgcgcctcccgctctttgcccagcaagtggcgggcgacccgcatgcgttcgatttgtccacgctaccggggagattgttgctttcggcattgcaagcgaccgtgcccggggattgggacatggcatctgtagagagcgtcaacgagttgctccagtccgtcggcttgctccgtgaggatatcctgaactttgtcacatgcgccaacattcttgctgaaaccaaggacggaccgcatcctgttttctccgctgcctgggaggcgaacacagcgctgaacatgccgcttagagatgtgctgtcgcttgtccgcgcccgccctgcccatggggggacggtgtacattgtcgaaaacgcgggcgtcttttcgacgttgcttgacacccgcgccccgcttgtcagcacgaacgggcaaatgaacttggcgacgatgaagctgctcgatcttctcgcctcttcaggcgccaagctgtattactccggcgacttcgacccagagggattggccatggcggagcggctgcaggagcggtatggacaggccgtcaccctttggcgcttttccgtcgaggattatagggccgccaaccctgtcgtcgacctcacccccgagcgcctcgccaagctcgcatccgtaacgtcgacgccgctgcagccgctgaaagaggagatggcggaaacgaaaaaagcggggtatcaagaggcaattatcgggaggctgacagaggatatcaacgggtag

SEQ ID NO: 50803 - DNA, 1557 bp, Streptomyces albulus
atgcgcagggttccgccggagatgttccggttcaccatcggagagaaggccgacctgaacggagccgtcctcgacgccttcggcgtggctggcgagcacctggaaaccgccctcgggctcgacggcgtacgcgagcaactgcgggcggtgggctgggtcgcggacctcgccgacgaggagctgtacgacgcgctgaaacggcttgtcgggtgggggctcctcgacgtggtccacaaccacgccgagcactaccgcacggctgaggagtacgagcggcgcaacctccactactcgctgacccgccggggcgaggccgcgctggccggcgtgcggcacgccctggaggtcctcgcctcgacaggtgccctgcagaccgcggtgcttgaggcgatcaccgaccggctcgacgaactgaccgtgctgtccggtgaacccgccacggctgaccggcgcatcctcagcacgctgcgggagctggagggccatctggaggcactggtggagaacaccaaggcgttcaacggccagttgcaacgactcctccgagccgagggtgcggatctggacgtcttccgcgaggtcaaggccgccaccgtcacctatctccaggagttcctggtcaacctcgaccggcgcggcgaggcggtcgccgaggccgtgggacgcgtcgaggagcggggcatcgccgtcctgcgcgagcgggccctgcgcggcgccgagctgccaccggtgccgggggaggatcccgcagccgggtggctggagagccgtcgggcgcgctgggcgggactacgggcctggttcttgccggacgacgggacacacccccggatcgagcagctgcacgacattgcccggcgcgccatcgtctccctcctgcaggttctggagcggatcaacgagtcccggcgccgctcctccagcgccgtgcaggacttccgggagctggcccgctggttcgcggcggcttccgaggaggacgatctgcaccgcctgtggtccgccgccttcggtctgggctcggcacgccacgcccatctcgcccacccggacccggagctgatcccctcgtcccggtcctggtccgaggcgccgccggtggaggtgtcggcgctgctgcggaccagcggacggacggagcgcttcacccggaccggcaaagtgagggacgtggaggccgtgcgggccgagcgcgctgagcgggcccgtgcgcagcgggccgaactcgcccgagcctggcaggcgctggagctggacggccccgtgcggctctcctccttcggcaccctggatcccgccgtcttcgaccgcctcctcgacctgctgggccgggctctcgccacctccccggacgcgagcggtctgtggcgtgccacgagcggcgacggccgggtagagatcgtgctggcgccgccccccgacacccggaccgccgtactgcacaccgagaaggggacgctcgcagggcccgactacgtcgtccacgtcgtcgccgcgggcggaacggccgcgttcccggcaccccacaccgccacgcgtcaggaggccgccggatga

SEQ ID NO: 50804 - DNA, 1314 bp, Streptomyces albulus
atgagcacgctcgccaaccagctggcctccgcggaacgggaggaggtcgcccgcgccatccgcctcctcctggcccgtcccttgctcaccaaggccgccgacccggccggattcgacctggtaaggcgccggcgcgacccgttggcgcggtggttcgactacacctgcggatggagcctggccgtggagccccgccggggctacgcccgcctgaccaagatccgcgcgaaccccgacggctcccgtccggcgcgcagagcgcggtccggccgcaaccccttcgaccgtcggcgctacgtcctgctctgcgtcaccgcggccgagttgctgtcgatgcccatgacgaccatcggcatgctcgccgaccgcgtcgtccaggcgaccgcggtcgaccgggcgcttccgacgttcgacccggtccacaagccggagcggacggccttcgtcgacgtcatgaagctgctggagtcgtacgacgtgctgcgcacggtggacgggacgaccgaggcgtacgtcgactccgccgaggcgaaggtgctctaccgggtggacaccaccctgctgatgcggctgccggccgctcccgtcggcgcctcccggctcgccgtacctccggatgaggtgcccgcacgattcgaggacctccttgccggtctggtccgggagcgccgctacggcggcgcggccgccgacgggacggccgacgaaccgcacggcgaggcggccgccacggacgcccagcgcaacctgagactgcgccactcggtactccgccgccttttcgacgaccccgtcctccaccgggccgacctcaccgaggacgaactcgcctacgtcgcctcgctcaccggacgccagatcctgcgccggtcggtcgaacaggccggcttcctcctggaggagcggtccgagggtttcctcctcgtcgacccggatggcatcgccaccgacgtccggttccctgacgacagttccaccgcacgggtcgccgcgctgctcctccttgagccgctctgcgccgctccggcggggctgctgcccgagcagctggccgaagccggcgccacacagctgcggcgattcccgagctgggccaaggcctaccagtccgaggacggtccggcacgtctcgccgacgacgccgtgcgcgtcctgctcgacatgggcctggcccgcagggcaggggaccgcgtcgtcgtccggcccgcggcgtaccgctaccggctgacggagactacgagcccggccggcaacaacgacccgaacgacaccaccacttccagcggcgtgcccgcggaaggagacgagcagtga

SEQ ID NO: 50805 - DNA, 4158 bp, Streptomyces albulus; identical to SEQ ID NO: 50486

SEQ ID NO: 50806 - DNA, 1362 bp, Streptomyces albulus; identical to SEQ ID NO: 50487

SEQ ID NO: 50807 - DNA, 1476 bp, Exiguobacterium sp. AB2
atgcaaccagggctgcaaaagaaaatcaaagaagcgacgtatttgacggcggagaaggcgtggagctatcgtccgattttacgttacttctacatccagcatgaacggatgtgtgaatttttatatccggaagagatttatgcgtacttgaagcaatatacagaatttcaagaatacacgatggacgggttgcatcaggatttagagtcgctcgtcaaatggggcaacttgattgccagtcaagagcaccggaaggcgaagacgattgaagaatacaaaaagaaaagtttccgctaccaatgtacgccgtacacggtcgagtttgagcggatgatgattcaactcgagcaactcggcgacagtttcggcggctcactcgagaagacacagttcgagcggctctatcacgtccttgaggcgatcgctcaggcaaacggaaagcccgattccgaatgtgcccagctttgggaagatgcgatgctctatttccgtcaaatcacgcagaacacgtcggactatatcgcctatattcatagtgagaaagtcgtcgataagatgaagacggaagcgttcctcgtctataaagatcgcttcacgacgtatttgcgcgacttcatcatcgcgctgcagcggacggccatgcagattcaggacttgttgacgtcgctcacgacgaatcggctcgagccgttcttccaacaagtcgtccggcatcagcatcaggcgttccggttcgaagaagacgacatggacccgatgatcgacttagtcgaaaagtggcgtaacttgagagcatggtttctcgggacgacgcacggcgagagcgagtttgaacgtctgcaagaacggacgaatgaggccatccgccgcatcacccgcatcgttcaacgcatgagcgaacggcatcaacaatttcggagccggcgccgtgattacgagcatttggcaaagtggttcgatgggatcgagacgattgaaacggcccatgagctgtcctcggtcgtgttcggcgtgttccatacgcgtcacctttacggggaccacgttccgaccgacgacatgtacgtcgacgtgtgggacgaggcaccgatcgagcacgagacgaaaccacgaacgacgaaatttaaagaatcgacgaaagccggggccatcatcgaccgatctgacaagattgcggagatgcgccgacttcatttgaagcaacttgaagaagagaaggaagcaattgaacgatacatcgaagcgggtgtcatctcgatcaaaacacttccagtgattgagccgcatgtgcgaaagctgttattgtcgtggctcggtaaagcgatggtacgggaggaccgggtcatcaaaacggagtacggccgccgcgtgcgggtgacgctcgaggaagagcgtgtcatcttgcgggcgaccgacgggacacttgagatgccgaacgtggaatattacttcatcgatgaggaagtgacgtcatga

SEQ ID NO: 50808 - DNA, 4071 bp, Exiguobacterium sp. AB2
atgaaccgggcaggcttgctcaatttttggtattacacagaagagacgttcgatttctcggatgggaagctgttgcttcgagggagtaacggatcggggaaatcggtgacgatgcagagcttcctgcccgtgttacttgacgggaagaagtcaccggaccgactcgacccgttcggttcgagggcgcgcaagatggaagactatttactcggcgagaaagaagtcgtcgaccgggaagagcggacaggctatttgttcatcgaatataagaaggccgagacgaatcaatatgtgacgaccgggatcgggcttcaagcgaaacgtgggaagccactcaaattctgggggttcgtcatcacggacaaccgccgtattaacatcgacatcgagttgtataaactcgaccgccaagggacacagacgagtaaaatcccgtactcacgggtcgagctcgaacgggtcatcggggatgggggaaaagtcgtgacgacgcaaggcgagtatatgcagctcgtcaacaaacacgtcttcggcttcgagtcgatcgatgcctatgaagaattgatcaagttgctcatccagttgcggagcccgaaactgtcgaaagacttcaggccgaccgtcatctacgagattctcgaggcagcgttgccaccattgtcagatgacgacttacgccatttgtccgacacgatcgaacagatggatcaaacgaagcaacaactcgagcagctcgagcgtgaactcatcgcgcttcagaagttgagccgcacgtacgatgcgtacaatgagcgccatgtggccgacctcgccgtcgagtaccggatggcgaccgaacgagagatgacggaagcgcaagaacttgagaatttacgtgaactccagacgtcaagggcgcatgaggtcgagacgctgaaacaattgattcaacagctcgaccaagacaaagcgacggccgagcgtcagcgtcaacgcttggcgtcccataaagtttggaacttagaagacgagttgaagaaagaagtagatgcgttacagcacatcacggctgattatcgacggcaggatgagcgacgcgcgaagaccgctcaaaaaatctatgacgccaaacagcggcaagacgaagaacaggtagtccatcgcacgacactccaaacgatcgatgacttgattgatgatatggcgtacgacgcagaacaggcggcgttcgaccgtcatgagttgaacgtctccgattatcgtcgcctgaatcgagaatttgatttcctgacgtggaaacaagaagtaggggaacatacggaacggctcggcaaagtggcggaagggatgcgcgcgctcgaagagacgaaacggaaacttcaaacggaaaacaagcaactcgccgatgagcaacaagcgcgtgatcagaaaaagcacgagcagaccgattggcaaaagacattcgaccaagacttggagcgtcatctcgcagacgtatatcgttggaccgaggaacatcctgagtttggtgtcgaaggggagacgatgggtcacatcgagcgcacacttcgaaacgactatgacccgtcaacgtatgaggatgtgttgcgtctcgttcgaccaaacgtggtcggttaccagaaccggctacgtgaaaaagcggcctcgaagaaagcggccgaacgcgtgattgatacgaacattcaaaacatagagtcctcacttgccgagtggaaaaagaagaccgatcccgaaccggacatcgacccgatgacgagagcgtcccgggaacagatgcgggccgacggcgtcgtgttcgctccgttatatgcactcgtcgagttcgtggacggagtggaggaagacgttcaaaaacggattgaagccgcgctcatggacagcgggatgttagacgctctcgtcaccgaggcggacgtcacatacgaccgggtcttgttgccggcgccacagatgatggcgcatacgttggccgattatttgaagccgagcccagtagatacgggaattgcttcggaccgaatcgacgacgtgctccgcagtatcctcatcggtgatggcgagacgtccatcggagaagacgggacgtatcggctcggtcaattaaacggacatgcggtaccggtcgaacacgtccgtttccttgggcgaactgcccgtcaacgatatcgggaagcaaagattgaacagttacagcacgaaatcgaacaacttcaactcgagcgcgtgacgctacgtggtgagcaggcggagttgggtcaacacatccaatcggctgaagcggcgtgggaggcattcccgtctgaccgggatttgcggacgagtcatcaagaaatccaaaagatcagatttgaaatcgagagtttggagcgacgttgccgtcaaatcgaagacatgttgaaacagacgagtgagcggttcaacgtgttgaagcgtgaggtatatacactggctgagccgttcgaactagaaaagacgcaagtcgcgtttgaacaagcgaagcgggcgatggggagctataaagatttactactcgacacacatcgggagcacgacaacgcggtcgcctcgaacaaacggctcgacacgatggaggcggccctggcggaagcggaagaagacattctcgaactcatgggtgaattgaatgagctcgaggacaaaatggtccgggttcaaaaaaatattgcgcaaatcgaggaccaactggcgagagagggcgctgacgacatccgtcaacaaatccaaaacgtccaagctgaattggaacgaatcgaccaaaatctgaaggaatcttcacgacttgtgacaactcgagagacgcaatttgaagctgacaaggtcaagctagacgataaacagcatagccacacgttgtcaaaacagatgcgagtggcatgggagacggccctgaaagcggagtggaaacgaggaatcgtctcactcgacgtggacgggagtgatcccgaaacgttgtcccgaacggttgaagcggtgtacgggaaacgactcacgaacagcgcctcaaaagccgacgaacatctatcgaaagcgttcatcgaccagcaaaatgatttgatggaataccggatgcgtaacttcaccgaagaactgccgcttgaagcgtggatgcaggtcgtcgatgagcggttcagacgagaagtcgagatgtggcaacagaagacgacacgccgcatcatctcgctcgacttgcggggccagcaggcgagcccgcaagcggtcaaacaaacggtcgaggaagagttcgctcggcaagagagcgtcttgaacgagagtgataaggaactatatgaagagatcctcttcaaatcggtcgggacgaaactccgttctcgaatccgccgggccgaagaatggaccggaaaaatgaatgagttgatggagagccggaatacgtcatcgggacttacgttctcaatcaaatggcggccgcgtacggcggagagcgaagaagagctcgacacgaaagacttggtccacatcttgaaacaagatgcgaagctgttgaaggacgaggatttcgaacggatcacggcccacttccggtcaaaactgagtaaggcgaagcggatgattaaagaagacggcaaaggacagacgctcctgcaagtgctccgtgaagtgctcgattaccggaagtggttctcattcgtcttgtacttcgatcgaacgaatgaaccgaaacgcgagctgacgaacaataaattcgataagttcagcggcggggagaaagcgatggcgatgtacatccctctcttcacagcatgttactcccgatataaagaagcagccgatacggcgccgtatatcatctcgctcgacgaagcgttcgcaggagtcgacgagaacaacatccgtgagatgttcgagattgtcgagcaactcggtttcgactacatcatgaactcgcaaatcctgtggggcgattacgatacgatttcgtcgctgtcgatttgtgagctgttgcgtccgaaaaacgccgactacgtcaccgtcctccattacgtgtgggacggcgagaaacgtcatccgaaagaagagacgctgttatga

SEQ ID NO: 50809 - DNA, 1278 bp, Exiguobacterium sp. AB2
atgaagccgttagtcgacgaagccgtacactacttcaaagcatcgacaggcttctcgcgtctgtttgaacagttccggaagaagtatgcctcgctcggaaaagttggtggatcggtttcgattcaatcatttaaacatgatgaacttgaagcgattgcccgcttcttcggagaagacgtcgcaacgatccggttgaagaagacggtgacacttcgagcgttcgagaagaaacttcagacgaccaagtttgaaggcgtgacgttgctcgagttgctcgaggcgtatttcggagaagcgcttgtgacgaaacaagaagcgcttgcccaaatggaaggacagcgagcggagcgttttcgtgagctcaagctgacgtatccgaccctcacgttttggttcacttatttagaggggcgtacggcagacacgcactggatcaatcggatggttgagacggataaatttgacgtgtcttgcgagcaactgtcgcaagcgatggaacggttgccacttgattatgagcggctgccagtgttcgggcaacgtatcctcggcaatccacatgcgttcgaccgtacaacagatctcgggaagctcctcatccatgcgttgcatattaaacggggacagattggagcaccaccgagcgatacggaacgggtaaacgacttgttgttggaatttaagttgttacgggacgacattactaattttgtgacatgtgcgaatgtgacggcggagcgtgaggggacggagcatccgatgtggcacggggcggcatggatgcatagcgtcttgaacgtgccgatgcgtgagctgttgaacgtagaccgggtgagaccaagccgaggacataccgtatggatcgtcgagaactccggtgtgttctcaagcttactcgatgacgtgccggatgcaccgctcgtctgtacgcatggtcagttcaaactcgcggcctatcggttactagatgcgctcgtcgcatcgggttgtcagttgaagtacgccggtgatttcgatccggaaggattacagatggcggcacggttgaaagaacgctacggcgacaagctcgactattggtgcatggacttggagagttatgtggcgtctgagccgagtgttgagttggctgaggaacgattggtgaagttagatcgggtgacggacgtggagttgcaagacgtggtggaagaaatgaaacggcgagggagagcggggtatcaagaggctttggtggagaagatggtggttcaattaaaatatagaagggacagatga

SEQ ID NO: 50810 - DNA, 1452 bp, Rhodococcus erythropolis R138
ctgaagctgttttcgttcacgatcgcggaaaaacgggccgagtacctctgggtacttcgtgccttcgaccatgctcgcgccaactacaccgtcctgctgcatgccggagccgtcgcgcaaatcctcgagaagatcggtggatcggatccggcggccgatctgtcggcagcagaggtcactcccctgttggatcagctccatgtgtgggagatcctcgagcgcagctacgacggcacccgcgcggccacgctggccgagtaccgcaatcgccacttcgtctaccagttcggtcaggccggataccaggtctatcgatcagtcgaagacgtactcgccgcacgcctggactcggcctcgctctcgcgcctcgctctgccggacctgctcgcagacatgtccgaactcgccgaggccaaccgaagctccgacggcgacctgatcttccgcaagctcaagcgcctcgactcgacactctccgacatggccgatcgagccgcgcacttctatctgaccctcggggacctcgtacggaccacggagatcactccgcaggctttcctcacgcacaaggacgctctgctcacgcacatgcgggagttcagctccgatctggcgcgctacgcccccaagctcaaggaagcgatcgagcacgtcgaatccaccggggtcgatcgcatgatccgtctcgccgccgccagtgacgaacgggtgttcgtcccgatcaccgaacgcgaagacgactgggctgcgcgttggcgaggattgaccgcctggttcgtctccgcggaatcggggatcagcgagtccgagcgtctacgtgagggcacgatgagcgcgatcgccgcggttctggcgctccttcgccgcgtcacggaaacccgtcgcggcggcgtcagccgcgagagccagctccggcacctcgccggctggttcgccgccacgccgtccgaagacgcagctcatgctctgttccaggcagtgttcgacctcggccgtccacgccacctctcgatggtgcatccggacgccgacatcatttctcactcacgttcgtggtgggaggcaccgccggtcgagatcgcgcgaacactcgccgaaaccggtcgcccgccctcacccggattgccgagcaaggtcgcccgcaacgacggcagcatccgccgtctgcgcgaagagcaattggcggcgcaacgtacgcgcagcgccgcggcgcaatcactcgcgtcgaacggcgtctatcagcgtgaactcaacgagcaggagaccgaagttttgctgagtctgctcaatgcagcactgaccgcgcgtgttccggtggtgggacgcgtcaagagttccaccggtagtgagaacggggtgaagctgacgctcagtccctcggacggttcgaccaccatcaagaccgcccgcgggcgtatgcacctcgacggcatcgaggtcagtgttcgatga

SEQ ID NO: 50811 - DNA, 1443 bp, Rhodococcus erythropolis R138
atgagagctcgcgagatcacgccccttgccctcgactcgtatcaacgcgcggcgcgagtgatcctgtccaaccacctgatcacctcgacgtacccggatcgaattgcgttgccgctcttgcgccgttgggccaccgagctgcgtgacgacctactcgaactgttcggctaccgcctcgaggtgacggagaccaccgcgcgcctgttcacggtgtcggatcgactcaacccgtcggcaccggcccgaactgcctccgagcgaaccttcgatcgcacgcgttacgcctacctggcactgtgcctggccgcgttgggccgcgccgggaaccagatcacgttgtcggagttggccgatcacgtcgcggccgacgctgcacaagtcgacggcgtcgaactctccaccgatcgtgcgtcggaccgcgacgccttcgtcgacgcagtgggctggctcggcgtcagaggcgccatcgccctcgccgacggtgacgcaaacggctgggcgtccaatcccgaagcgggagaagcgctctacgacatcgaccgttccgtcgtcgtggccctgttccgtccgccgcgcgccctgcagcacctccactccatccgcggactcctggccgccgacacctcgagcgctgccgaggacgacggaattcccgtggacgcgaaagagatcggacgccgagtgcgtcgggctctcgtcgagcggccggtcgtactggcgggtgaactcgatcagcacgaattgatcgcgttggcgcagcccaagaccgcgtcggaagtcgaactcctgacggggttggtggccgagcgtcgcgccgagggaatcgcgatgatcgatcccaccggtcgcctctccgacgtccgcttcccgagcaccggaacgatcgcccaggtagcgctactcctcgccggcgagattgccgaccgcgtgctcgacgtcgacgctccggagctgccgaaacttccgatcccgcacgtgtcggacgatcacctgatcgaacaactcgatgccgccatccccgaggccgggatcttcgaggacctcgccgacgaggacgacgatttcgtgctgcctgccggcgaaccggccgagcccccggaacccgtcacgtacccgatgatcgacgacgactggctcgccgacaaggtcaccgagttggtggaccagttcggacgcacgtttgcagcgcaatggcaggccgatcacaacgggctgcgcaagcaggcgctcgggttgctgcaacgtctgcgcctgacgcatgcggtcgacggcggcgtactggtgttgcccgtcctggcccggtaccgcgacgtcgtggtctccgtacgcgaacgcaatcctcagatcgacttcgcggtagacaattccgcaccggatccggtcgacgaattcggccccgaatcttccaccaacggcgaactatcagaggtagagaacgtatga

SEQ ID NO: 50812 - DNA, 4176 bp, Rhodococcus erythropolis R138
atgagcaacgcccgcttccgacctactcgggctggaatcatcaacctctgggattaccgagaccaggagttctcgttcgccgacggtcgactggtcctacgagggccaaacggatccggcaagaccaaggccctcgaggtcttgttcccgttcgttttcgacggccgcatcgaaccgcggcgcctcaaccccttcgccggtgaagagcgcacgatgaagtccaacctgctctaccggggccaggacagcgcgcactcctacgtgtggatggagttctgccgcggctccctcgaagatcccgagtcggtgaccgtgggaatcggcatgcgggcaacccgcaccaacgacaaggtcacccgctggtacttcgtcgccgacggccgcgtcggagtcgacttctcgctgatcggcaacgacgatcgtcctctcaccaagaagcagttggccgaacaactcggcagcgattccatcaccgaccgtcccctcgactaccgcaccgcgatcgacgcgcgaatgttcggtctcggagtgcagcgctacgaccagctgatcaatctcattctcacgcttcgccgtccccagctcgcgaagaacctagatccgaagggcctttcgcaagcgctcaccgacggcctccgtccactcgacgaccaactcgtcctcgaagctgcgcgttcgttcagcgatatggaagaggtcggccgcgcgctcgaggggctcgcagccgccgatcaggcagcgcagagtttcatcagcgtctacaccaagtacctgcgtcagcagtctcgcggagagatcgaacaggtcagcacccgcctcgcagcggtcaccagaggcgttgccgccatggacgagtcgtcgctcgcccagacccgcagccgtgaggcccgggcagcagccgaggagcgcttcaaccaggccgagcaggcactcgagaacgcgcgcgccaatgtcgaagcgttgcaacgctcgagcgcctacgaaggcaaacagcaactcgacgatctcgcccaggccgtctcgacgctcaagctctcgaccgagcaacaggcagacaagtcgaggaaggcgcaggctgcactcgcgcaacgcggcgacgaagccgacaaggctgcatcgtcggtcaagcgtgcagccgaggcactctcacgtgccgaggacgaactgcaggcagccgccgaggacgccggcatcgtctggactcccctgcccgacggctcacgcagcgaccagatcaccacagcagtgcgtggccatgccgaggagcgtgacggcgacgtacgcgtagtccgcactgcgctcgcgaccgtcgagaaggccgctaccgaacgaacccgggccgaaaacagctcgcgccgtggacaagagctgctcgaagcgtccaaggccgctgtgctcgaaggcgaagctgccgtggaactcgcacgcagtcagtgcgccagtgggctgcgcgcgtggtggaccgatcactcctccctgttttcggctgtcggcgccgacacctcgctgttcgaggctctcgacgcggcgctcgccgaagtcggcgacgaggacgctccggcgctgtccgcagttctcaccgagcacaccgaggcaggcaccgagacgctgcgcgagcgacgtcgtgaggccgaagctgaaatatctgcatcacacgcctccatcgcagctctgaaatccgagcgcaaggccgtctcggcggaacacgacgacgctccgccggccttccacgcacgcaccgacaaccgcagcgatctgggtggggcaccgctgtggcagctggtgcgcttcgccgactccgtcgaaccagacgtggccacgggaatcgaatccgcactccaggcggcaaatctgctggacggctgggtctgcccggacgaaacgattcccgatcacgtcagtgagcagttcctgaccgctctgccggtcaagcagcgcccgaagggacgaacgctggccgacgtcctcgaggtcgaaggcaatgccgacattcccgacgctcgggtacaggacattctcgggtcgatcagtctcgtcgaggcgccgggcgactccgatgccagcgtcgcgatcggcgtcgacgggcgcttctggcagggcgtcgcgcggggccggcacgtcaaggccgacgccgagtacatcggcacgacagcgcgggcgcgtcgacgcgaagctcggatcaccgagatcgacgcggctctggaagaacttgccgcggcagtcgatgcagccaaggcactggtgacgcagaccaacgagcagctgagccgaatcaactctgcggcaaaggaattgccgaagacaggatcgatcctccgcgcactcaaaaccgtcaccgaatccgccggtgcactccgcactcgctcggaggccacggaaaccgcgcaacgcgaactcgatgcggcgatcgccgatctggcggcgaaggaaaagcaactccgggcgacggcgtcgcagcaccggaccccgcatatcggccgtgaactcgactccctcgcggcggcgatccgtcatttcgagaagcagggcgaactggcgctgcgctgccgacgcgaacatgccaaggaagtcgaactcgaacgcgagtctcgcgaccgtctcgacgaatcacgcgccaatgcggaggaattcgccgaggaagccgccatcgccgaggagagtctgcttcagcaggtccagcgcctcgagacactgcgcgacaccctcggggccagcgccgagcagatcgacctcgacctggcaaaagcccgcgcgaagatcgaagaatgcaaggtcgaacagcgtgctgcgcgaaaggcgtacgacgctgcggtactccagatcggcacggcagagggtgcgtacaacaccgccgtcgagacgttgcgccacaccctgaccgaaacccgcagtgatgcagagcgactcgcaccctatgctcgcccggaccttctcgagttgttgggcgtcaaggaacatctgagctggccggcaagttcagcggcgtggatgagccccgatcagttggtctaccgcatccagaacgaagaccgcagcgaggacgcggcccacccgcccgtcctccccgaagacgtcgacaagttgtaccgagcgctcgaggctgcgacctcggcggtacgcgtcaccgacggagcccgcaaggcaacccgcacggcactgacctcggcgttgcaggacttcgacgcccaactcgcggcggccggacaggactaccgcctgcagtgggatgcaccggacggactgaccgtcgtacgagtgcaggacgatcagggctattcgtcgatcggtgaattcgcaacgcggatccacgatgctcgtggcgatcaggagcagttgctcaccgaatccgagcgtcgcattctcgaagatgccctgctgaccggattggctcagcagatccacgagcgcacggtcgacgcacgcgtgttgatcgcacagatgggcacggagatgcgtgagcgtcggatgtcctcgggcaacaccatcggcgttcactgggtgctcgccgacaacctcgacgacagctcgcgggcgatctccaagctgctggatcgagacgcgtcggccctcggcgtcgatgaactggctactctgcgagctcatttcgcgacccagatccgtaccgcccgcgcggcgcaccccgaacgctcgtacccggaaatcctgtcctcggcgctcgactacaggcagtggcgcgtgttctcgttcaccctcatcagcggtgagggcaaggaagaccgccttaccgtcgcgcggcacagcgcgctgtccggtggcgagcagtcggtttcgctgcaccttcctttgttcgccgcggcgcacgtcatgctggactcggccgacccgcacgccccgcgtctgctggcactggacgaggccttcgccggtgtcgacgacaacggacgcagcgagctgctcggcttgagcgttcagttcgacctggatctcttcatgaccggctacgacctgtggatcacgtacgcagacgtccccggctgtgcgcactacgacctcgcgcactccacggccgaacaagctgtcagcgccgcgctgctggtgtggtcgaacggtgagctactcgccgagcacgacggaacggatctggcgcgggcattgggctcgccgctacggcgccgggtgccgacaccagccgaaggtgcgttggactacgcctag

SEQ ID NO: 50813 - DNA, 1479 bp, Clostridium litorale DSM 5388
atggaaataggggaaaagcttttaaagcagcttacggaggcaaagtacctctgcgttgaaaactcatggaggtataggagcataataaggtttttctacattgaatatgaaaagatgaactattggctatacaaggaggacgtgctggaagcgcttatcagcagcgaaaggttcaaggactacactgtggagcagtgcaggcaggatcttgacgctctttgcgaatggggcaatctcgtgcccgttcaggacacgtccaaggccatgacaatagaggagtttaagaataagcagttcaggtatcagctctcgccatacagcgtggagatagagaggatggtcataaggcttgaaaacctgaaggtggaaaatgcttcgcttgagccaactctgcttgaaaggctcaaaatggaaattgaaaaatttgaaatgatgagcgacaagactcctcagcaggtagggatatggtggaacaatctgaatgaggatttcaaaaggctcaaccagaactaccaggactatatacgcgagctttgcagcataagggcagaagagcttatgaaaagcagggagtttttgatattcaaggacaagtttatagagtatataagaagctttgtaaaaggccttcagaccaattcgtatgcaatagaatcggtacttaaaagcgtaggaggagagtgtgaaagggctgtgttcgacaaggtgatcgagtacgaaatgtccattccgaggatagaaaacattgccacggaacaggagatgatggagagcatatcgggaaggtggcacagcataaagaggtggtttctggggcagggagctcacgagagcgaggcgtcgagactttttgagaccacaaacgacataatcaggaagataaccaggtttgcatgccagataatagatacaaaaaacagtctggcaaacagaaaagaggagtacaagaaacttgctgaaatgttcgtctcgtgcaatgacatagatgatgcacataagatatcgtctctcgtgttcggcctgttttcgacaaggcacataaggggtgatatagaaaggcagagcgagagcacgagcagcagtgtgtatgacgaagaggcactggaagtcactataaagcctagggtgaggacattcagggaaaagttggttagaaatgcaatatccgaaaatgaagacagaaaaagggtaatgagggagaaaataatggcccaaaggctccaggaggctgaaatactcagggaaattgtaaatggaaacgagatagattttgaaagtattggcaatatagagccgcacataagaaacactcttttgaaatgggtggccaaggggaactcctcgaaaaacaggagggcgaaaactgacgaaggggcttcatttgagcttgtctatccggcagacggcagaaagtgcactctcgagtgcagcgacggaaagtttatcacgcctgcctacaaaataaggtttgaggggtga

SEQ ID NO: 50814 - DNA, 1155 bp, Clostridium litorale DSM 5388
atgaagatagttgacatgatgcttgaaaactactggatactcaaggaagacgacaaggacgcatactattacgccaaggacaatgtctccaaggtaagggagtttttctcagaaaagctcggatatcaggtgatagtgaatccaaccctcataaagcttgaaaagcttcccggagctttggagtgctggatgggcatagacggatttgaagactgcatggagtatgcgtttctttgcatgctccttatgtttcttgaggacaagcccggcggggagcagtttctcctttcgcagctcacggaatacattgagggtgttttcacgggagacggaaaggtcgactggacgctgtaccgccacaggaggtttattataaaggtcataaagtttgcgctcgaaatggggatgatacggctcaatgacggaagcgaatcagactttgcgtccgacggagccgccgaggcgctgtatgaaaacaccggcatatcggtatatttcatgaggcagttcacggggaatttcatgtcatacggcggaattgaagacataatgggcgacgagtggagccatatggatacggagcggggcaggataagaagaaacagggtgtacagaagactggtaatgtcgccggcggtatacagcgaaggtggagacgattccgactacgaatacatcaaaaacttcaagggagttgtgcagtcggacatcgaggacaggctttcagcccagctgcatgtgcataaaaacgcggcattcgtagtgctaccccaaaacaagggctacaggggagtctttccgcaaaacagcgcactgagcgatattgcccttcagatgaatctgatcataagggagcatgtaaatgaaggagttctcaaggtatcaaacgacgatgtgatcagggtttcgcagtatgagttcaaggggattgtcgaaaagctcaagagaaggtttgtgaagggatggagcaaggagtacagggacatgggatttgaaaaactgtatggcagtatagttgaatacatgaagagtttttcaatgataagactggaagagtatacgggagatgtccacataatgccaatttgcggcaagatagagggaaattatcctgaagattttgaaaaggcggcaggtgaaaatgatggcaaataa

SEQ ID NO: 50815 - DNA, 4116 bp, Clostridium litorale DSM 5388
atgatggcaaataacggcgaaaaaaacaggtggagcataaaccgggctggacttgtgaatttttggtgctacgatgacgaggcgtttgaattcgaggatggaaacattctgctaaggggcgccaacggttcgggaaaatcggtcacaatgcaaagttttgtgccacttcttctcgacgggaacaaaagccccgaaaggcttgaccctttcggatctagggccagaaagattgaaaactaccttataggcgagaatgactcgtcgaagcaggagagcacagggtatttgtatatggagttcaaaaagaaggagagcaaaaacttcatcaccataggaatggggcttcacgccaagaggggaaaggccctgtcctcttgggggttcataataaacgatggaagaagaatcggaaaggattttgaacttgtcaaaaagtcaggagggaggataccccttacaaaaagagagcttaaaaacaggatagccgagggcggccaagttttcgagagccagaaggattacatggacggggtcaacaggcatcttttcggattcgacagcatagaagactacgacgagctgataaagcttctcatacagataaggaccccgaagctgtctaaggagttcaagcccactgtaatatacgacataatgaacaattcacttcagcccctttcggacgaggatttaaggcctatgtcggaggccattgaaaacatggacagcataaagggcaagcttgaagagttgaagctcaacaggaaggcggcccagaagctaaaaagggcttatgaccagtacaacatatatgtggcgctcgaaaaggccaaggattttgcaaaaagcaagagcgagcttgaaaggctgaaagaggagacttcagaacttgaaagacaaagacatgggcttttggatgtggcggaattcgaaaaaaggaatctggagagcctcgagctgaaaagagagacccttgaagcaaaaaaaagggagctcgaaaagcatgatagctatgagctaagggaaagggcctcgaggctcgagatggatatgaaaaggcttgaggatgaaaaggggtcgaaggaaaagcttctcgacgagaaaaaatcgaagagaatagtcatggacggcgaagtcagagaaataaaggcgagaggggagtctttcaaaagtgacatttcaagaaggcttttggaaatggatggtattgcgcgggagtttgactttgacgagcacagtttcatgaaaggcgaaattgaaaaggcatttgaagaggagtatgatttttcatttgttgaaaaccagctcaaggtacagtgccaaaagatacacgacgcgaaaattgctcttcagcagcaggcgggtgacatcagggagtacgacaggcttttggagaaattcgccaggatatcaggggaacaggagcaaaaagagaaaaagctcgacgagtgcgcgcttctcttttcggaggtgaagggggagtttgtggataatgcgcattcgtgggagaaaggcaacacatatatcaagattccagatgcggttatgggtgaaattgcgcaaatggcacagggctacggtgagaaattctcatacaatgaaatatttgaatgcatgaggggtgcatatgaggatgtaagaattcacgagtcaagggaaagggaatcagctttggcgaggcttgacggaattagggaggacattggagaaaaaaacgggcagatcgaaagctggaagcagatgaaagaaccgcaaatgccgcttggagatgaggtcagggagaatataagaaggctcaaagaacttgaaatccctcacattccgctttacagggcgattgatttcgaagaagggcttgcagagcgtgatatgggaattatagaagaggcgcttgagagcatggggcttttggacgcccttataataccggacgaatacaaagtggaggccttggcagtacaggagggaatggcgggcaagtatgtcttctcaagccagagccatgcgtttaagagcagggacaaaaggataaaggcggatgagagcctggggggcataattccatctgaaattgtggacgggctcataggaagtataatggacggaaatgaagaatccatatcatttgtggatgaatcgggacgctatggaataggccctgcagagggtgttgtttcgaaacgggtaaatgcgaggtatataggggcttctgcaagggagcggttcaggaaggaaaacataaaaaggcttgagtcggaaagggatgtactcgagcttttggaaaaagaggcgtcattggacatagcacgaagggacgagattttaaagtcaattgaaaatgaaaaggattcatttccgggtggagctgacatggatgttgctcacaaggcgattatagcggcgagcatagagcttgaggttgcacaggcggcttatgaaaaggctcaggcagaagagcaggacgctatgaagaggctgcaaaaatccaaaaaagaagtctatgaaaaaacaaggaacatccaaattcccgtaaacctcgacagttacgaggaggctgttcagtcggcaagggaatacgagagcgaactttcaaaggtcgaagtcctgcactcaaaattcatgggagcagtttacgacatttcgagggtttcgaatcagattgaggatataggagtcgatatagacaacctggcgtatgactttggggagattgagagaaagctgaaatggtgccgtgaaaatatcaaaagcctcaaagagcagctggagctttcgggttttgaggatgttcaaaaagagatagcccagtgcataaaggagctttcgaacatacccgagcgcataaaggattctgttgggaaaagggccagggcagaggagggcgcaaaggggataggcgaaaagatagatgcaaacacaggggatatcgtattcgcacaggctttgtgcggcatacatgaaaagggctttgcaagcgagatcaaccttggatatgtgggtgagagcttatccgaagacggcctgtttgaaagagcagtgagtatgataaaaaggcttgagggtgaaatattgtctcaaaggggcatgaacgagcacatcaaaaacatacaggagaaataccatgacgtcaagcagtacatggcggaatatgcgctgaaaatagacaatattttcacgccggaaaacgagtatgaggacgaaaggctccaaaaggcagaaaaggcccaggaaagactcgaaatacagggaatggtagggggccggtatatagggttttatgacgttgtaaaacacatagactaccagatagaggaaaacgacaagcttttcaaggacagcgacaggcacatattcgaggacatactcgcaaagaacataagcaggaagataagggccaagatataccacagcgaaagctgggtcaaaaagatgaactctctcatgcagtccatgaacacatcgagcgggctttcattcagtctggcatggaagagcaggggggcgcaggacgaagagcagatggactcgtccgatcttgtggaaatactcaaaaaggacggcgggcttcttttggactcggagctcgaaaggctttcgatgcacttcaggtccaagatagaccaggtcagaaggagcatcgaggaaagcggacagcaccagacattccactccataatgaaggaggttcttgactacaggaagtggttcgagttcaggctctactacaaaaagactaatgaaaacaggagagagcttacaaacaacgctttttacaggttcagcggcggtgaaaaggccatggccatgtatgtgccgctcttttcggcggtatatgcgaagtacaagggggcgagaaacgactgcccgaggataatatctcttgacgaggcttttgctggagtcgacgagaacaacataagggacatgttcaggcttttgggggaactcgagctcgaattcataataaactcccaggttctctggggagactatgacacagtggatgcacttgccatatgcgagcttttaaggcctgacaatgcggattttgttacagttctaaggtacaggtggaacgggattcaaagggagattgttgacaatgaaatgcagtaa

SEQ ID NO: 50816 - DNA, 1353 bp, Clostridium litorale DSM 5388
atgaaatgcagtaagtctgatgactcatacaacggccttgtccaaaaggccgcgggatacttcaaaagcagcaaggggttcgacaggctgtttgaaaagatgaaagataaatacaggagcatgggaaggataggaggcagtgttaagcttttggaccttagcgaggaggagaaggaatccctcactggccttttgggaaaaaactgctacaagcccagaataagtatcaagctggaaaaggtccaaagcgcccttgaaaatactcctttttcaggagtctcacttgtggatttgatatgcgaatattttgaagaggacgtactgacaagggaagctgaaaaacttatgcatgagcgccaaaaggatgaatttttcgaagagatcattgaaagcttcgcagggtcttcctcctgtgaatggcttgtcaaggcgctcagcaacggcgatgccggacgcaggacaatagtgaaaaggtataatgccgacagggtcgctttgaggcatgatatacaaaaggtgatgcatgcgctgagcaacctccctgaaagactagggaaaaaacagcggcttgcgatatttgcatctgaatggggtgacggcccgcatgacttcgacaggggaggtgaatgcgacaagctgtttatgcatgcattgtcggacatatacggcgagaaaatcccccaaaatgcagaagaaagggcgtaccttctctacggggctggaatagtgattgatgaggtttcaaactttactatctgcagcggcattgtcggatatattggagaggaggaacatgaaggctggatggggttttgtcaaagaggtgagccccttcaggtctcggtatccaaccttgggaatgtagacagtgtggaatgcagattcgacagggtgtttgtggtcgaaaaccctgcagtattcagcgagatacttgaatgctcaaacataaagagtccgccccttgtgtgtacattcgggcaggtgaagcttgcatcattaatacttctcgatatgctgtctgcccaaggaacccagatatggtattcaggcgattttgatcccgaaggccttcaaatagcaatgaaacttaaggaaagatacggcaaggggtttgtattttggagatatgcatcttgtgactacgagaaggctgtttcaagcatatttattgaccccgcaagaatgaaaaagctaggcggatttgaaaatacggagcttgaagatatagcaaaagccatagaaaaaaagggatttgcagggtaccaggaaaatatagtgaaagagctaatatgtgatgtggatggcctggctgaggggaattgcaattatgctggaaatttagaatggagatga

SEQ ID NO: 50817 - DNA, 1476 bp, Bacillus azotoformans MEV2011
atgaagaaaattatcgaagcaagttatctaacagcagatagcgcggctcattatcggactattttaagatatttttatcaccaacatgagcggatgagagattatatttctccagaagaattactagattatatgcgttccattccagtgttcacagattatcaggaggaacagctccatcagcagctagctcagttagtgaaatggaacaatttaatcgcacgtcaggatatgaccaacgcgaaaacgatagaagaatataaaaagaaaagattccgctatcaatgcacaccgtatactgttgaaattgaaagaatgctagtccaattagaaaaaatcggtgatacttttcaaggctctctagagcgttcacaatttgaccgtcttcttcaagcattaacttccttgcaaacagaaatagaacacgaactgaaaaagccggcagaagagtacatgcggatatgggaggatgtctttcgttattttcaatcgatccggacaagcacggctgactatattgcttatattaacagcgaacagacggaccaacgtatgcaaacggaagcttttttagtctataaaaatcaatttacaacgtatttgcgggattttattgtgtctttgcaaaaaacttcattacaaattcagcaacttttaacagaattagcgactgtaaaaatgcaacactattttcaaagactgattgatcatcggatggcgattccacgtctggaagatgtatcgacttcaaaggaagattggttgctagagtatacagaatattggggttccctaagacagtggtttttgggttcgacccatcatcaaagtgagctcgaagttctgcagtggcaaacaaatgaaatgattcgcagaatgacaaggtatgtgcaacggatcggtgaaaggcagcagcatttccggagccgaaaaaaggattatttgcaactggcaaaatggtttggagaaagcaagaacttgaacgaagcccataagttgtcctccgttgtatttggttcgatgacaatcaagcatcttcagcttgaggaagggactacggaaaatcttcacgtcgatccatgggatgaaactccaacagagttaacgattaaaccgcgaacgacacgttatcgggaaaaaacaaagccgggatcgtttcagaccaatgatgaaaagaaaagagaacaacgcaagaaatacttagaggaacgcgaccaagagaaaagaattatcgaaaaatatgtgacacaaggtaccattgaactgtcttccttatcaacagtagagccattcgtgcgtaaagtgctcttaggctggattgggaaatcaatggcaagtaaagatcgcatcgtaaagacagattatgggttccatgtaaaagtcaaacttaaacaagatcaaatgataacgttaaaagcagaagatggcgatctcacaatgccgaatgcaacgatagtatttgaagaaatgaggtga

SEQ ID NO: 50818 - DNA, 1161 bp, Bacillus azotoformans MEV2011
atggaacaaacgcaactttttgatgaaaaagcaattcagggaatggatctattgttccatcactactggattttacgggcagaccagcctgaatggtatcaattaattcgtgaacgcgaaaaagtactgcgccgctatattagtgaaaaattcggtttacgcttaatcatccatcaacattttattaaattggaaaagattccagtagaacccgaaagttggatggggattcaagattttcaagaacagatggattatgcgattttttgctgtgctttgtcttttttggaaggaaaagaagtggatgaacaatttcttctgtcagaattatgtcaagatattcaagctgattatccaagtgattttccgttggattggacggttttcacccatcgcaaatcattgattcgggctatcaaagttttgcttgattttcaactcattcgcacgattgatggtgatatcggccgttttgaccacaatgaagaacaagaagtattatacgaagcgactgtgtacagccgttattttatgagaacctatccggatgatttttctaattatgaatattgggaagaactgctgcatgatgattggaaacttaatcaggaggatgagcggcggaagcgagtataccgtaaactatttttctcaccaggcctgcagcgtcaggaccaacaagaccaagactttctatatattcggaatttcagaaaccgcttagcggaagatattgaaaagcatagtgactataagctgcatgtctttaaaaatactgcctttttatcaatttcagaagcgaggcaatatcatcagctttttccaaatacgaaggcatcaacggatttaattttgcagttatctagttattttcatagaaatctacaacgttttcaacctaatgaaaatggggaattattggtgacgattggagagtttgaacaaatcattgatgatttgcgaaatcaatatggcacggggtgggcgaagtattttcgggatatgggctcgaatgcgatttgcagtgaactaataagtgcgatgaacgactggatgatggttgaggaggacttttcatttattcggattcgaccactggttgggatcataatagggaagtatcctgctgattttaaaggaggagagaagattgatgactga

SEQ ID NO: 50819 - DNA, 4143 bp, Bacillus azotoformans MEV2011
atgactgaatctagatggattatgcatagggcgggtctattaaatttttggtattacgatgatgagatttttcaattttcggagggaaagcttctgcttcgaggcacgaatgggtccgggaaatcggtaacaatgcaaagctttttacctgtactattggatggaaaaaaatctccggatcgtctcgatccgttcggttcaaaggcacgtagaatggaggattatttacttggggaaaaagaagttgtcgaccgtgatgagcggacgggctatctttttttggaatataaaaaagctggcgttgaaagatatatcacaacagggattggcatgcaggcgaaaagaaataaaggtatcaaatcttggtattttgtaataacagataatcgcagaattggttacgacctagaacttgcacataatcagcttggagaccgcgttcctttttcggcaaaagaactagaaaaccgcattggtcaaggtggatatgttgtccattcacagcgcgagtatatggagctagtgaacaagtatatctttgggttccaatcattagaagcctatgaggacttaattaaactattaatccagttgagaagtccgaagctgtcaaaggattttaaaccgaccgttatttatgaaattttagagtccgctcttccgccactgacagatgatgaactccgccatttatcagatacaattgaaaatatggatcaaacggagcaacagcttgagcagttagagcgggaattcgagtccagcagtcgactagtaaaacagtatgatctatataatcaatacatcttggcggaacgttccggtttatggctgaatgcaaacaaacgcaaggaagatgccggcaatgaggtagaacggctgcatgctttggagaagcagtttcaggctgagatagaacaacttaaagcagacaaaaaccgctttactttgcagaaaggagttgcagaagctgaaaaagagcggctgcaaaaccatgaagtttggaagcttgaaaaagagataacaaagaagagagagctagttgaacagttaagacaagaaatcaaactcttagatgatagatggaataacaaaaatgaacagtatcgcaagacaaggaatgacaaggataaaacggaagatgaacttggagtacagcaaaaagaaatctctgaaattcttgaggagttgagattggatgctgaggaatcggcctttcaacagcattcagtcaatgcggaagattttgaccgccatcaacaaactgaatttgatttttcggtttggattaaggaaataggagaacatgaacgattattaacggcgttgcaacaattggtcgatgaacagtcaagattacttgaggaatatagcagattagaacgtcaatcttcagagaaaaagaaagagattgatgaagtccggaaaaatcttgaccaccttgaagaatggtttactgaagtgaaacaaaagctggagcatctcgtgttcacctggatagaacaacatccaaaacttgtcttttcaccagaacagattcaggaaatttctcgtgccatcgaaggcttatatgaagaaaatcgctacgaccttgtccgtgaaaaactgtttcatgttttaaatgattatattgcccaacttaaaacagataagaaattaacggaaaatgcgatccaggctaaagtaaaagaaattgaagaggctaaagctgaattacaccattggaaatctctaaaaatgccaaatcctgatcgtgcaaaagacactgatgaatcccgtctaaaacttactgaagaagggcaagcattccttccgttttatgccgctgttgagtttcaagaccatgtaacggaagagcaaaaagaacggattgaagcagctttaaaacaaacaggattattagatagtcttataactgaacaatctttgtcacctatacatgacagaatgttacgcacaaagcctgttgttctagggtatacattagctgattatttacgaccagacttggatgacgatagtccgatttcgaaaaaggtggtcgatgaagtgttacgaagtatttcactggagtcgcaagacggcggatttcatattgatgtggatggcacctattcgattggctgtatgattggacatgctccgaacgaaggaccatccaagttcattggtcgttcctcaaggaaacgatatcaattggaaaaagtgaaggaatgggaacagcaaattgaggaattagaatcccatttggaacaattaaagatggaattgcgagcattcgatcaagcactcaatgatgcagaagaatggaaacagacgatcccaacagatgtcgatctaaatgatataaatattcaaattgaaaaagattatcgtctattagagcagttgaaagaatcgttgcaaaaactagacgatcaatggaaaatcgtccatcaaagattagaaaaaatcaagttgcagttgcatcaacaaaaaggtcaactcaatctgtcgttaacaaaagaagtgataactgaagcgattgaagcggccatccattaccgggagcatgtgcataaactcaatcgaatctatgaaaaatgtttatttgggcgtaaaagaattcaagacttaacaaatagactgattgaactagaagaagaaatggatgaaatcaagggcgagcaaaatagtaaggaaggacaatcgaataaagaaaaagcagagattgcatcgattgaacaacaattacaattaaaagggattgatgatattagaagccgcatccaggaagtacagcatttacttacggaagcggataaggagatgaatcaaatccttcaatcactccctagaaaagaaacagaccgagatacttgcttgaaagacttagaaactgcaaaaactggctttgagttttggtcaaacatggctatagaatgggagaaccttgtaaagacagaaaccatgcgtggttttattaagttagagggcgatttttcagaccccgtgaatttggtagcgcagctggaaggaattgcagcaaaatttgaccgctcaaaattaaatgagcaattaacaaaaacattttttaatgaacaagcatttttaacagagtataggatgtttgaatttccggaagaagctgaacggcccgaatggttttcaagagattggggtgtgtattacgagccctttatcaatgaatggaaccaatataagagccggcgcttgattcaaatggagtacaaggggcaacgagtaagtccctaccatgtttttaattctttagaaaaagagttagctgaccaaaaaggctggctcgatgagcaggaccgccagctttatgaagacatcatcgtcaatacagtcggatcgatcttgcgaaaccgaatccagcgtgctgaaaaatgggtgcgtgaaatggataagattatggaagcacgtgataattcgtcaggattgacattttcgattagttggaaaccattaacagcagagtcagaacaagaattggatacgaaagatcttgttaagcttttacaacgcaacagtaaatttttaaatgaagaagacttaaatcatattacaaaacatttccgctcgaggattacgaaggcaaaagagctgatccagctgcgaaatgaaggctcgacgctgcatcaggtattgaaggaagtattagattaccgcaaatggtttacgtttgtgttatcgtacaaacgcgtcaatgagccaaagcgtgagttgacaaataatgcattctttaaatttagcggtggtgaaaaagcaatggcgatgtacattccgttatttacggccgcctattcacggtacaaggaagctgcagccatggcaccttatataatttctcttgatgaagcctttgctggggtagatgagaataatatccgcgatatgtttgaagttgttgaacagcttggcttcaattatattatgaactcacaggcgttatggggcgattatgatacgatttcaagtttagccatttgtgagcttgtccgcccgaaaaatgctgactttgtaacggtaatccgttatctatgggatggaaaaaagcgctcgctcgtatgggacgaaatgatgaatgatgatggtgcaggggaggaatttgttgaggagctcatcacaaatgagtaa

SEQ ID NO: 50820 - DNA, 1284 bp, Bacillus azotoformans MEV2011
atgagtaagagcgttcaagttttccgcaatgaaccaggttttataaagctatttatattgtttaaagaaaaataccgttcccttggaagagttgggggaacggtcagcattctttcttttacagaggaggaaatggaggcgattgctggttttatggggttaccagcttacggtttgctagaaaaagggaaagttgcattattagattttgaaaaagcactactccatacaccctttgcagatttttcgcttattcaattaatggaagaagttttaggagaaacgattctaacaaaaaatgaagaacatgaatttgatcgtgaaaagacaaacgatttttttaacacccttcaaacggtcttgcccgaggggatatggtggtgggattggattaagtcaaaacaacccgatacacggtggatttggtcactttacaaacaaaattcgaatcaattaatggagtatctactgaatgttttccgagcttttcttgaacttccgaagaacaattcctttgaaagactaccgttatttgcccaaagaacaacgggtaatccacattactttgatcaggatcaaacagcagggaaattgctcattcattgtatgtacgtcgaccaactacaaaatgatggtggaatattagagcaaggaatgccaaaatcgtcggaagaagtaaatgaattatttgcacaatatggattgatgaaagatgatctttggagctttgtcacctgcaatggtttacttgctgaagatgaaaacggaatccatcctgtatggcaagcagcttcgtcaaccaatacagtattgaatgtgccaataaaagaattgcttaaagtaaataaaatacgacctgtcaatggaaataaagtgtgggtcgttgaaaattcaggtgtctgctccacaatcattgacgaggtaccatctgcacctataatttgtacacatggtcaattcagatcggcaagctgggttgcgatggatcttcttgttggctgcggttattccatttattattcaggagacttagatccagaaggtatatcaatggcacaacgtcttaaaaataggtatccaaataatgtaacgctatggagaatggataaagaaagttatgtacaagctttatccgaggaagatgtaacttctaggcttgcaaaaattgaagtaataaatctaccagaattggaggagatcgtttacttaataaaacactataaaaaggctgcttatcaggaaggattcattacactactcattcaagatattttggaaacataa

SEQ ID NO: 50821 - DNA, 1623 bp, Saccharopolyspora rectivirgula
gtgacggccccggatcaccaagctgacgcgctgcgggcggagaccgccggtgcgctctcggccgagccctcccccgccgagcagcccgcggacgaggaagccaggctgcagctgttctcctacctgcaggcccccgagcgccgcacctatttggcgatcatgcggctgttcacctccacgctgctggccgacctgtcggccggtgaggtggccgccgcgctggccgacgtggagcgggagggccggatcgcccccggtgaatcgaacccggagaccgtcatcgaccggctcaagcagctggtcaagtggggcaacctggtggtcgggcgccgggagacgatcgcctccagcatcgccgagttccagcacggcagcgttcggtaccaggtgagcaagctggcggtgcgggtgcagcgggaggtcgacgtcctgctgcgggtgcccgagggcgccagggaggtgtcccgggagttgctgcccgccatcgaccgcggcctgcgttcgatcagcacccagctgtccgaggtcctggccgccgagcagcgggacccgcgggcgcggagcgtgcaacgggcccgcgaacagctggccgggcaggtcaccacggtgttcctgcagcacaccgagctcgccgccacggtccgcgacttctacgcctacctcggccaggtggtgaaccggcaccagctcgcccccgacgagatctcgggtttccgcaacctgctggtcgagtacatccagatggtggtcgaggacgtgctgcggcacaccgagtcgctcgcgcgttcgctgaccgacctggccgggaggcgggacgaactgctccggcagctgggccccgccgagcagctcggcggcgaggtggagcgggctcggggccgttccgcggcggactggcaggagttgaccgactggttcgtcgactcccccggccgcccgagccaggtctccgcgctccgggaggccaccgcgcgcgccatcggcgcgctgttggccagcgtcaagcgcgccaccgccggcagcgtgctggcccccagccggcgcggtgagctgctgaagctggccaagtggttcgacgaagccaccccggagcgggcggagcagctgtacgccgcggcgttcgggttgcactcggcgcggcacctgttcccggcacccgagtacgacgccgacaacgaggacgtgccgtggcgcgacggcccggtgcaggaggtgagcgtcagcgtgcgggcccgcagcgaccggtccgggcgcggcaagacctcccgggtgttggacgatccgatgaccgaggtggcactgcgggaccgggcccgcgaagcggaccggcggcggagcgcggcgttcgccgaactggccgcggcggcgtcccgcctgccgcagacccggttgtcagcggacgcgctggaggtgttctgcgagttgctcacgctggcgatggccgctcgggagcagcagaccggcaccgggtcggcgttcgacccggtgcaccgggtgcggttgacggtgagccacgctccggggactgccaccgaggtgcgcagcgccgcgggcagtttgaccttgcaggacaccgcggtgcggatcagcggtgaggacgtgagcactggggtcgccggatga

SEQ ID NO: 50822 - DNA, 1194 bp, Saccharopolyspora rectivirgula
atgagcctgcagttcgacggtttgagcaacatcgaccaggccaacgtggtgcactgcgcgcgggtgctgctgcggcgaccgctgctgcggccggacggcccggagggcgatctgctgccgctggtctaccgccaccgctcggtgctgcaggagatgttcgcccacttgttgggctaccggttggtggtggaacgccggttcgcccggttgtgcaagaccggtccggcgggcggacccagccgcggtgagccggggttgtccccgcgcggccacgcctacgtggcgctgaccttggccgcgttgaccggtgcgggccgccaggtgctgttgtcccggctggtctccgacatccgggctgctgccgcggaggccgggatcgaggtggtggacgaccagaccgatcggcgggcgctgacggcagcgctgcggcacctggtcgccctgggggtgatcgccgagacggagggcacggtttcggccgattcccaggaggaggcgttgatcacggtcaacaccgatctgctcggccagctgctcgtcggtccgctgggcgaggcgggcagcccggtggaactggtcgagttggccgctggtcagggcagtgccgaacaagcggtgcggcgccggctggtcgaggacccggtggtgctctaccaggacctgccggccgagcaggcggcgtggctgcgcaagcacggcgagcgggagtcggccaccctggagcggtacttcaacctggtcaccgagttccgggccgagggcgtgctggtgaccgatccggagagctacctgaccgatctggtcttccccggcgccagcacggtgtcgcggatcacgctgctggccctgcccgagttgctctcccggacgcaacctcgcccggacggcaagcatccgatcaaccggcggcttctcgacgaggtgtgccagcagctggtcgcggcctacccggcggcttgggcgcggcaggccacccaggatcccgagcagctcgtggacgaggtcgtcgatctgctcgaccggaccggcctgctgtcccgggagggcgagcagtggctgctcagtccggtggcgcaccgctggcgaccgcacccggacgccgcggcggcaccgccggaggcggaacggcctcccaagcccgcgccgcagcccaggtcacttttcgacacgacggacgaggacggtcaacggtga

SEQ ID NO: 50823 - DNA, 4071 bp, Saccharopolyspora rectivirgula
ctgacggcgcgctggcggctccaccgcggtggcatcgtcaacatctggcagtacgccgaaaccgagttcgacttctccggtggccgggcgatcttccagggcaccaacggttcgggcaagtcccgcaccctggagttgctgctcccgctgtgcttggacggcgacctgcggcagatgggctccaaggggttcgacacggtgagcatccggcggttgatgctggacgagtaccccggcacccagcccaaccggatcggctacgcctggatcgaactgcaccgcaccgccgaggacggcggtgatgagttcctgacctgcggcatcggggtcaaggcgtcccggaccgcgcaggcgatcagcgattcgtggcggttcatcacctcgcggcgggtgggtgtcgacctgcacttggccgacgaggaccggtacccgttgagcgcggctgcgctccgggaggagctgggcccggagtgcgtgctggacgacgaggccttccgggcgaaggtggcgtccgtcgtctacggggttccggcggagcgctacagcgatctgctgcacctgcagcgcacgctgcgcaatcccgatgtggggctgcgggtgcagaaccagcagttggagcagatcctctcggacgcgctccccccgctggactcgtcgctgatcgagcggttggcgacctcgttcgacgacctggagtcgatccgcgagaacatcgtccggctgtccggtgcggacgaggcgctgcgccgcttcctcgcctgctactcggattacgcgctcggctcgctgcaggagcgcgccggcaagatgcgcaaggccgacgaacggctgagcgcgctgcggggcgaactcgccgaactgcagcgcaagttggccaccgagcaggagcaggccgcggaagcgcagcgcaccgttgccgagctcgagcagcgggaagccgagctggagacgagcatcgaagcgctgcgctcgcacccggcgtacggggagctgcagaacctgcgggaccgcgagcggttggtggagagcaccagggccgctgcactgtccgctttggacaccgcgagcaagcaccgggcgcaggagcaccggtccgctgaagcggtggtgaacgtgctgcggcggctggtcaccgacaaccaggcggcggcgaacgcggcttcccgcaccgccggccagctcgacgcggccggtctggacagttcgctggttcccgcgccccccgccccgccgaacgcggaactgcgggtgaagaccgaacgggtgcgcacttccccgaacccggacgccgaaccggtcaccatcgagcggtacctggtgccgcagttggacaccgacgggttcgcgcagcagtaccgcgcgctgctggacaactacgaccaggtggcggccttggcccggcagcaagccgcgctgaccttgacgctgcaccagcaggcccaggagctcgacgccgagcacagcaggatcggcgagctgcaccgcgccgcgcggcaagcccagctggccgcgacggaggaatccggtcgtcggcaccaggcccggcagcagttgcgcgaagccgctgccgcctgggcggcgcgggcggcggactgggcgcacgactggcccggggaagcggaaccgccggagccaccggccccggaacagctggtcgctgaccgcaacgccacccgctacgcgcgggacgacgtccgtctctgggcccgcccgcaactgcagcaggcccgccgccgggccgcgcagctggagcaggagttggccgcgttggaggcggacagggagcagcaccagcgggagctggcggagctgcaggcgggcggcgagcgcgtcccgggacggccggagtgggcgaccgctgaccgggatccggagcgcggccgcgcgttctaccagctggtggacttccagcccgggctggaggaagcggagcgggccggtctggaagcggctctgcaggccagcggtctgctcaacgcgtgggtcagcgctgacggtgaggtcaccggggtgcccgacctgttcgccgcgccgcgcgcagcggcctccggcggcacgctcgccgatctgctggtgccggccgcggacgcggacaacccggttccccaggagcgggtggccgaactgctgcgggcggtttcgaccgatggcagcggcacgttctcggtgtcgacgtccggccgctggcggtccggggtgctgtccgggcagtggcggaagagcaccgccgagttcatcggtgccggtgcccggcacgctgcccggcaacgccgcatcgccgagctggaggacgagctggagcggttgaacgccgacatcgctgctgccgagcagcggcaccgggaggccggggagcacgcactggcgctggaacgccacttggactcctatccggacgacaacgagctgttgaccgcgcacgtccagctggcgtccgctgtggacgcggcggaggccgctgagcagcaggccgctgagctccgcgaacagcacgagcaggcccggcagcgctggcaggcggcgcacgccgatctggtgcgggccgccggtgaagcgggtctgcccgcggagacgcagctgctgcaggccgccaaccgcgcggccaacgacgcgctgacctgcctggacctgctgcgcgaggcggtggagacgcgttgcttgccgaccgtggcggagctgcgcgacatctgcctgcaccacgacgtcgcggtggccgaccggatggaggcggagtcccaggccgagcagcgctgcgccgagtacgccgagcaggccgcggcgctggccgagttgaccgcggccgtcgacggcgaggccaaggacatcaccgagcgggtcagctcctacgagcaggagcgggctgatctgcggcgccggctccccaaggcccgtcaggagctgaccaagctgcaggtttccgccgggaagctggagaaccggttggacgaccggcaggcggcgctggaggagcggcagtcgctggcgtcggcggcgtccgaggagttccgccgcgcgctgcggttgcccggtttctggcgggcttgcgggctcggtgacgaggtgccggacgacctggtcaaggccggtgagctggtgttggacgccccgcagcgcagcacgtcctgggggaaggtggccaacgagcagcaggtgctgcagcaggcgctggccggcaactacgacatcgcggtcaccgaagtggacggactgttcgcggtgacgatcaccggtgaggagggaccgcagccggtggcggaggccgctgaccgggtcagcacccggctcgcggaactccgcggctacctcaacgagcgctaccaggagatcttcgccgactacctgatccgcgacctgaccgagcggctgcgcgagcagttgcgggtggcccgggacctgtgccggcggatgaacgaggtgctcgagggggcgcggtccagccagggcgtgcacgtccagttggagtggcggccctccccttcgctcagcgacgacgtgcggcaggcgatcgagctggtgcgcatcccgttcgccgagcgcagcgaggagcaggacgccgtgttgcggcgggtgttcacccagctgatcgaggcccagcgggacagcgcttcgggtggttacgccgaactgctggcgcgggcgttggactaccgctcctggtactcgttcaacgtgcgggtgcgggacaccggcccggacggcaagccgcgggtgcgccggctgcgccagctgtcctcaggggagacccggctggtttcctacgtcaccttgttcgccgcggccgccgcgttctacgacgcggtgagcgcctcttcggacggtcggggaccgctgcgcctggtgctgctggacgaggcgttcgagcgcttggacgatcccacgatcgcccggatgctggggctgctggtggatttggacatggactgggtgatcacctggcccagtgggtggggcatctcgccgaagatccccaagatgcacatcttcgacatcctccggccgagcagcggaccgggcatcgcgtgcacccacaccgtgtggaacggcagcggcctgaccaccgccgagtcgtga

SEQ ID NO: 50824 - DNA, 1503 bp, Paenibacillus polymyxa
atgagtatttttagtagactagatcaatttacttacttggttgcacaccaacggactgatcgctatcggcctatcgcccgcgttctgtatgaacatcatcgtacatttaggagcatgctcacaacagaagatatttataccgctttaaggcaaatggatgagtttgttgaacggttccctgactactcaatcgaggatttggagatggaccttggtacgatgaaagagtgggggaatattgagatatcgcaacaagagaatgtcaaatacgtggcatatgaagatttcaagagaaaaaaacatttgattcgagccaccgatgcactcatagatattgaagaaatgatcgcaatgatggagcgacgggcaaatcgagtaaggggatcactagagaagaatttagcggcccgtattatcgaagaactcgatcgtttcaaaagtgcaatgacaaaagaaccatccgagctatacaacctttggaacgaaatcatggggcgacatgatcgcttgcgcattgatacgtcggattacctctcccacgtgaacagcaatgacatggaagcggcttatctttcggatcagttccttgagcaaaaaaataaatttgttagctacctggacgaatttgttcgtgatattcaaaagcagcaagttcgcattttaaagaaactgatgtccgtttccaaagattacatagaagatgtcatttatttaatcgtagattacgaaatcaatcggattcagcttcctacactagaagacacggatcaagaagagcgcgtggaattgcacaaaaagcagtggcaatcgatgattaattggtttgccaatgaaagttcccaagagggcgggtactactttttgatggagcaaactaaaaacgcaatcagcaaagtccttcgtctgtctagacaggtaagcgatcggctcttccactacaccaaccgaaagcatgatttcttgcatcttgcgaccctatttttcaaagccaataatgatgaagaatgcaaagaattgtttggctatataaaggggattggtcccgcttcacaaatgattatcaccgacatacagacatcagacagtgaaaccaaaactgtatgggagttgcctgcggagcaggtcgaactaattccccgcaaaaagagagattttgttaagcgagttaaatcgaccctatttgaagacccacttgagcgcaagcgaattgaattggaacataaagagcaagaggaacgattgcgaagagaactggaagcgatctctttgaacggccgaattcgaatccgagacttggatgaaatcagccctgcattaagggatactttgttgtacatggaaaccgaaggcttgcgcaattatgatattgcttatttacctgacggtcgtgaatttcgcacatttgtcgctagtgaagaccgcattaagatgaagtgtacagatggagaacttaccatggatgacattgaaatagtgttagaggatggtgttgcaggtgagtaa

SEQ ID NO: 50825 - DNA, 1209 bp, Paenibacillus polymyxa
gtgagtaacgcagaagccctaaccgaagagattcaaaccctagtttttttgctctggtccgaagagtggatctatagggagcataagcccgaactatactttcgcattcgaagtcacgagcacaaactaatagctgttttttgggactggttccattatcctatctacatgggggatggttatgttcgtttgatcaaacgccccgaacggagagtgctcgaccctaaccctacgcactcactgaaataccaaatggattttgttttatatgcatgtgtactggcgttcatggaagagaagggcgaggatcaacaatttgtactgcgtgagttgcttgaaagcattaaagcgtactatcctggagggccagatgccatttcgtggtctgatcatggggttcgtacaagtctgattcgcgtaattaaaacgttggaacaagagcggcttcttctcatgttcgaccgaaccatcgaccaatttcgagacagcgaagattatgatttactcatgcaagtctccaatgggcttaggcatgtgatccgtcagactcgtgtatcattatctgaatttagtaacatgacttctcttagagaggcgcttcatcaagaagaaatcgaagaaggcatgatgtgtgaacagcaaatttggagacgtttatttgcacagggctgcttgtttttatccgaattatcacatgatgaagtgatttatgcagaaagacacggccttcgcatgcagcaaaagctggaggaagtatttcaaggggtgtttctagagcggtacgcctccacttggattctagtccatgacaaactcagggaagggaagagcgtctatcctgcttataacacacattcccatatcgtcactgcgatagggactcatttacgtgatcgacttgatcgaggtgaaaattggttgaatcaccgcggctatgttgcgcttcacgccaaagatgccttcgacctttttgtttcagttcgtagggcgaatcaggagcatttagctaagtccagcttgtctgatcgagcgctatgggaagaggttgccgactatatgaagcaactgggcctgttgaaagtaataaaccatgaatggatctttagtgatgctttaggccgtgtggcaggcgaaattgtagaagaagaagtaccgccaaaggaggaccttaagcgtgagttggaaaccgaccagaattggttattttaa

SEQ ID NO: 50826 - DNA, 4026 bp, Paenibacillus polymyxa
gtgagttggaaaccgaccagaattggttattttaatgtttggtatcatgccgatacggaaattgaactatcggacggaaaactgtttattcgcggtgacaatgctagcgggaagacgatagcctcgactttgatgttgccactgctccttgatgggaattacaatccttctcgccttgatcctcaaaagcgtactgatcgcttgttgattgaccttcatcttggtgaagaggcggtcaatcaaaagaaagacggaaacggctacctttacatggaatttcgtaagggggagcagttcttaactattggtatgggcctttcgggcatacgtaagtcaagagatttaacgacctggtattttattgtgacaaatggaaagcagatcgggaaagacttgttactatacgaccaaacaagggatgggaaaactccgcttgattatcgtgacttctgtgaccgtttcaaaggatcgttcattacggaacataaaaccgaatacgcgaaagaggtcaatcggctgttattcgggtttaaaaatatgcataccttccatatgtatatcaagctattaattgaactgcggccgccgaaaattagcaaagatgttgggcctagcattattaatacaagtttgacggacgcgctcccagagctatctgataacgatttggagtcgctaacgaatattgtatcaaaaattactgagcaagaagaactcttaacaaagacaacatctgaagtagaagcattgaaaaagctgagtgcggcctatgaagcttaccaatttgctctgttcttcgagttcgccgagcatgtttctcgagcctcccgactatttgaaagtgagcaaagtcgccttgtcacaaaagaaaatgacttgcaagagatgactcaaagacaatcagatgcgaaaaagcggatcgaagaatcagaacaacaaattacggcgcttgaagtaaccgttaatacgcttaaagaagcccatcaggatgtctttaaagctgaagaaaagaagcgagaagtggaaagccagtttggtgaagtcaaagaaaggttaagccaaaaggaaacccaactccgcaacttcaagacggatgttcacaagaatgaacaagccgtcgatgaggcagttcagaatgaacttcaaatcaaggatgagatccaaggtatcctcgattacttgacagagtatgaagcgtcgatcaagttcgattaccacgatcgttttgttagtcaattctcaacgacggcggatcagattagtttgattgcggcgtggaaagaagaaattaatcggtacattgcacgattaaaagaaattgaagaaaatctacggcgctatcaagaacaagaagcgaaaaccatgcaaaaacgaaccgagtttgaaaacaaacttgaggcatacaatgcttcgattgtagaaatagactcgttgtacaagcaacttcaaaagttcagagtcgagttgttcgaacgaatcgaaaattggtcagctgttcaagggctatcaattgaaacacgagagtgggaagcattacagggaattttaagtgacttatatgaatatggtgaggatgaggaaaagttccattcttggaagcaaaatgtcttagagtctcgggaagaaccattccgaatccaaaaaagggaagccgagtaccatattcagcggctaactggtgaaatcaagaaagttcaaatcgaatatgagcaggttctgtcagcgccgtttgtggagcctcctgagcagaaagaggagcgactacaatggaatggccttgatgaacttcaaatcccatatattcgctttttcgaagctgtcgagttcaaggacgccgtttcggaccatatccgaaaaagagtcgagtccgtcattcaacgttctggactgctccaagctgtcattgtacctaaggaatatgaagcaaaggcgagtgatcaagcggttgtacttcgcacactagccccgaaaagcaagcatctaggcgatctgatggagcctgttcctagtaatagaattggtacaaaaacaattgagcgtgtcctgcagggaatttcagttgacgaaaatcaagaagggtacatcggtgaggatggcgttttccgtagcggattcctagaaggaactgcgcctggatgcagtgagtcgtatgtcggtcttcgggctcgagaagaggctcgtcagcggcgtctgcttatccttcgagagcaactagatgagttagaacagaatttgtcagatcaaagccgcgaactacgtgcggcgcaggccaagatcgatgaactacgccgaacatggataaagatcccttccactcaagaaattaaggacgtttatcgcgagcaagatgtagaaaagcgaaatgctaaacgtcgagagtcggaaaaagaggaagcatattcgcattatgagtccattcgacgagaaacccttaatgttcgaaatcaagttatgcgtttaattggtgatatggatctcccgcttcggctggacgtttgcagccatactctcgaacaatgtagaaaatataaagaggaaatcatggcgataggcgtgcttgctgaaaaacgaatagaagtagaaaggggaattgtccagaccaggggacatctgtgttctttggagtccatcgtaaagggttatcaagaggactacgatgaattatcgtacgagcaatcgaagctcgaaaagaccatacagcgcttgcaagaagctatggattcaaactctgatgtgtttaaacaaattgagaaagcgaacctgcagcttaatgatgctaaagagggtcagcgacaagcagaacaggtatttaaccaactcacacctcaaattgacaatgcaaaaaaagaaattgagaaactccaaactgctgttttacaagcttcggaaagggagagcatgtggtataaagaatttcgcaagctccaaacaataaatagcccgttttcttctaacacggccgatcaaatgttagagcggggcagtaaaagtgttgcaaaccgtgaagaggcacttgagcaccttttggaagtagaaagcgaggtgcgaggcgatcttaaagactaccgtttacgtcgccaacgtgcacaaccttggaacggggaaagtgaagtaaaagagtcaataggaagaactgatgcggacgcgctaactcggttaacctcgtattctacgctgagcctgcagagcaatagtggggttccatgttcgccgctggagttgcttcaagaattgtccgacattgagcttaaattaaaacaaaatatcggggaaaaagaaaaagaactgtttacagatattatcattaacgagatcggacgtacaatccaggcacgaatttatgaagccggacaatgggttaatgatgtaaacgagcggtttcatgagttcgagggacttcggattcgtctggactggaatgcaaaggatgctgtggaagatgatacactaaaaacaaaacagcttgtggatttgttaagccgtaatagtagattcattgatccttccgatcttgaaaaagttgcagctcatttccgcacacgcatcgaagccgtacaacaacgaacaaaaaaagattttagaatgaccaggctggaggcctacaaagaggttttggattaccggaaatggtttatattcgaaacgaaggttgataaaggtgcgggaccagaaaaagttggaaaccgcaactttgggagatacagtaatggtcaaaaagcgatcattttgtatatgccgctgcttgcggcgatcgacgcgatccttatgagtgcatcagataccgcaccaaggttaattacacttgatgaggcatttgcgggagtcgattccagcaataaagagaaaatgttcaatatgattcaagactttggttttgattacattatgaattcgtatgatttgtggggctgctaccgaagtgtaaaatcactttcgatcgtcacaatcttgcggcaaccttcttctccgcatatgggtttccgtcgttatcattggaacgggaagagacaagtggaagtggagtga

SEQ ID NO: 50827 - DNA, 2121 bp, Paenibacillus polymyxa
atggagtcttcactgatggaactggttcagatttttcgaactgagaaaggatttagctccttgtttacactctttcgggataaataccgaagttacggaaaaattgggaggagcaccaaagttgttcttagcgatctatcaccacatgaactgcaaacgttagaaggtttttttggtgagatatacaggaatgataaaccaattatgattactgcagcaaaatttgagagagctattatgaaaacaaaatataagaattcatttgaaggtctagatatgaacgatcttttacaagtgtacttttcggggactttaacgtctaaaagcgaagataaacacaactttgaaaaagagaaggaactgttttttcaaacttttttgagtcaatctaaagagggcagcccgttctatagatttgttttgttcataacaaactatcgaaaaaatgcatttattcattccatttataaggaaaacccaaatttacttaagcaactacttaacctaatgaaaaaaatgtttgaccatttacctttgggtaacaatatctttttacccttactcgcctataagcttacagatgatttccatgctttagctcctaattcggacggcggtaagatgatgctgtttgcattacaagtgttaaatcacttggataatggagaggatatcatttcaaaacctgatgaagaacagattaaacacattttaaatggacatcgtatcttattctgctcgcagtccaataaattagctcgtcgtttgtggattttagaagaccaaaatggcgaagaacaaaaagatcaattaattccattggaaaaggtcggatcaggtgggtttgctgaagtatacagagtttttgattcaattgaaaagaaagaaatggcatgtaaaatactctttgagaagtcagtgtttcttcgagaatatggaaaagaaggagaggactacttactgcgttttaaaagagagattaaacttttacgagaaagaatatctcatgcaaatattattaaaattgacaaaataaagctcgataatgatcctgttctattcacaatgcctttggcggatacctcattagaaaaatggctagagttaaatcctaccgcgtcggatgaaacaaaattaggtatatttaaagatatactttgtggtgtgtcttatctgcataattataaaatcagtcatcgggatcttgccccacataatatcttgttattttccaacagtgacggaactatattggcaaaagttgctgattttggtttggcgaaagacgaccaatcactttcttcaattactagactttctaacatgtcatatggaagagccgcgtttactgccccagagcaaaagataagcttgaaaaatgcggattctctatctgatatttattcactaggggccataatgtatttcatatttagtggggaatcaccagagcaaagattcagatcatttattaaatatcaacctattgttggaaaagcaatggaggaggatcgttctaataggtatcagactgtccaagaattaatggatgatttaattaatagttcggctcaaagtaattatttatttgatagtttaaggacttatgaattccaagatttctcttttgatgtgaagcaagtattaaaatgtatgtctgccgtgaagattgaagagtcgcaagaagttgttgaaaaattcgttagacctttcttatccattcccattgacgttcttatggaatgtgcaaaacatgaaacgataatggtgccatttataaatgtagcaaaagagaacatttatagagtagtagattgtaatgaagtggattgggttcacctttcagagcttttgaatggaatctataaaatatcacaaaatcttgtggtgcaaatatctactttatacctgataataatagctgcactagagaagaaaatccctttagctcaagctataatggtcgatattattgggaatttggctggtcaggatagaatttctcaacaaatagcacacataattggggaggaatttttaacttctcatgatttattaatcagccttttgaaggatactcattatccatccgatatacgtttcgttttaaatgactattaa

SEQ ID NO: 50828 - DNA, 1542 bp, Paenibacillus polymyxa
gtgaggaaaattcctgacttacagtcgctacgcggcgtcccagaattaaaatatgtgaatgcagataatgttacccgttatcgcgccatcatgcgtcttatttatcagcagtatcagaagttgaattactggctcaagcctgagtttatttatgaagagctaatgaaatggaaactgcataagaattacacactagagcaatgtcagattgacctcaatcaattggtggaatggggtaatttaaccgcccagcacgatgggggagaacgtgtagtaactgttgaagaatatctacgcaaaaaattccgttatctactaaccccctattcaattgagattgaacggatgcttgaaagcttggaatcaatccggggctacggtggttcattggaacccaccctttttgacaagattgcagatacattaaataaagtcagtggtaatgcaggtatatatgagcctggagaggcactggagtattggaaaacgttattcaacgtcttccagacgttacatgagacatctgtggactatatagcaagtctgcaaacggggatggcggaagaattgatgactacggatacttttttgttgtataaggattccatcactcattatttacaggacttcatacaagcgttgcagcggcgttcttacaaaattgaagccaaactgcatcgtataacaacaggagtaagagaaattttcttctcagcggttatggaagatgaatggttaattcctaaattggaacagtcgatttcaaaagaagaatatttaagtgaacttcaagataaatggagcagtttaaacaggtggtttctgggcgatgaggaatccattagtgattccgtgttattggagcgggcaacaaaggaagccattgtaaaagttgtaaagagtgcagtgcgaatccaggaaaaaaaacgatccagcatcagtagaaaaaaagacttggatcatttgggaaaatggttttataacatcaatgaattgaatacttcccacaaactagctgcttatgcatttggtttatttccaagccgtcatttgcagggtgaagatataaggggatccgatagcaaagaaatgtcaatgtggcaagaaacatcaatatcaaagacgattcgttcccgtagtaggaaaaagaatgaacggcaggattcagatgccgctattgataacagtaagctaaaaaaacaatttagagaggcattcctaattaaacagaagcaagaactacaatttctcattcagatggtgaacgctaggaccattaatattgcagaactgggtcctattagttctattacccgattgcagttgctagattggattagccgttgtaacgcttcttctacttcatctattcagacatccgaaggcgtccagattgagatgagcacgccattggggaataaccgtactcttttacgttgtgaggatggcacacttgaactgctaaaccataattttgtttttacagttatgattcataaggcatgggaaggtcaagttgcctggttgagtgcacaacagtag

SEQ ID NO: 50829 - DNA, 1182 bp, Paenibacillus polymyxa
atgaaccgtacgggtccgaatgaaatcgaagaaagaaaacaaatttgtatgaatgctttattaaatcgttcgtggattgataagcatgaggatgaggagctttattactggattaaagaacaatatttcgagttgagagactggtttacgaattatacaggctacacaatcattatgaatcgccattttgttaagttggagaaagtacctgctgttgcttttccttggatgggtttttcagaatttagtaaaccacttgattatgctctgttcacatatagtctttggtatttggaaaataaaacagaaaacgaacaattcttacttacccagttagttattgagattaggcaacatatgatcgaacaagagatggaagtagattggggcatttattatcatcggttatcaatggctagggcgttgaaaaaactgaagagcttgaaaatcgttcaggctgttgacggagaagaatcaaactgggtgaatgatactgcacatcatgatgttttgtatgagtgtaccccttattcacgttacattttacggaatttccccgttgagctttctagttttacaaacatggaagatttaaaagaaaccataatttatggattagatacgaaagagaaagctttacaacagaaacacaatctatatcgtcgatttttactggaacccatcttattgaatcatcagtggcagggtgatatatcctatcttcgcaaagaatcgaaggaattagtgagtcaatttaagataatgtttggatgggaaggaagccagtatcgtgaaggtattatttttttcgagccgcatgtaacttctgaatcagacacatttccaacacaacctgctttgtcagacttagccatgcttgtatgtggagaaatccgaagtatggtcacagatccagttacaaggatggaggtagagttagacggccttgtgagactcactaagcatgaaatagagcgcatactgattcagttaaaagcggaacatggagagttttggacgaatgaacataaaaatatggattctgctgaacttgctgaagaactatgtaaccatttggaagagtgggggtttggacactgggaagatcatatattttttgtgttaaatggggccggaggaagatgggaagttaagtatggaataacagagcaggttgattag

SEQ ID NO: 50830 - DNA, 4104 bp, Paenibacillus polymyxa
atggatcgctggcatatgagcagagcaggcatttttaatttttggtactacgatgaagaagaatttcactttgatgaaggtagattaattttacgtggaacgaacggttcaggtaaatcggtcacgatgcaaagtttgattccactcgtgctagatggagataagcgccctcaacgtctggacccttttggatcacgtgatcgtcgtcttgaatattatctactgggagacggcaacgaggggcatacagatcggactggctatctctggcttgaattctatcatcctgtcaaaaaaatatataaaacgattggaattggacttagagcccgacgtgctgttacagtgattggtttctggggtttcttacttgaagataacagaagaattggtgaagatttttatctgtatgattacaatttatggttagaagaaggcaaaaaggttccccttaaccgtaaatctttagaagagcaaatagcatccggaggacaagtggttcagggacagggtgcctatcaagaaatggtgaataaagcactattcggatttagagagatagaatcttataaagatttattgaaattgctgttggagctacgtagtccaaaattatctaaagatttcaaaccttcatctatatatgaaattttaaataattcattacctccgcttatggaagaagatctgagttcgttatctgacgttctggaggaaatggaccaaataacagatcggctggatgagttactgttatacctagaggagatcagtcggattgaaaaaagttataacagctataatcagttcctcttacaacaagcatccactgatgtgattcaaaaatggaaggcgtataacaagaataataatcaagttgaacatattcaaacggaattaaagcaattagaagaagatcgtcagagggttgtacgccaactagacgattaccatcagcgccttggaattgtagagatggagttggaaactttaaaccaaggtgaagcagttggaaaacaacgggaattggaacttgtcgaagaacagttgaaggaggtacacaagcagctacagagccttgcacaccgtcttaaaaccaatgaggataagctggaacgtctaaagaaggagattttaaaattaaacaactctttaaaccagattgtcaacgaacaggatgaaacgattagtgagttggaagatatagcacgcatcatcgaatttcacgagcacgatatttatcatggactgtggaaccgtgccattcctgaggaagagcgctggcataaaagctggttgcaagaccttgaagctcataagaaaaaactggctttggcgcaacaaacagcgagagaagaaggggaggcttcgagagctgccaaagaaatggaaattcaacttggagaagtccacaaggaacggcatcgggccgaaggtgaacaagcaaaacaggctgagcatgtggagtcaacaaaagaaggaatgagagaactgttggttcgctggtatcaagagttgaagcatatccctgcgcaaggagagcaattgcgagaaagtttacgtgctttaacttcgctcactactcataaccgtcaatatgaacctatacgtcagcccgctgtacaagcttatgaacaaaagaaagaagccattatgcagcaaaaagttcaattaaatcaggaaagactttctgtacaagccgagacaactagacttgaagaggaacttaatcagtggagagtgactagagaaccagagcccagaaggactgacaatagagattctgcccgcaaacagagagggacaggaagaggggcgccactctatacggtgtgtgagtttaatgaaaatttaacagacatacagcaagctcaattggaagaaactttggatcaagcgggtttgttagatgcatggattttaccaggtggtcaggttggtgtactagaccaggagcacaatgaagaagtgtggtttcaacctgtaaatcagattaaggggaccacgctaagttctgtactgtatgcaacacctacggagaagagtgggctgtcaacggaggatattacaagtgcgttaaattcgatagggtggaaccagcaaatagagcaatccacaactcgtattgaaacggcaggtgcattcattgctgaaacgggagaatttaaactggggcctatctctggcaagaatagttccaaatcacgttctgaatttatcggagaagcaaatcgcttacgcacaaaagagttagagatggcgaagttgcaagcagaaatacagtatacaaatgaacaacttcaagtcatcagccagcaacttgagttattgacacaacatcagcaggaaatggatattgaattcggaacttttcctcaggatcttgagcttcagaagcaattggaaagcctgatgaaaataacatttcggctggaacaattcatgattcaagagcagaaagtggaagagcgttataaaaaaaaagtttcagactggagagagctacagttaaggttaactgaacaaaccgcagagtggtccttactgaaaaaagagcatcaaataactgaggcgattgaacttagttctgcttatcaaagccgcatatctgacctttactcttactgggagcagcatcgtagtacattgcgattaaaggataatcaagaggagcaacaagccgaattgctcatcctcgttgagggagatcaaatggatgtaagggatcgagaagatcagagagtaaggatgacagctcaagtagatttactcaaggaactagttaaaagcatgggaatcgaagaaattcatgaacgtattacgaggtataaagaagagagaaatacaattaaacacaatgttgttcaattacaaaacgataaagagcaaaaatacaaaattttaggcgaggtaagtacaacccttaaaaatgaagaagaaaaattgaacaaaattcaaagtgaattggatgatgtaatagccctctggaaaatggaaataactttagcgctattacctatctggaaaacatttattggccagatagaagctgaaacttctatattagaaattgtgaaatgctgcgaacagattacaaaggaatatgcgaatctcttcacaaatctaactcgagagcgaatggttaatgacttgacgcaggagtttcacaaagggaaaacaaatttacaagactatgtattagagatggatcatgggggggggaactcaagtcgaattattcttctttccaaaagagatcgtatgaacccgatgactccaacggcggtgttacatgagttaactcaacaaattgaggaacagcagattctacttacagccaaagatcgtaatttgtatgaggagatcattatcggaagcgtaggaaaggcaatccgtaatagaatccatcgagcccgaagttgggtggatgaaatggatcagttaatgaagcaaagaaatacttccagtgggttaaagctctcgttgaaatgggaacctctcgagcgtggtagtgataatgaattggacacaacggatttggtggatttattgatgttagacgccaaccgtatggacgatgagcagattgaacaggtcattactcattttcggacaaagatatctcgggcaaaggaggaagctcagaaagaagatgaggtactacgtaagtatatttactcacaactcgattaccgaagctggttccaattcaaactggagcatttaaaaggagagcgaactaattatacggaactgacggatcgtaaatttaatgtgctgagtggtggcgagaaagccatggctatgtatattcctttgtttgtcgcttcttattccagatacagtgatgctgatacagacgcacctaaaattatctcgttggatgaagcgttcgcaggcgtcgatgacgctaatatgagagatatgtttcatttactgactgacatgggctttgattatatcatgacttctcaagttctatggggctgttacgatacggtgcctaatctggcgatatatgaaatacacagacccaaagatacggatatcgttacattgttccattatcggtgggatggtgaaagtaagatactcatggattga

SEQ ID NO: 50831 - DNA, 1419 bp, Paenibacillus polymyxa
atggaacttgctaatcggaaaacagccaagcaatattatgccgatcctagctttgagaacttattgactactgttttcaataaatatcaaggtcttaatggtgtgaaagggaacgctcggatcattgtaaagacggtggctgaagcagagagattgcaagactattttggctatcgcacacgacgattaattcgtcctggttcagaagttgaagttcatttaaagatttttgctgaggaattggaacgaggctataaactaacaataccagatttatatgatgtcttatatggtaaacagctattgacgagacacgaacaaaaagaattgaaattaacagcctggatggatctttttacaaaagtgaggcaggattttaaacgtgaatttaacatttttgaagctgagattcaaacatttaatcaaaaaacttttaactggttcagtaggttacaggcgggagacgctaagggctatggagtattgaggagtaccttcaataaaggagaaaatgcttactctgatctgcttgattgtttaagcgctctatggcatttacttattaagaagaaagaaatgtttgcagaaaggggggtatccactgagaaaattactttacctgcattcgctgcacatgtgactcaggattcacatgcctttgataaaaaaaggtcacttgggagactattagggcatgccttatatgatatagatatgcgaagggtacttgcaaatgaaacgctagagagtgatcgtacggtggttcctgaatatttactagagcgtcaagtgtatagaaatttcggtgtcaaggatgatgatcttagctctatatctcacgtttttgtaccgaacttaatcaaaggtacttcccctcgtacactgaacttgcgagaaatagaggaaatggagcatttaccgaggtattcgacattatacattgttgaaaatccctctgcgatttctcatctggcagatgagactattcacttcctgaataaaaacggactctccttagagcagctcccagagagttttccggctcttatttgcaccattggacaagcaagaactgcttctaaattatttatagacaagtgtctagtttccaaccctgattgcgttatttattattcgggcgatctggattggcacggtttgcagatgatgcatgggatagagggacaatttacagtacagtttcatgcctggaggatggatgtgtccatttaccgcaaatatatctctacgcgaagtgtagctttatcccatgaagatttaaaaaatttaggacaatccaacgatgtcttagagcaggaaatggtgaaagttggagctaaaaaggtatatcaagaattatttggtaaggagttacgtgaggacttcattgaagtgatccatgaagctgttagggtttga

SEQ ID NO: 50832 - DNA, 1500 bp, Tumebacillus flagellatus
atgtccgaacaagtgggaaaaaacatctccgagttttcctatcttacagccaatcaaaacacgtcacgttaccgcagcatcatgcgctttttctatacccaatatcaaaaaatgaacttctggatttctccggaggaagtttggcaaggtgtcctctcctacggtcaaattcagaactacgatctggaagaatgccagcgcgacctcaatgcgttggtgggctggaagaaccttaccgaacagcacgacggcagccgagcgaacagtatcgaagagtatctgaaacggcgttttcgctatatgatgaccccttacgctattgaaattgaacgacttgtgattcaattggaaggcatcaccggctacggcggctcgttgcaaccgagcaaactgcaagaattggttcggaatgtgcggcgaattcgcttttggcaggaggcggaaacggacagcagtgccgaggagttgtgggacaatttgaccatgatcttcagagaactcaacgaagaagcggcagacttcatcgcgtctttaaacagcaagaaatcggaagaactcttctccacggatgtcttcttactctataaagacaaggtcgtagggtatctgcaaaacttcatacaagttttgcaaggcacggctccggaaattgcacattggctcaagcaatcccgattggacccgctttccacaactcgttttttacagcaggtaacgcaagccaaactggccattccaaatctggaggacatgcagaccgaagaagaatggcgtgcacgcattgaggggcaatgggaaagcatcgagcgttggtttatcaacgacgagcgagagtccagcaatgccaatcgcttagaacagatgaccaaggacacgatttacaagctggttcgcgcagcggtccgaattcaggaacaaggtcggcgcggcatctcccgtcgtcaggagttagagatcatcggcaattggttcttctcgctggaggaattggacgaggcacaccgcttggcggcatttgcgtttggcctttatgaaacccgacattattacggggggcatgatgaccggccttatttggcggaaacctcgatttgggatgcgacccctatggaacgagagttgcaacctcgaggacatcagcataagcaacgtgctcatgcgccgcagcctgtcgtaaagcgcaaaaacaacgcaacctccatgcatgcctatctccagaagaaacaacaagaagacgaactgcttcatcgcttccttgaacgcgggttgttgacgatctctgaacttgaacaagtgacagtgctggagcgccaacagattttggcatggatcagcagatgcttatctaccaaaaacaaacagttccaaacccccaatggtgtcaccgtgtctgttgtgggcattccgaatccagagcaacgggtcatgttgcattgtgaggacggcgatttggagatgcctgattttaccctctattttcgaaaggatgactccgcatga

SEQ ID NO: 50833 - DNA, 1182 bp, Tumebacillus flagellatus
atgagcgaagcggacaagcaaaagttaccacaagcggaacgaaagcgggaagaacgcgctgagttggcacaagtgttgctgaaccgcccttgggtgctaaagtcggaacatcccgatttgtatgccaaactccgggatcattatgaaccgttgcggcagtggttccaagaaaagtgtggatttacactgctgcagacacgcgaattgatcaagttggaaaaagttccgggggtggcgcaaccgtggatgggttttgccgagttcagccaggtaatggattacggcctgttcacgtattgcctgtggtatttggaaagcaaaggcgaaaccgaacagttttccttgaccgagcttgtcgaagaagtgaaaggcaaggtcaaactgaccggacattattttgatgaaggcatctacacacatcgcttgtccttgaaacgagctctgaaaaaactccgtgaaattggagccttgaacgcggtggacggcgatgaagaggaatgggtgcaccatcatgaagatgagcgaaaaaacgtgctttatgaatgcacctacatcacccgttttgttcttcggagatttgtacaagacatctcctccttcacggagatctcccagttgggggaaggggtttacccggaaagccaacaaggggagaacgatcggcgcaggcactacatttttcgtcgatatgtacaagaaccggccgtgcttgacgatcagtggacggaagatgaccgcaagtacgtgctgacgcagcgcagttacattcttaatcagatgcaaaccatcggcttggatggaagtcgatacaaagaagcgttgttgttctgttacccctatcccaaaagcgagatggaattgttccccacagcgcaatcgatcagtgatttggtgctgcttctgaccggtgagatacaagatcagcttcgagacgcttccgggtctgtgcacttgactcgttccgatctggaagggatcttgactcggctaaaggaagctcaccagacgtattggagcaaaaaagaccgtgaagcgaagatcggagaactggcagaggaactgctcactcatatggaagaatggggattggctcggcgaatcgactcccaacaactatgtctgacaccggttttgggacgttggaaagggttctataagaagaatggagtggaaaagctgtga

SEQ ID NO: 50834 - DNA, 4086 bp, Tumebacillus flagellatus
atgaatcgttggcagttgagccgtgcggggatatttaatttttggtactacgacgagcaggagtttcatctgcaaagcggccgcatcttgtttcgaggtgccaacggcgcggggaaatcagtcacgatgcaaagctttctgccgcttgttctggatggagatactcgtccgtttcggctcgacccgtttggctcaagagatcgaaaaattgagtattatctgctgggggaagacggagagcatacggaccgcacaggatatctttggatggaattttaccttgcgcaacaggaccgctaccaaacgatcggcattggactgcgggcgagacgcgggaagtcccagcttgatttctggggatttgctcttactgacggccggaggatcggtcgtgattttcatctgtatcagaacgactacgcacaaggtgaggaagcgcgaattccactggactggaaagcgttgcgcgaccggattggagcaggcggtcaagtggtgcaggagcgcaaggagtaccgccgtctcgtcaacaagttgcttttcaaatacgacaacgtcaaacactttcaagaaatgcttgacctcttgattcaattgcgaagcccgaaactgtcgaaggatttcaagccgacgacgatctatgaaatcttgaacagcgggctgccaccgttgcaggaggaagaactccgtccgcttgcagaagtgctggaatcgatcgatcaaatcggtgatcgaaaacaggaactggaattgcatgttcattttgcgaagcacttggcggacgcatatggtaagtacaatcaatttcagttgtatcagactgcccatcaagtgattcagacggatggcgaacgagcagaagcagaacacaacatccagaaaaaacaagcgcaatccgaacaacaatcgcaggagcttgaacaagtcaacacagaaatcgagaccagcctgcaaaccgagcggacagcgcgggcggaaatcggaatcttggagcaagacgaagcgtttgaaaaagagagagaattagagaacaagcgcgaacaacagaaacgcgtgcaagaagagatgaacaagacgcagacccggttggagatgtggcagaaccgttatgccgcagtcgacaaacggatgcgcgcccagattgagaaacgcgaccagcatgcgtcgaagcaacaagatttgctgcttgatctggaagcgttggcgagagatgtggagtttcgctatcacgatgtgtttcacggacgtttttcgcgggaaattccagacgatgcgttgctgtttgattcctggaagagaggcattgacgatcacgagcaggccctgaaagaagctttggaatgtgcgcgccagcaccaacaagccaaaaagcaagtgcaagaccaagagcgtgaactgggaattgccacggaacgccgggaccatgcggaagcgagcctgcaagcagcggaatcgcaactgctccatacgaaagaagagcaacaggccaaactgttcacttggcgcaaagaagcgcggatcttcaagttggaagatgcggagatgacccgggtcctgcatcttctcagttctttcccagaggtcgcgtatgaagagatcacagcagcggcgcaagagcgttcggggacactttatcaatcgatctggcaagaacgagcgcaagcagaagcagaaaaagggcgtctggtcgcggcggaacaggaaaaacagagggaaatccagacatggaaaaaccaacgtgaaccggagccgccccgttccgcatcccgtgaacagacgcgcggcacgtatgcggatcgcaacataaccggagtcccgctgtatgcggcctgtgaatttcatccgcaagtgagagaagagttgcgggcggtcttggaaaccgttttgcaggaaacggggcttctcgatgcttggattggcggcaacagcctgcaagtgacgcgagaggatgaagagttttgggtgcaggcggcaccgctcgatttcgggtatacgctggctgattttttgaaaccgaccccgccggaagatcggtcggtcacagccgaacagatcgattcgttgttgcgctcgatcgaagtcggcgaaccgctgacagccagtgagcgcgttgtgatttccgtagacggtcagtttcgcatggggacgttggcgggcaaagtccgacccaaatcccgtgcagagtacattggcaaagaaagccgaagacaaacccgcatggccatgatttcccgcctggagcaggaaattttagaattgaaagcctgcatcgaacgccaagatcaggtgcttcgtttcttgcaggaacgggaatcagcattgagtttggatctggctgcgttcccttcaggcgccgagttgatggcggcacgcaacgctttgcaaacggcgaaggacagatggagcatggcggtcgaagagctggagcgaaaaaatacgtcatgtaaagcggcgatgcaagtcgagagcggaattcgtcaacggttgcatgtcttgacacaagagtacacgtcgctgaaggacgaagcgcgtttgaaaatggctgtcgatcagttccgcacgtatctgaacgactttttcgaactgcgttcacaatggaatcaatacgtgcaggtgcagaagtcgattgtacgcgatgagcaggagttgaaagaagccggggagcaggtagaaaatgagcgtgagcatctagacgaatatctgcgccaatcccgtgaagtggaagccgtcattcaagcgtttgaaaatacgctgaaagagatgggggtagcagaaaaatatcgacagttgacacaactgcgggaactcgctgccagaatgagcgcacaagcgagggagttgggggatcgaaagagcgacttaacagtggatcttcgaacttccgcaagggagttgcagagtctgcaggacgaattgcaaaaaatcacggtcaaactgcaagctcgtttgcaggagtggcgctatgaacgaagcctccaactggtttccatctggcgggaacaacctttgctggaatcgacagaagaggacgtaaaactgtgtcaccggatgtaccagacctacaaaagcagcttcgagaatcgcagaagcgaaggggtcctcaatagcttatttactgttgtgaacgaagttcggtcgcatctgcatgactacgtgttggagatggaagcggacccgaatacgaacagtcggcaattgatccgctttaactatgaccgcaaacacccggtcaccccggagtatttgctgtttgagttagagaagatgctcgaggagcaaaacgtactgctcagtgacaaagaaaaagaactgcttgaaaaagtgctcatccaaagcgtcggggtcagcattcgcgagaaaatccagcgtgcggaggaatgggtgaaagaaatgaatgagctgatgcgccagcgccaaacctccagcgggttgcaattgcaactgaagtgggaacctcggccgaagcgatcggaatccgagatggatacttcggaactggtggctttattgcgcgttgattatgaacacttgacggaggagaagcgggagcaaatccatgctcatttccaagataagatcaaaaccgcaaagcaagaggctgaaaattaccagtccttgcggcaggtgattcatgagttcttggattatcgcgactggtatcgcttcaaactcagatttaaaaaaggggaccgggtggactaccgggacttgagcgattcaagcttcaacgtcatgagcggcggggagaaagcgatgtcgatgtacattccgctgtttgccgccgtgtcttcccgctacaaagggtcgtcaccggaaagcccgcaagtcatttcgttggacgaggcatttgccggtgtggacgaagaaaatgtgcgggacatgttcggcttgctcacccagatgggatttgactacatgatgaccagccaagtgctgtggggatgcttcgacacggtgccgggcttggcgatttacgagatcgttcgacccaaagatgcggatgaagtgatcgcgatttcctatgtgtggaacggtcgggaacggattgtgaattttgacgggttggaacagaatttggctggatag

SEQ ID NO: 50835 - DNA, 1287 bp, Tumebacillus flagellatus
atgcagcgcgagaaagaaattcgggagcactttttgcaaacgggttatcaaagactgtttgagcaagcccgacgcaagtgggagtcgatcgggcgggtcggaggaaccattacgatcaaatctctgcgtgaagaagagcgtcgccgcctctcaggtctgttcgggaaatcctatcagacgggaggaactaccgagattcggctcatggaattggatcagatcttgcgttcttcgcgttgggctgttggggtagaggaactgcttgccctgctcaccggtcaacctcttgtgtcaaacaagcaaaggaaagaacggcggacgaacgcttgggacactttttgcgatgatctcctaaaaggttgcaagcgccaagagactcgatcgtggtggaaacaagtgaacgcaggagacgtggcggggtcgaaagcggtcaagatgttgtttgaatcggatcgtcagcgagcgcaaacggcggcacggctttgtttgcgggcattggatgaactgccgcaatggtcaggtcgacgggagcggctccctgtgttcgcgaaccgtttgagcggtgacccgcatgcgttggacgctgagacgccaagcggacgttggttgtacttggctttgtgcgatctcttcgggattcgatttgacagtgcggcggagtggaagcgggaagtgtttcaggaagcggggattctcgcagatgaagttgcttcttatgtaacggtgttggggatggggactttgcccgacgacccgtggcatactttttttgagcaggctgtgtccgcacggattccgttgttgctgccattggctttcttccagcaaaaagtgacttggcgagagacgaaacgcttgtatgtcgtcgagaatccgtccgtttttcaaagtctaatcgatgaatttccccaagaggagaggttgccgccgctcgtttgtacaagcggccaaccttcggtggcagccttgcgcttgttggatgcttttgctgcgacagggacaacgctctattacagcggggatttcgattggaaaggcattgagatcgcctgttcgttgcaaactcggtatcgggagtcgtttgtggcttggcgaatgtccaaggaagagtatctgtcttgttcagtaggtacgccctttgaggaagaacaagccagaggtgtgctctccttagaagttccttgggatgaagaactggtccgaactatgatgcagcacaagcggaacgtgtatcaggagtctttgttggagctcttgctggaagatctgacggccgtaaacgcgtga

SEQ ID NO: 50836 - DNA, 2001 bp, Frankia sp. CeD
  modified_base (49)..(49): a, c, t, g, unknown or other
  modified_base (1526)..(1526): a, c, t, g, unknown or other
  modified_base (1529)..(1529): a, c, t, g, unknown or other
gtgctggtccaggcctgccagactcggccgtcgcttcagccaccgacgnccccgcagactcccgtcttccccagcagtgtcactggtagccggtcacccgccgttcacgcggtagcatggtgggcgatactgggcggtgtgacgagcgacggacagaccgggccggcagccggcggtgatgcgccgccccggcagccgttcgcgcacctgagcgcccccaacgcggacgtctaccgggaggtgctgacgacgttcgcgcgggcgcgggaccggttcatcgtccacatgcgccccgaggacgtgatcgcggatctggggcggccggggcagaccgagtcgatcgtcgccgcgctggacaagctcgttgagtggggcaacctgcgggccgacccggacaccggccgggtgaccacggtggcggacttccaccgggcgcgctacctgtaccagctgaccccggccgggcaggcggccgaggaggcgatcgccgtctacgaggtggcgatcggccgccggggcgccctgcagtcggtggcgctggaggacatcgccgcccagctgcgcgccctggtggagatgacggccggcgacgccgccgatctcgacccggcgaaggtacacctgctgctgctggggctggcggagcggttcaccggactggccgacaacgctcaggcgttcatgacgtccctccgccgagtgatcgacttctcggacggtgacgtggacgcgttcctcgcctacaagcaacggctcatcgactacatcaaccggttcatcgccgagctggcgaaccggggcgcggagatcgccaccctgctgggtcaggtcgagggggccggcgtcgaacgcctgctgctactcgcggcccgtcgggaggcgaccgacgccgtgcccgacgtgcccgaggtatccggctccggggcatccggctccggggcatccggctccggggcatccggctccggggcatccgattccggccggaccggagccgggcgaaccgacgctgagcggattcggaccgcctacgacgccgcggtcgccgcggccctggacggctggcgcaaccgctggcgcggcctgcacgactggttcgtgtcggcggattcgcgccgtccctcccaggcacggttgttgcggggcgcggctatcaccgcgatcacccagctcatcgataccgtcgccgcactcaacgagcgccgtaccggccgttcggaccggtcggcggacttccgcacgctcgctcgctggtttgccgaggctcctgacgacgcggcggcccaccggctgtggcgggccgcattcggcctggcctcggcccggcatctcaccgtcagccaggagaccgtcgccgcctggcaggaggacgagccgacaccgaacacgccgtggcaggatgcgccgccgatgcggatcagcccgcagctacgccggaccggttcctacgagcggcgcggaacgccgaaccgggtcacggaccgcgcgcggcagcggcggctgctcgccgagcaggccgcgcgggnggnggagcaggccgcgtccgctcgggcccggctcgccaccgacgggccagtgctgctgtcccagctcggcgtcctggaccggcaggcgttccggctgttcctcggcctgctcggggacgcgctcgccgccaggctggcgggcgataccgaggtggagaccacgtccagcgacggcacggtcctgatccgcctcaccctcgtccccggcgggggggtggcgcggatcgagaccgaggatggcgtcctggacggcccggaacacaccgtcgagatcgtcgacctggccggtgcggcatcgcgtccggcggcctggaacgacctgaacgacctgaacgactggagcgactcgaacgacaggaatgaccgaaaccggcaaaacgatctgaatggccggatggacggcctcgctccggtcgtactcgccggtgggccggaccggctcgagctgctggagaccggacgggtgtccggatga

SEQ ID NO: 50837 - DNA, 1269 bp, Frankia sp. CeD; identical to SEQ ID NO: 49804

SEQ ID NO: 50838 - DNA, 4332 bp, Frankia sp. CeD
  modified_base (3188)..(3188): a, c, t, g, unknown or other
atgagcacctcgacccgcatgcccgcgacaccggcaccggcctcgattcccgcaccggcaccggcgtcggcctcgattcccgtaccggcccgggaggaccgctggcagccgctgcgcgccggcctggtcgacctcttctactacgacgtggaagagttccacttccacgacgggcggctgctgctgcggggcaacaacggtaccggcaagtcgaaggtcctggcgctgacgctgccgttcctgctggacggcgagctggccgcgcaccgggtcgaaccggacggtgaccgcaacaagcggatggaatggaacctgctgctgggcggccggcatccgcatcccgagcggctcggctacacctggctggagttcggccggctgggcggtgacggcatccccgagtaccgcacgatcggggccggcctgaaggcggtcagcgggcgcggcatcgtccggcactggttcttcgtgacccgccagcggatcggtccgcagctgtccctggtcagcccgacccgggtgccactgaccagggacaaactgaaagaagccgtcgacggccacggcgcggtgtacgacaccgcgtcggactaccgccgtgccgtggacgaagcgctgttcggtctcggcgggcaccggtacgaggccctggtcaacctcctgatccagctacgccagccgcaactgtccaagaagcccgacgagaagctgctctcccgggcgctcaccgaggcgttgccgccgctggaccccgcgctcgtggtcatcgtggccgaggcgttccggggtctggacgaggaacgggagacgctgcgcgccctcgccgaggcggaaacggctgcgcaggcattcctgacccattaccgccggtacgcccgagtggccgcgaagcggtacgccgcgccgccgcggcaggcgcacagccgctacgagcagcacgggcgggatctcgccgaggccgacgccgcgcatcaggcggcggtcgaggccctgacggccgcgcagcaggcgctcaccgaggtggaggaggcgaaggccacactgaccgcccggcgggacgcgctgcgggacagcccggagatgcgcgacgcggcggcgctgcggggcgccgaggaggatgccgggcggctcgcccggttcgccgcccagcgggagcgggacagccgggccgcggccgaggctgccggcgaccggaagcgccggctcacgggtgcggaacgcacggtccaggccgacgcggcgggcttcgacgccgcggtccgggccgccgggctggcggccgaggccgccctggtcaccggccggcacgccgcggtactcaccgagctggacggcggggaaccgccgtaccgcgacgcccggcgatccgccgaggccctggtcgggcagcagggcaccgccgtgaaccgtctcgacgggttgctgcgcgcggcggccgacgccggcgtggcgctgcgcgcggcccgggacgacctggaccggatcactgccgagcagcaggccgccgccgagcggatcgcggcggccgaggacctgaccgcccagcgcggggcgggcctcgtcgtggcctgcacggcctacctggccggctgcgcgtacctgcggccggccgacccggacgccgcgctggcggccctggccggctgggtggacacactcgacgggtccaacccggtcgccaccgcggtggacggggcggcgcggctggccaccgccgacctcgggcgccggcaggccgtcctcgacggcgagcagacggccgcccggcgggaactcgaacggctcgccgaggagatcgagcggctggcggccggtggccacgactcgccgccggccccgcacacccgcgacgagcacgggcgggacggccgggacggcgccccgctgtggaaggtcgtcgacttcgtcgacggcgtgcccgacgagcaccgggccggaatcgaggcggcgctggaggccgccgggatcctcgacgcctgggtcggcccggacgggcggctgcacgaccccgtcagcgacgacgttctggtcacgcccgggcggccggcgccggggggtgggctggccgcggtgctcacgccggcgatcgaccgcgacgacgcacgcgcggcccggctgagcgacaccgcggtcgccgccgtcctcgcgacgatcggcctgcgcggcgggcccggcccggccggcggctccttggtccacgggccggcggccaacgggacgacggccaacgggacgacggccaacaggacctcgggcaccgagacctgggtcaccgtggacggccggttcggtaacggggtcctgaccggcggttggcgcaaggaaaccgccggctacatcggtgagggtgcccgcgaggcggccaggcgggtccggctcgaccacctgcgcgccgatgcgacccggatcgagctacggctcgaagagctggccgcggccgccgcggagctggccgaccggcagctctcgctggccgccgagcacggggcccggccctccgacggcgacctgcgcgaggcgcacgcgcagctggccacggagcacaaggccaagcggcggatcgacgcccagcaccaggaggcggccgctgtcgcggcccgccggcagcaggccgcgggtgaggcgcgggcggcggccgaggagttcgccggcgacgtgcgcctgcccgcggagccggccgcgctggccgacgtccgggacgccctgggtgactaccgggcggagctggccgcgctgtggccggcggcggaatcgctggaccggtcccgccgcgcggcgaccgaggcggaacacgaactcaccctcgcgctggaacgccaggaacagaccgccgaggcggtcgccgaggcgcagatgcaggccgacgcggccgccgaacgtcaccgggtcctggtcgagacggccggcgccgccgtcgacgaactgttccgcaaactggccgccgtcgacaccgaactcgaccggtgcgggcagcgggagaagcaggcccgggccgccgaacgggatgcgctcgacgcccggggccgggctcacggccggcgtgagacgttgcgggaggcgatcaccaccgccgcggccgaacgcgaggcggctgtcgcgaggctccgggcgttcgcggccaccggcctgctcgcggtcgccgtcccggacctggagatcccggacccggctgccggctgggcaccgtnccccgcgatcacgctcgcccgggcggtcaacgccgccctcgacgacgtcgacgacaccgaccgccggtgggagctggcgcagcagcgggtgtcggccgagcacaaggttctcaccgacgcgctgtcccggcacggccactcggtcgggatggtcgtctccgacggcgtgatcgtggtcgacgtcctgttccagggccgcaagcaggacatcccggccctggtcgccgcgttggagacggagaccgggcagcgggcgatgctgctgtccgcgaaggaacgcgagatcctggagaaccaccttgtgaacgaggtggccggcgccctgcaggaactgatcagcgacgccgagggccaggttcgccggatcaacacggacctcgcgcagcggcccacgtcgaccggcatgcggctgcggttgcagtggcgggtcgcgcgcagcgcccccgaggggctcggcgcggtgcgcgaccggttgctgcggcagacggccgacgcctggagccccgccgagcggaccgccgtcggcgcgttcctccaggaggagatcaaccgggagcacagcgcggacaccaccggcggatgggccgagcagttgacccgtgccctggactaccgcgactggcacgagttcgctgtgcagcggttccaggacggtcagtggcggccggcgagcggtccggcgtccggtggtgagcgggtgctcgcggcgtcggtgccgctgttcgcagctgcctcgtcgttctacgactcctccggcaaccggcacgcaccccgcctggtcgccctggacgaggcgttcgccggagtggacgacgactcgcgggccaagtgcctgggtctgctcgccgcgttcgacctcgatgtggtgatgaccagcgagcgcgagtggggctgctacccgcaggttcccggcctggcgatcgcgcagctgtcccgccgggacggcatcgatgccgtgctcgtcacgccgtggcggtgggacgggcacgagcgcacccgcgtcgaccggccggtgccctaccagcccgagcggcccgaccaacccgaccagccccagctactcgaccagcccgaccaacccgaccagccccagccgctccgtccggcgcagagcggcaacaccgagcccctgccgttcgagtga

SEQ ID NO: 50839 - DNA, 1305 bp, Frankia sp. CeD; identical to SEQ ID NO: 49806

SEQ ID NO: 50840 - DNA, 1494 bp, Amycolatopsis japonica
atggatccgttccgtgtaccgcccgagctgttccgtttcaccgacgggagcagatcagggctccccctggcgatcctgcacgccttcggtgaggcgaacgagcgactcgagacggcgctcgggatcgacgacgtccgcacgcggctgcgtgaggtcggctggctggagacgctggacgacgaagacctcgtcaaagcgttggaccagctcaagggccagggccacctcgacgtcgtccagagccacgcgggtgattaccggaccgcgtccgagtacgagcgccgcaatctccagtacgcgctgacccggcagggcgaggcggcgtacgcgggtgtggtccgcgcgaacgaggtgctcaacgcgaccggggcgcttcagacggcgacgctcgaagcgctcggcgaacggctcggtgagctcgcgaagcagctcgaagacggcaccgacaggcgcgtgttcagcacgcttactgaagtcgagggccacctcgaagcgttccgcgacaatacgaagcgcttcaacggcgacctccagcgcctgctgcacgcggaggccgacctcgcgacgttccacgaggtcaaggcggcgacggtcgcgtatctgcaggagttcctcaacgacctcgagcatcacacccacaccatcgccacccgcatcaaggagatcgacgaccacggcatcgagcgcgtgcaccggcgagcgctcaacggagcggcgctgccgaagcccgacgcgcgctggctcgtcgtccgcaaagcgcggtgggacgggctgcgcgcgtggttcctgcccgaggacggggcgacgccgcgggtcgaggacctccacaacctcgcgcggcgggcgatcatcacgcttctccaggtgctcgaccggatcaccgagtcgcggcggcgcgcgagcagcgcggtcgccgatttccgcgagctggcgcggtggttcaccgtcgtcccggcgcaggaagacctgcatcgcctgtggtccacgatgttcgggctgagttccgcgcggcacgcgcacctcgcccacgccgacccggaagtggtcagcacgacggcctcgtggctcgacgcgccgccggtcgaggtgtcggaactgctccgctccgccggccgcaccgagcggttcacccggaccgggcgggtccgcgacgtcaccgcgatccgggcggcacgcgtccagcaggcgatcgaggaacgcgccgagctcgaagcggcgtggaacatgctcgacaccggcggcgtcgtgcggctttcggcgttcgagaagctggaccacaccgttttcgagcggctgctggacctgctgggccaggcgctgggcaggcctcccggcgcggagggcgcccggcggagcacgacgtccgacggccagatcgagatcgtcctgcggccgccgcggaacggcgcggtcgcgcgcctgaccaccacgagcggcgtcttccgtggccccgactacgaaatcgaaatcagcacgaccggaggcggtgcgtga

SEQ ID NO: 50841 - DNA, 1221 bp, Amycolatopsis japonica
gtgagcctcaccaaccaactggtcatcgcggaacgcgaagaggtcgcgcgcgggatccgggccctgctggccaccccgctgatcggcgaacgcggctcccctgagaccttcgacctcatccggcgccgccgcgaacccatccggcagtggttcgactactactgcggctggacgctcacggtcgaaccgcggctcggctacgcgcgactgatcaaggtccgcgcggccgccgaccccacccgcccggcgcgacgattgcgctccgggcgcgccgcgttcgaccgccgccgttacgtcctgctttgcgtggtggcggccgaactgctgaccgtgccggtgacgaccatcggacttctcgccggccgcgtcgcgcaggcgagcgccgccgacgacctcgtcaccacgttcgacgccgccaccagggcggaacggctggcgttcgtggacgtcctcaaactgctggagtccttcggcgtcctcgaagccgccgacggcgatccggagtcctttgtggacgatccggcggcgaaggtgctgttccgggtggacgcgacgctgttgctgcggttgctcgccgcgccggtcggtccttcccagctcgccgtgcccgccgacgacgtcgcgctgcggttcgaggagctgctggaagcggtgtcgcacgagcagcgttacggcctttcctccggccgccacgaggacacgccgagcgcgtcggacgtccagcggaacctgtggctgcggcacacggtgttccgccgtctcgtcgacgatccggtgctgtacttcgccgaactgaccgcggaggaacgcgcgtacctcggcaccccgaccgggcgccagttgctgcggcgtgccgcggagcagggcggtttcgtcctcgaagaacgcgcggagggtgtgctgctcgtcgacgtcgacgggctggccaccgacgagcggttcccggacgacggcagcaacgccaaggtcgccgcgctcctgctgctcgacgcgctcgacgagccgcgcaccatcgattacctgcagaaggccaccgccaaactgctgaaacgcttcccccgctgggccaagacctaccggggcaaggacggcgtgcgacggctgaccgtcgacgcgctcgccgtgctgaccggcttcgggctggtccgcgccgaagccgaactcgtccggccgctcccggccgccgcgaggtacaccgaccgcaccgaggaggcgccgtga

SEQ ID NO: 50842 - DNA, 3984 bp, Amycolatopsis japonica
gtgaccgtgacgaggtggatcccctcccgtgcgggcatcctcaacatctggcgctactacgacgagatcttcgagttccacgacgggcgcctgctgctgcgcggccccaacgggagcgggaagtcgaaggcgctggagctgctgctgccgttcctgttcgacgcgagcctgcgcgccaaccggctgtcgacgttcggcaccagcgagcgcagcatgcactggaacctgatgggcgaaggcgcttccggcgccacgcgcgtcgggtacgtctggctcgaattcggcatggcgggcgagaagtggttcacctgcggcgcacggctgcaggccagcacgcacaccagcacggtgcacgccgacttcttcaccaccgatctgcgcgtgggcgacggcttgccgctggtcaacgaggccggtcagcccctgaccaagggcgcgctggaggaagccctcggcgagcacgggaccgtgcacgacggcgcggccgagtaccgcgcggagatccgcgcgaaactgttccccacgctgagcgaacagcggtacgacgcgctgatcaccgcgctgctccagctgcggatgcccaaactctcgcagcggctcgacccgagcctgctgtccaacctgctctcccgtgcgcttccgccgttggggcagcaggagatcgcggatctcgccgagggtttcgagcggctcgacgcgcaacgcgaacggctgggctcgctggagaccgaggtcgacgcgacccgtgcgctcgccgcgcggcagaagacctacgcccagcgtgtgctgcgcgcgggcgccgcgaacctcatcaacgccaccgcggaactcgacgaactcgccgcggccgcccgccgttcggccgaggagcacgacgaggtcgccgcgaagaaggaggccgccgaggaacgggcggcgaagctcgaaaaggacgtcgaagagaccgaagcgcggctgtcggggctgaccgaatccgagtcgtatcgcaagggccaggagctcgacaaactgcggcaacggaccttgtccacgagcgagaaagcggaggctctgcgcgcggacgcggaccggctccgtgccgaggcggacgccgacgaggagcgctcgcgggcggcgaagcaggtcgcgaaacgacaggcggacctcgtccgctcgctggagaccgaggtccgcgccgccgcgacccgcgcgaacctggccggggtgcacgacgaactcgtcgccgggctggacgaaccggcccggctccgtccgttgctgcaggccgccgtccgcggcaaacgcgaccaggtcgaggcgctcggccggacgctggacaaacacgaacgcgccgtcggacgacgtcaccaggccgaggcggatttggatcgcgcgcgagcggacttctcggtcgcgcaggagcgggtcgaactcacgacggcgacgcgggaactcgcgctgagcgatctgcgcacccggctcgccgaatgggcgatcggctgccgcgagctgcgcttccccgacgtggaagcggtcgtgcgggacgccgaggcggaggtctcgctgctgggcaggctcggcgccgtcgccgagaccgtgctcgaagacatcatccggcgggaggcggcgaccggtgccgcgctggccaccgcgcgagccgagcacgacgaactcctcgtcgaggcgggcgtgctcgaaacggaggacatcctcgcgcccgagccgccgcgcacccgcacggcggaccgggccgagatgagcggcgcgccgttgtggcggctggtcgatttcgccggctcggtcccggaaagcagccaagcggggatcgaggccgcgctcgaaggcgccggtctgctggacgcctgggtgaactcccacggtgtcgtcgacggccacgacgtgctcgcggagtccgggacgctgccggtggcctccggtcgttcgctcgccgacgtcctcgtgccggaacccgacgcggaggtttccccgacgaagatccgccggatcctggaggtgatcgccttcgacgacacgctcccctccggtcccgcggcgatcggcgcggacggtggctggcggatgggcagcctgtcgggtagctggacgaaggacgccccggcctacatcggtggttccgcgcggctgcgcgcccgcgaacgccgcatcgccgcgctgcgggacaagatctcccttcgcgagaagaccatcgccgagctggagggcgagctggccgccctgcgcggcaggcgtgagctgatcaagatcgaacgcgccgcccgccccggtcacgacgatctccttgccgcgaccggggaactgaccacggccgaggccgagctgaccgccgccgacgccgccgtccggcatctggagagtgccgtctccgcgctggagatcgaggccaagaccgcgctgcacgagttgaccgcgcaggcttcggaatccgggttgccgaccgaacgcgcgccgctggccgcgctcgccacggctctgcgtacgtactccgaccagggcgagaactggttgtacgagcacggaaacctgctcaccgcgacccagcgggccgagctgtgcgccgagcaggcggaccggtcggaggggaacgccgcccggcgtgaggacgaggccgccgacgcggaggccgaacgcaccaagctcaccgcgatgctcgacgcgatcgacgggacggtcggcaccggccagcgcgaggtgctcgccgagatcgacggcctgcgcacgaaactgcgtgcactctcgggcgaactccgcgccgcgaacgccgacgccaaggagctcgcggtgtcgctgggcgcgctcggcgtccgccggacgaccgacgcgcgggcacgcgaggacgcgaccaagaagcaggacgccgccgcgctccggttccggaagctcgccaccgggatcttccccgcggacggcgggatcgaggatctgccgaagttccaggccaccctgtccgcgtccgagagtgtccgtgcggcgctggacacggcccggctggtggccgcggcgtggccgtccgtgccgcacgcgccgagcaacctcggcgaggcactgcaccggctgtcggaagccgtgcacacctgccggaacacgctcagctcgcgcgcggaactcgacctggagaccgacgaggacgtccagatcttcaccgccgtcgtcgacgggctgcgggtcggcgcggccgaactgctcaagatcctttacgcggaagcggaacagagcaggcacgagatcaccgatcgcgagagcgacctgttcgacaagacgctgaccggcgacacccgccgtcatctcgcggcccgcatccggcaggccaacgacctcgtcgacgggatgaacgcgcggctggaacgcgtgcggaccgcgtcgcgggtcgccgtccggctggtctggcaggtctccccggatctgccgccgggtaccaagaccgcgcgggatctgctgctgaaggatccggatcagctgaccgccgaagaccgcgtgtcactgcacaagttcttccgtgagcgcgtcgagcaggcgaaggcggacgacacggcgaccagctgggaacagcagctcgcgcaggtcttcgactacacgtcgtggcaccggttcgtggtcaaggtggaccgcgcgaacggggcgggctggcagctgctgaccaagaagctgcacggcgcgctttccggtggggagaaggcgatcgcgctgcacctgccgctgttcgccgccgtcgccgcgcactatcaggccgcgcccgaggcgccgagggtgatcctgctcgacgaggtgttcgtcggcgtcgacaccaccaaccgggggcaggtgttcggcctgctgtccgcactcgacctcgacctgatgctgacgtcggaccacgaatggtgcacctacgccgaactcggcggcgtcgggatccaccagctcatcaccggcggtgacggcgacgacgcggtcaccacggcccggttcacctggaacggccacgacctccagcccgccgggcattag

SEQ ID NO: 50843 - DNA, 1986 bp, Frankia sp. Allo2
  modified_base (49)..(49): a, c, t, g, unknown or other
gtgctggtccaggcctgccagactcggccgtcgcttcagccaccgacgnccccgcagactcccgtcttccccagcagtgtcactggtagccggtcacccgccgttcacgcggtagcatggtgggcgatactgggcggtgtgacgagcgacggacagaccgggccggcagccggcggtgatgcgccgccccggcagccgttcgcgcacctgagcgcccccaacgcggacgtctaccgggaggtgctgacgacgttcgcgcgggcgcgggaccggttcatcgtccacatgcgccccgaggacgtgatcgcggatctggggcggccggggcagaccgagtcgatcgtcgccgcgctggacaagctcgttgagtggggcaacctgcgggccgacccggacaccggccgggtgaccacggtggcggacttccaccgggcgcgctacctgtaccagctgaccccggccgggcaggcggccgaggaggcgatcgccgtctacgaggtggcgatcggccgccggggcgccctgcagtcggtggcgctggaggacatcgccgcccagctgcgcgccctggtggagatgacggccggcgacgccgccgatctcgacccggcgaaggtacacctgctgctgctggggctggcggagcggttcaccggactggccgacaacgctcaggcgttcatgacgtccctccgccgagtgatcgacttctcggacggtgacgtggacgcgttcctcgcctacaagcaacggctcatcgactacatcaaccggttcatcgccgagctggcgaaccggggcgcggagatcgccaccctgctgggtcaggtcgagggggccggcgtcgaacgcctgctgctactcgcggcccgtcgggaggcgaccgacgccgtgcccgacgtgcccgaggtatccggctccggggcatccggctccggggcatccggctccggggcatccgattccggccggaccggagccgggcgaaccgacgctgagcggattcggaccgcctacgacgccgcggtcgccgcggccctggacggctggcgcaaccgctggcgcggcctgcacgactggttcgtgtcggcggattcacgccgtccctcccaggcacggttgttgcggggcgcggctatcaccgcgatcacccagctcatcgataccgtcgccgcactcaacgagcgccgtaccggccgttcggaccggtcggcggacttccgcacgctcgctcgctggtttgccgaggctcctgacgacgcggcggcccaccggctgtggcgggccgcattcggcctggcctcggcccggcatctcaccgtcagccaggagaccgtcgccgcctggcaggaggacgagccgacaccgaacacgccgtggcaggatgcgccgccgatgcggatcagcccgcagctacgccggaccggttcctacgagcggcgcggaacgccgaaccgggtcacggaccgcgcgcggcagcggcggctgctcgccgagcaggccgcgcgggaggcggagcaggccgcgtccgctcgggcccggctcgccaccgacgggccagtgctgctgtcccagctcggcgtcctggaccggcaggcgttccggctgttcctcggcctgctcggggacgcgctcgccgccaggctggcgggcgataccgaggtggagaccacgtccagcgacggcacggtcctgatccgcctcaccctcgtccccggcgggggggtggcgcggatcgagaccgaggatggcgtcctggacggcccggaacacaccgtcgagatcgtcgacctggccggtgcggcatcgcgtccggcggcctggaacgacctgaacgacctgaacgactggagcgactcgaacgacaggaatgaccgaaaccggcaaaacgatctgaatggccggatggacggcctcgctccggtcgtactcgccggtgggccggaccggctcgagctgctggagaccggacgggtgtccggatga

SEQ ID NO: 50844 - DNA, 1269 bp, Frankia sp. Allo2; identical to SEQ ID NO: 49804

SEQ ID NO: 50845 - DNA, 4332 bp, Frankia sp. Allo2
  modified_base (640)..(640): a, c, t, g, unknown or other
atgagcacctcgacccgcatgcccgcgacaccggcaccggcctcgattcccgcaccggcaccggcgtcggcctcgattcccgtaccggcccgggaggaccgctggcagccgctgcgcgccggcctggtcgacctcttctactacgacgtggaagagttccacttccacgacgggcggctgctgctgcggggcaacaacggtaccggcaagtcgaaggtcctggcgctgacgctgccgttcctgctggacggcgagctggccgcgcaccgggtcgaaccggacggtgaccgcaacaagcggatggaatggaacctgctgctgggcggccggcatccgcatcccgagcggctcggctacacctggctggagttcggccggctgggcggtgacggcatccccgagtaccgcacgatcggggccggcctgaaggcggtcagcgggcgcggcatcgtccggcactggttcttcgtgacccgccagcggatcggtccgcagctgtccctggtcagcccgacccgggtgccactgaccagggacaaactgaaagaagccgtcgacggccacggcgcggtgtacgacaccgcgtcggactaccgccgtgccgtggacgaagcgctgttcggtctcggcgggcaccggnacgaggccctggtcaacctcctgatccagctacgccagccgcaactgtccaagaagcccgacgagaagctgctctcccgggcgctcaccgaggcgttgccgccgctggaccccgcgctcgtggtcatcgtggccgaggcgttccggggtctggacgaggaacgggagacgctgcgcgccctcgccgaggcggaaacggctgcgcaggcattcctgacccattaccgccggtacgcccgagtggccgcgaagcggtacgccgcgccgccgcggcaggcgcacagccgctacgagcagcacgggcgggatctcgccgaggccgacgccgcgcatcaggcggcggtcgaggccctgacggccgcgcagcaggcgctcaccgaggtggaggaggcgaaggccacactgaccgcccggcgggacgcgctgcgggacagcccggagatgcgcgacgcggcggcgctgcggggcgccgaggaggatgccgggcggctcgcccggttcgccgcccagcgggagcgggacagccgggccgcggccgaggctgccggcgaccggaagcgccggctcacgggtgcggaacgcacggtccaggccgacgcggcgggcttcgacgccgcggtccgggccgccgggctggcggccgaggccgccctggtcaccggccggcacgccgcggtactcaccgagctggacggcggggaaccgccgtaccgcgacgcccggcgatccgccgaggccctggtcgggcagcagggcaccgccgtgaaccgtctcgacgggttgctgcgcgcggcggccgacgccggcgtggcgctgcgcgcggcccgggacgacctggaccggatcactgccgagcagcaggccgccgccgagcggatcgcggcggccgaggacctgaccgcccagcgcggggcgggcctcgtcgtggcctgcacggcctacctggccggctgcgcgtacctgcggccggccgacccggacgccgcgctggcggccctggccggctgggtggacacactcgacgggtccaacccggtcgccaccgcggtggacggggcggcgcggctggccaccgccgacctcgggcgccggcaggccgtcctcgacggcgagcagacggccgcccggcgggaactcgaacggctcgccgaggagatcgagcggctggcggccggtggccacgactcgccgccggccccgcacacccgcgacgagcacgggcgggacggccgggacggcgccccgctgtggaaggtcgtcgacttcgtcgacggcgtgcccgacgagcaccgggccggaatcgaggcggcgctggaggccgccgggatcctcgacgcctgggtcggcccggacgggcggctgcacgaccccgtcagcgacgacgttctggtcacgcccgggcggccggcgccggggggtgggctggccgcggtgctcacgccggcgatcgaccgcgacgacgcacgcgcggcccggctgagcgacaccgcggtcgccgccgtcctcgcgacgatcggcctgcgcggcgggcccggcccggccggcggctccttggtccacgggccggcggccaacgggacgacggccaacgggacgacggccaacaggacctcgggcaccgagacctgggtcaccgtggacggccggttcggtaacggggtcctgaccggcggttggcgcaaggaaaccgccggctacatcggtgagggtgcccgcgaggcggccaggcgggtccggctcgaccacctgcgcgccgatgcgacccggatcgagctacggctcgaagagctggccgcggccgccgcggagctggccgaccggcagctctcgctggccgccgagcacggggcccggccctccgacggcgacctgcgcgaggcgcacgcgcagctggccacggagcacaaggccaagcggcggatcgacgcccagcaccaggaggcggccgctgtcgcggcccgccggcagcaggccgcgggtgaggcgcgggcggcggccgaggagttcgccggcgacgtgcgcctgcccgcggagccggccgcgctggccgacgtccgggacgccctgggtgactaccgggcggagctggccgcgctgtggccggcggcggaatcgctggaccggtcccgccgcgcggcgaccgaggcggaacacgaactcaccctcgcgctggaacgccaggaacagaccgccgaggcggtcgccgaggcgcagacgcaggccgacgcggccgccgaacgtcaccgggtcctggtcgagacggccggcgccgccgtcgacgaactgttccgcaaactggccgccgtcgacaccgaactcgaccggtgcgggcagcgggagaagcaggcccgggccgccgaacgggatgcgctcgacgcccggggccgggctcacggccggcgtgagacgttgcgggaggcgatcaccaccgccgcggccgaacgcgaggcggctgtcgcgaggctccgggcgttcgcggccaccggcctgctcgcggtcgccgtcccggacctggagatcccggacccggctgccggctgggcaccgtaccccgcgatcacgctcgcccgggcggtcaacgccgccctcgacgacgtcgacgacaccgaccgccggtgggagctggcgcagcagcgggtgtcggccgagcacaaggttctcaccgacgcgctgtcccggcacggccactcggtcgggatggtcgtctccgacggcgtgatcgtggtcgacgtcctgttccagggccgcaagcaggacatcccggccctggtcgccgcgttggagacggagaccgggcagcgggcgatgctgctgtccgcgaaggaacgcgagatcctggagaaccaccttgtgaacgaggtggccggcgccctgcaggaactgatcagcgacgccgagggccaggttcgccggatcaacacggacctcgcgcagcggcccacgtcgaccggcatgcggctgcggttgcagtggcgggtcgcgcgcagcgcccccgaggggctcggcgcggtgcgcgaccggttgctgcggcagacggccgacgcctggagccccgccgagcggaccgccgtcggcgcgttcctccaggaggagatcaaccgggagcacagcgcggacaccaccggcggatgggccgagcagttgacccgtgccctggactaccgcgactggcacgagttcgctgtgcagcggttccaggacggtcagtggcggccggcgagcggtccggcgtccggtggtgagcgggtgctcgcggcgtcggtgccgctgttcgcagctgcctcgtcgttctacgactcctccggcaaccggcacgcaccccgcctggtcgccctggacgaggcgttcgccggagtggacgacgactcgcgggccaagtgcctgggtctgctcgccgcgttcgacctcgatgtggtgatgaccagcgagcgcgagtggggctgctacccgcaggttcccggcctggcgatcgcgcagctgtcccgccgggacggcatcgatgccgtgctcgtcacgccgtggcggtgggacgggcacgagcgcacccgcgtcgaccggccggtgccctaccagcccgagcggcccgaccaacccgaccagccccagctactcgaccagcccgaccaacccgaccagccccagccgctccgtccggcgcagagcggcaacaccgagcccctgccgttcgagtga

SEQ ID NO: 50846 - DNA, 1305 bp, Frankia sp. Allo2
  modified_base (343)..(343): a, c, t, g, unknown or other
gtgagcgcgtcgtcgaccggggcctcccgcggtacggaagccgcccgcgatgtggaacggctgcgtcgtctgctgggcggtgagcacacggcgtggctgctcgaccgggtgcggcgcaggatcgagctgggccggccgctcaccgggacggtcaccctcggccgggccagcgcggaccagcggcggggggtcgagcggctgctgggccgccgggccggcaccggcgcctcgctgtccgtgtcgttggacgaggtcgacgcggtgctgcggtccagcggcgccgcgccggacggactcgccgccgccgtccgccagctcaccggggatgtcacggagcgggcgnagctggccgcggcgcagtcacgagcctgggcgcaggcgcaccagcccctggacgacctcctcgcccggcgccccgaactcaccccctggcggtcctggctggacagcaccggcctgctgcgccggctggctggcaccccggacgcggcggggccgctggccgccgacctgctccgggtgctcgacgcgttgccctcacccggcgtggcgctgggccggctggccgccaccagcaccggtgacgcgcacgcgctcgacgacggccggccgctggcgacgctggccctggcggcggcccgggtactgggcggatcccacccggcgggtgacggctcggccgcgggccgtcgcgccgcgtgggccgctgtcggggtgcaccgtgacgaactgtcgtccacggtgctctgcctgggtctgccgggcggggcggacagcccgaccggccggatcctggccatctgtcgcgaggcgggggagccctgcgtgctcactctgcgccaggtcggcccgggccaggaccgcggcgacctcggggtgggcctcggagtggtgtacctgtgcgagaatccgatcgtgctggccagcgccgccgacgagctggcgggccgcaccccgccgctggtgtgcgtgaacggccagccgtcggccgccgtcatcagcctgctcgcggcgctcgccggccagggcgcgcggtttgcctaccatggcgacttcgactggggcggcatccgcatcgccaacggcctgcgggaacggatcggctggcggccatggcgtttcgacgcccggtcctatcaggcggcgctgaccacggtgaccggcggcgagctggttggccggccggtcgacgcggcctgggaccccgacctgcgccccgcgctggagcaccatgcgatcagagtggacgaggaactcgtcctcgccgagctgatcaacgacctcggcgccccacacgcctggtaa

SEQ ID NO: 50847 - DNA, 1524 bp, Bosea sp. LC85
ttgcctaagcacattccggaagacccggcggatctatttcgtcacgtgagcgccgagaaggccgcattctaccgctgcatcatgaacgtcttcgcggcggcaaagcggcaatatcgtctgcagttgaggccggatgaagtgcttgccgaagcccaatggccggacgggccgccacgcatcgaggaagtcaatgtggcgctcggccagcttgcggaatggggtaatctcgaatcgcaccccgacaccgcacgggtctccagcctcagcgacttctaccgcgcacgctttctctatcggctatcacagggaggcgaggcggtggaatcggcgttggcgatgttcgtgcagaccctgcaacgccgcgccgaactgcaaacggtcgcgcttgaagacatagcgagccggttgcaggcccttcaggcactggctggtgctgccgcccctgacgtggccaagatccacgaaacgctgcgggaccttgtgcgcgtcttcgaaggcctggccgagaacgcgcaggccttcatggccggggtcgcgcgcagcatcgagttgcagcaggccgaagcgggcgcagtcgcgaactacaagaagcggctgatcgactatctcgaacgcttcatgggcgatctggtgcgccgttccgatacgatcgcccgcctcattctggctttggaaccgaacatcgacgcgctgcttgggcaggtggccgagcgcgaatcgcgcgacgcggcccccggtggcgcgcaggatcaggccgagtcgtggaaaggctacctggacgcctggcgagagcgctggaagggtctgcgcggctggttcctcagcactggccacgagccgccgcaagccgaactgttgcgggcgcgggcacggtccgccatcccgcagctcctggcggcgatcgccgcgctcaacgagcggcgcagcggccgcagcgatcgctccgccgacttccgcttgctcgccggctggtttgccgcctgcgcagacaacggcgaggcacaccggcttgcgcgggctgccttcgctctcaatccggcacggcatttctcgctcaacgccaacgcggacgccgagctgccggccaacacctcctgggccgacgcggcgccgctcaagattcacccgcgtctgcgcgagtacggcgaagcggccccgcgcggaccgctgccgcgcgtgcgagaccgcgccgaagagcgcgcgttcctggcactccagctcgcggaggaatcacttcaggtcgaagcggcgcgcaagcgtctcgccaccagccgcccggcgcggctttcggatctgggcgaactcgacacgcataccttcggcctgttcctgggcctgctcggagaagcgctgagcgaacaggccgggccggaggccccggtggaacggcagacgggcgacggcctgctgcacattcacctgcggccgctcgcccgcgacagccacgccaggatcgaaacgccgtacggcgtctttgccgggcgtgaccatctgatcaccatcacgcctctgcacggccgatga

SEQ ID NO: 50848 - DNA, 1284 bp, Bosea sp. LC85
atgaaagcggcaaacaggttaagcgacggccggaacatcggcctgcagcagcagcgcttccagcgcgaggaatttcgcgcctgcgtgcgcgcgctgctgatgacgcctttgatgagccccgcagatgacgatttcgccgccgtgcgccgccaggccgaagcgttgcgcgaatggttttcgcgcgaggccggctggatattgcaggtcgagcgcgaaggcgcgcgcctctacaagcgtccgggaaacctgagcgacgccatgcgcggccttcccggctacgaccgtcgccgctacgtgctgctttgcctcgcctgcgcggtgctcgaacgcgccgacccgcagatcaccctacggctgctgggcgagaggctgctggaactcgccgccgagccggcgctcgacttcaccttcacgctcgaggcgcaacacgagcgtcgcgaactcgtgtcggtgtgccgcacattgctgggcctcggggtgctgcaccgcgtcgccggcgacgaagagacattcgtgcaggcgggaggcgatcaggccgacgcgctgtacgacgtgcagcgccgcatgctcgccggcatgctggcggcggtgcgtggtccgtccacctggataccggaagaagcgcccgtgacgctcgaagcgcggctgcacgccatggtcgacgaacatgttgcggacagcgaggaaggccgtcgcacggcgctgcgccaccaactcgcgcgccgacttctcgacgacccggtcgtctatgtcgaaacgctggatgcggaagccagcgcctatttcttcaaccagcgcggaacgatggccgcccgcctgtgcgatgccgccggcctggtggcggaacagcgcgcggaaggtttggcactcgtcgacgaaggcggcctgctgaccgatgtggcgatgccagccgaaggcaccgatgcccatgtgacgctgctcgtcgccgagcatctggccgctggccaaaggcagcggcgaaaggatggcgccggcacggcgcaggctcacgtcatgcgggagcacgacattgccgacttcctgcacgaggtcaaaggccagtacgggcgctactggcgcaaatcggcgcgcgagcccggcgccgaacgcgagctcgcggcaatcgctatcgatcggctggaaaagctgcaactggcggtgcgaaaagccggcgtggtgcacccgctgccggccctcgcccgctttgcgatgggcgaggccgaacttcgcgaaacccgcaatgcgcccgcccaggccatcgactctctgttcggcccgacatga

SEQ ID NO: 50849 - DNA, 4176 bp, Bosea sp. LC85
atgaacgaccgctttaacccgctcgcttcgccactggaaaagcccgcgctaccgacaccgacgcggcagcgctggcagcctctgcggctgggtctggtggagctctatcactatgacagcgaggaattctggttccgcgacggccatctgctgctgcgcggcaacaacggcaccggcaagtccaaggtgctgtcgctgacgctgccgttcctgcttgacgctcagctcaaatcctcacgcatcgagcccgacggagacgccggcaagaggatggcttggaatctgctgatgaacagccaggaccggcgcaacggctatgcgtggatcgagttcggccgcgtcgcggaagacggcacgccgcattatctctcgctcggcgtcggcctctcggcagcggccgcacgcccacaggtcgacagttggttcttcctgctggaagacgccgacggcgcgccgcgcatcaaccaggatctgtggctgacgagcgagcaccggatcgtgctgaccagggagcgcctgcgcgatgcgctcgaaggccgtggccaggtgttcgacaccgccgccagctatcgccgcgcggtcgacgagcgcctgttccatctgggcgccaagcgctacgacgcgctgatggacacgctgatccagcttcgccagccgcagctttccaggaaacccgatgaaactgcgctgtcgaacgcgctgaccgaggccctgccgccgctggcgcccgaactgctcggggacgtcgccgaggcgctcggacagctcgaggaagaccgccgacagctcgaagagtatcaggcgctggccaaggccgtcggccgcttcgaggagcgttatcgcgtctatgccggcacgcagacccgccggcaggcacgcctgctgcgccaggcccagacggagttcgacaatgccagccgggcacgcggcgaagcccaggcccggttcgacgaagcgcaagcgcgggaagcgctcgcccagacggctcatgacgaatcggaaatcgtgttggcgcgcgggcgagcgcggcttgacgccttgcgctccgatccgacgatgcaggacgccaaccgcctcgaaaacgccgagagggagatggctgcgcgccggcaagcgacgcagaaagccgcggcggcggtcgagcaggcaggccggcggctgggactcagcaccgaggaaaccgggcacaccgcccgacgcgcagagcaggtggaacgcgccttggccgagctgcgccggcaaagtgccgttcacgccgacgcggcaggcatcgccggccagcacaccgcaagcccgctcgccgcattcgagacttccgcgctggtcgagctgatgcagcctgctttcgacagagcctgcgccgagcttcgcaacctcgtcgccggccggcgtgagcagatcgccttattgcgtcgccgccacggcgaagtcgcgcgagccgaggcggactatatgcgccggcgcgaaacccaggacgagcggcaggtcgaagccgaagaggctgccgaacgtcgtacgcaggccgatgccgaagtcgagcgtcaaggccgggatctggcggaaagctgggatcgccacgtcatcggcctgaagcaactgcaagtcgatgctgatgccaagttcgcagccttgacggcgctggcggaatgggcggcgacgctgcaaggcgacaatcccgcccggcacctgctgcaatcggcacatgaagcggccagcttcacgttgacgcaacgtcgtgcggcgctcgacagccaacggcaggcgctggagggggaaagcggggcgctcgaagacgaacgccagcgcctggaagccggcgacgacatggtgccgcccctgccctacacgcgcgacgcttccgtccgggatgcacgtgagggcgcgccattctggcaagtggtggattttcgcgacgcggtggctgccccgcagcgcgccggccttgaggctgcgctcgaagccgcggggctgctcgatgcgtggatttcgccggacggccgccttcaggccggcgacgatggggcgccgctatacgacacacaggtcctggaacggcgaaagtcttctccatcgcttgccgactttatggaagtcacggtgccggccggctgtaccgtgccggccgtcatcgtcgagcgcgtgctgtccggcatcgcctgcgcggatgacgacccaatcgacaccgaagcctggatcgccgccgacggccgatatcgtctcggcgcccttttcggcggctgggccaagccggcggcggtctatatcggacacgcggcccgtgccgcggcccgcacgcggcggttggccgagattgccgagcgcctggcgcagctttccgacgaattggctgccgtgcagggcatgaccaagcagctcgcgctggatcgcgagcagtccgacgaagagtggcgtcgggcgcccgccgacgagatgctgcgtggcgctcacctggccgccgttgccagcgcccgcgccgctcgtctggccagtgaaaggctggccgaagcggatatgcggtgccgcgaggccgaacaggcgctcaaggccgtgcgcgaacagctcgcaacggacgccgccgacctgcgcctgcccggatcgcccgaggcactgcccgccgtcgaaacggaactggatcagtatcgcgacacgcaggtccggctcgagcaagccgcccacgggttgcgtctggcgctgcccgaatggcagcggcaacttgcccgggagaacgaagcgcggagcgatcttcagcagcacgagcaggagtccgcggcggcccgtgtcgaagcggaagaggcccttgcccggctcgaagtgctgcgcgacatggtcggcgccaaggtcgaagaattgcagcggcagctcacccaagcccgcgtcacggtcgaagccggagagggcgcgctgaagctcgccggtgacgccctgcgcaaggcgggcgagatgcgggcggtcgcgaaccaacaggccgagaccgcgaccagcgtcttgcacgggcgcggcgaggcgcgcgcccaggcgatctccaaattgcagcagtttgccggcaccggcctgctttcggccgcgctgccgcgagtcgaactgccggacatggcggcccagtggacgatcgatccggctctgacattggccaggcgggcggaacaggaactgtcgaacctcaaggacgacgacgaggcgtgggcgcgcgtgcagcgccagatcgccgaggcactgaccgagttgcagcgcgcgctcggcgcgctgggccaccaggcccaggccgacccaagcgattgggggttcagcgtggacatcatctaccagaaccggcgcgaacggccggaccgcctcgctgaccgactcgccgaagagatcagccagcgcagcgaattgctgaccgccagcgagcggaccgttctggagaaccatctgcaggccgagatcgctgctgaaatccagcgtctgctgcaagccgccgaacggcaggtcgacgccatcaacagggagctgcacaagcgtcccacctcgaccggcgtgcgctatcggctgcaatggcagccgctgtccgaggaggaaggcgcgccggtgggcctcgacgtggcgcgcaagcgcctgctcaacaccagctcggacctctggtcggcggaagaccggcgcgtcgtcggagcgatgctgcagcagcgcatctcggccgagcgggagcgtgccgattccagcagcggaaaggacagcggcaccctgctcgaccaactcgcgcgcgccctggactatcgtcattggcaccgttttcgcgtcgaacgctggcaggaggggcattggcgcaagctttccggccccgcctcgagcggcgagcgggcactcggcctgacagtgccgctgttcgccgcggtcgccagcttctacaatcagggcagccatgccctggcgccgcggctgatgctgctcgacgaagcctttgccggcatcgacgacacggcgcgcgcgcactgcatggggctgatccgcgagttcgacctggacttcgtcatcaccagcgagcgcgagtgggcctgctacgctgaactgccgggcgtcgccatctgccaattgcagcggcgcgaaggaatcgatgccgtgttcgtgtcgcgatggacttgggacggacgagagaagaaacccgaggccgatcccgatcgcagatttgcgccggcatga

SEQ ID NO: 50850 - DNA, 1281 bp, Bosea sp. LC85
atgaacgagcaggtcgacccgcggcttcaacgcctgctcggcggcaagcatctcgcttcgctgcgcaagcggctgcgccagcgtttcgagcgcgcgccgctcgacgaggccgtcgaatacattcgcgtcggcgaactcagcgcggaggaacacgaagcgctggcctcgctgctcggccgcccgcagcgccgctccaagtcattgcagatcgacgtccaccgcgtcgatgccgacctgcggcgcgccgggctcgccccttccctgcgcgaggccctagagaagctcgacggtcccatccctcacctcgcgggggcgcgtctgcggctgcaaacgctatggtcgggcgtcatcgacgggtgcggccaccctggcctggctggcctgctcgggacgccggcgggcatcggcctgctcaagcggctcgcgcggcaggagccggcaatggcgggggagctttgccggcgtgcagaagaggtgctgcggcatttgccggcaaacggcatcacgcgttcgcaactggccgcggacgtactgggcgatgcccacgcgctcgacaatggccgcggggtcgcggcgctcgtgctggccgtctggcgccgggccgccgcgcccgcggccgatgaagatagcgatacgttgccggagccgggggagaacgccgatccggagccggccggcggtgcggagcgggcgcgcgacacatgggccagggcaggcgttctggtcaacgagctggcacgcccggccttgttcctgaacctgccgataggcgaagccggaagcgattgccggcccttgggagaaccgtcctatgcatcgctgcgattgctgctgcgttcgccgccgcgatgggatgcggcgggccgcaccgttttcgtatgcgaaaatcccaacctgctcgctatcgccgtggaccgatggggcgccggctgcgcgccgctgatctgcaccgacggcatgcccgccgccgcgcaacgatgtctcctgtcgcagctcgcgcaggcgggcgcacggctccgctatcacggcgatttcgactggcccggagtgcgcatcggcaaccatgtcatgcgcgaacatggcgcggagccatggcgctttggcgccgtcgactatctagccgctgtgcaaacggcgccgaaccccgcccattccctcaaggggaacccggtcgaagcatcatgggacggggcgctgacgctcgccatgcaagaacggcgcgtggccatcgccgaggaggcccttgccgcttcgttgttgcaggatctctgtgatcgataa

SEQ ID NO: 50851 - DNA, 1452 bp, Rhodococcus opacus
ttgaaactgttcgcgttcaccactgccgagaagcgcgcggagtacctgtgggtgctgcgggccttcgaccacgcccgcgccaactacgtcgtcctgctccacgccggcgacgtcgcccgcattctgaacggcctcgccggcgacgatccggccggacaactcggcgccggagacatcactcccctactcgagcaactccacgtctgggaggtgctcgaacgcagctacgacggaacacgcgccgcgacgctggccgaataccggaaccggcacttcgtctatcagttcagtcaggccggctaccaggtgttccgagccgtcgaggacgcactggcggcccggctcgacgacgcgtcgctgtcccggctggcgctgcccgacctcctcgccgacatgaacgacctggccgccgccaaccgcgcggccgacaacgacctcgtgtaccggaaactcaaccgtctcgatgcgacgctgtcggacatggccggacgcgccgcccagttctacctgaccctgggcgatctcgtccgcaccacggagatcacccccgagacgttcatgtcccacaaggacgctctcctcacacacatgcgcgaattcagctccgacctctcgcgctatgcaccgaaactcgcggcggcgatcgcgctcgtggaagacaccggcgtcgagacgatggtgacgcgggccgccgccagcgacgagcgagtgttcctcggcatcgaagagcgcgaagccgattggcgcgcgcggtgggcggggctgacgcattggttcgtcgggagcgaggcgggtctcagcgagtcggagcgcctgcgcgagggcacgatgagtgccatcgccgccgtcctgtcgctgctgcgccgcgtcaccgagacccgcaaaggtggtgtcagcagagagagccaattgcgccacctcgcaggctggttcgccgcaactccgaccgaggacgccgcgcatgcgctgttccaggccgtgttcgatctcggccgtccgcgccacctctcgatggtgcatccggacgccgacatcattcccgacacacggtcgtggtgggaggcccagcccgtggagatctcccgcacgctggccgagaccggacgtcccccgtcgcccggcctgcccgcgcgggtacagcgcaacgagggcagcgtgcgccgcctgcgggaggaacagctgaccgcacaacgacttcgcgccgccgccgcccagtcgctggcccggggcggggtctacgagcgggagctcgacgaggccgaaaccgacgtgctgctgagtctgctcaacgccgcgctgacggcgcgggttccggtcagcggccgcgtgaacagcagcacaggatcggagaacggcgtgaagctcaccctcagcccacacagcgaatcgacggtggtgcgcaccgcccggggacgtctgcacctcgacggactgcaggtgagcgttcggtga

SEQ ID NO: 50852 - DNA, 1395 bp, Rhodococcus opacus
gtgaaggcacgggagatctcgccgctcgccctcgattcgtatcagcgcgccgcccgcgtcatcctgtcgaatcacctggtgacacagacctatccggatcgcatcgcactccccctgctccgccggtgggccaccgaactacgcgacgatctgatgacgctcttcgggtaccgactcgaagtcaccgagacgaccgcccggctgttcacggtgagcgaccggctcgacgccgggacgccggccaagacggccaccgaccgcacgttcgaccggtaccgctacgcctatctcgcgttggcgctggccgcactcggccgcgccggaaaccagatcaccctgtccgaactcgccgatcacgtggccgccgacgccgcacaggtcgacggtgtggatctgtccacggaacgcgcgtccgaccgggacgcgttcgtcgacgccgtcggctggctcgccgcccgcggcgcgatcgccctcgccgacggtgacgcgggcggctgggccgccaatcccgatgcgggagaagcgctgtacgacatcgacaggtccgtcgtcatcgccctgttccggccgccgcgcgcactgcagcacctccggtccatccgcggactgctcgccggcgcggacgcggtgaccgaggacgacacctcggagttcgggacgacccggccggtcgacgtgaaggagaccgcgcggcgggtccggcgtgctctcgtcgaacggcccgtggtctacgccgccgacctggacgatcacgagctggtccaactcgcgctcccccgcaccgcggccgacgtcgagttgctcaccggactggtcgcggagcggcgtgaggagggtgtcgcgatgatcgactcctccggacgtctgtccgacgtccggttccccgggacgggaacggtcgcgcaggtcgcgctcctgctcgccggggagatcgccgatcgcgtactggacccggacgccccggagacggcccggatgccgctgccgcggggcaggatcgacgacctgatcgaacaggtcgacagcgccattccgcagtccgggatcttcgacagcctcgccggccacgacgggttcgaacccgcagaccccgcccccgcggaccggctgttccccctcgtcgaggacgagtggatcgccggcaccgtccggacactgaccgaacggttcgggcgcacgttcgccgccgggtggcaggcggacccggacggtctgggacgggcggcgctggcgctgctcgagcggctacgcctcaccgcggccgtgccgggtggtgtgctcgcactcccggcactcgcccgctaccggggtgtggtggtcacgatccgcgaccgcacacccgagatcgacctgttccagagctcagcgaacgacagcgaggaagtcacagcatga

SEQ ID NO: 50853 - DNA, 4158 bp, Rhodococcus opacus
atgacgagtgcgcgtttccggcccacccgcgccggaatcatcaacctctgggactaccgcgatcaggagttctccttcgccgacggtcgcctcgttctccgcggtcccaacggctccggcaagacgaaggccctcgaagtgctgttcccgttcgtcttcgacggccggatcgaaccccggcggctcaatccgttcgccggcgaggaacgcaccatgaaatcgaacctcctgtaccgcgggcaggagagcgcgtactcgtacgtctggatggagttctgccgcggcgcgaaggacgaccccgaggccgtcaccgtgggcatcggcatgcgcgccacccgcaccaacgacaaggtcacacgctggtacttcgtcgccgacggtcgcgtcggcgtcgacttctccctactcggcaccgacgaccgtccgctcacgaagaagcaactgggcgaacagatcggcaccgactccatcaccgaccggccgctcgactaccgcaccgccatcgacgcccggatgttcgggctcggcgtccaacggtacgaccagctgatcaacctcatcctcacgctccggcggccccagctcgcgaagaacctcgaccccaagggactgtcgcaggcactcaccgacggtctccggccgctcgacgagcaactggtcctcgaggccgcccgctcgttcagcgacatggaggaggtcggccgggcgctcgaggggctggccgcggcggaccaggcggcgcagagcttcgtcggcgtgtacgcgaaataccttcgccagcaggcgcgtacggacgtcgaccatctcgcgacccgtctcgaggccgtgcggtccggcatcgccgccctccacggggcggccgccgaccgggcccgcagccaggagagccgggcggccgccgaggaccgcttcaccgccgccgaacgcgcactcgaccaggccaatgcaaccctggacgcactgaagcggtcgacggcctacgagggacggacgcagctcgacgacctcgcgcaggccgtctcgacgctcgagaagtcgaccgaactgcaggccgagaaggcacgcaaggccaaggcgaccctcgaacagcgagccgaggagcacgacaaggccggcgacgccgtcgcccgcgccgtcgaggcgctcacccacgccgaagacgaacttcacctcgccgccgaggacgcgggaatcacctggaccgcactgcccgagaatgcgcggaccgaccaactgaccgcggcgctgcgcgggcacaccgaggaacgcgacggcgacatccgcgcggtccgggcagcgctcgccaccgtcgagagggcggccaccgaacggaccagagccgacgaggcggcacgccgcggccaggagcagctcgacaccgcgacggtggccgttctcgaagccgagaccgcggtcgaatcggcccgcagccgctgcgccaccgaactccgatcctggtggacggaacagtcgtccctctacgccgagatcgacgcgcccgcttcactgttcgaggccctggacgccgccctcgcccggatcggcgacgacgacgccgcgaccctgacggagacgctgaccgaacagaccacggacgccgtcgacgcgctccggctgcgccggcagcagtacgaccgcgacgccgcctccgccgaggaggcgatcgccgaacacgaatcggcacgcgccgccatcgaatccgagcacgacgacgccccaccactctcggccgcccggcacgacgcccgctcccggctgaccggtgcgccgctgtggcggctggtccgattcgccgacagtgtcgacgccgccgcggcggcgggaatcgaggccgcactgcaggcggcgaacctcctcgacggctgggtgaccgtcgacgacgcgctccccgacgtcgaatccgaacaattcctcgtggccctgccggccgaggatcggcccggcggcacgaccctcgcggacgttctcgaggtcgagcaggacacgggtgttcccgacaatcgcgtacgcgggatcctcgaatccatcgccctcgaatccctcgacctgtccgaaggaccggtgggtgtcgccgaagacggcgcgtaccggcagggaatccagcggggacgccacacgaaatcggacgccgagtacatcgggaccaccgcacgggcccgcaggcgcgctgcccgtatcgccgaactcgacagcaccctcgaggaaacccgggcgacgctcgccgaagcccgggcgtccgcggatgcggcggcgtcgctgctgtcgcggaccaccgcggcggcgcaggccctgccccgcacgggatcgatcctcacggcgctgaagaaggtcaccgaatccgcaggcgcactccgcagccgctccgacacggcgacaacggtcggtcgcgaactcgaccaggccatcgccgacctgtccgcgaaggagaagcagctccgagccactgcgtccacgcaccggactccccacgtcgcccgcgagatcgactcgctcgccgcggccgtccggcacttcgagaagcagggcgagatggtgcagcggtgcaggcgcgaacacgccaaggaggtggagcacacccgcgagtccgaggaccgactgcacgaagcgcgcggcagcgcggaggagttcgcggaagaagctgccatcgccgaagaggttctcgcgcaacagatccaacgcctcgagacgctgcgcgacacgctcggagcgggggccgagcagttggaccggcagctcgaggaggcgcacacgcggatcgaggcgtgcaggaaggagcagcgcgacgcccgcaaggcggacaaggacgcgggtgaagctatcggcaaagccgagggcgcgtacaacacggccgtccagacgctccggctggcgctcacggaaacgcacgccgacgccgcccgcctcgcgccgtatgcccggcgcgacctactcgaactcctcggcgtcgacggcggccacacctggccggcgagctccgcggcgtggatgagtgccgaacagctggtgtatcgcatccagaacgccgaagacgacaccccgatcctgccgcccgaagtggacgcgctgttccgcgcactggacggcgccaccgaatcggtgcgggtcagcgactcggcgcgcaagtcgacgcgcaccgcgctcaccaccgcgctgcaggacttcgacgcacagttggcggccgccggccaggactaccggttgcagtgggacgccccggacggcgtgaccgtggtgcaggtgcaggacgacgaggggtactcgtcgatcggcgagttcgccgcccgcatcgcgtccgcgcgctccgatcaggaattgctgctcaccgaatccgagcgtcgcatcctggaggacgcgctgctcacgggtctcgcacagcagatccacgaacggaccgtcgacgcccgcgaactcatcgcccggatgggcaccgagatgcgggagcgccggatgtcgtccggcaacaccatcggcgtccactgggtgctcgccgacaacctcgacgacagcgcgaaggcgatctccaaactgctcgagcgcgacacctcggcgctggggccggacgagctcgccacgatgcgcgcccacttcgctcaccagatcaggactgcccgcgccgcccatccggagcgttcgtacccggagatcctggcgtccgccctcgactaccggcggtggcgggtgttctcgttcaccctcatcagcggcaccggcaacgaagaccggctgaccgtcgcccggcacagcgccctctccggcggcgagcagtccgtctcgctgcacctgccgttgttcgccgcagcgcacgtcatgctcgattcggccgacccccatgcaccgcgactgctggcgctggacgaggcgttcgccggcgtcgacgacaacggccgggccgaactgctcggcctcagcgtgcaattcgacctcgacctgttcatgaccgggttcgacctgtggatcacgtacggcggtgtgccggggtgcgcgcactacgatctggcgcactcgacggcagagcagagcgtcagcgccacgctgctcgtgtggtcggatggcgaactgctcgccgaacacgacggcaccgacctggcgcaggcgctcggttcgcccctccgcaggcgggtcccgacgcccgcggagggtgccctcgagttcgcctga

SEQ ID NO: 50854 - DNA, 1554 bp, Streptomyces scabiei
gtgcgtagggttccacccgagatgttccggttcacgacggtggagcggtccgagctgtacggggccgtgctggacgccttcggtgcggccggcgagcacctggagacggcgctcgggctcgacgcggtccgtgagtggctgcgcggggcgggctgggcggccgcggtcgaggacgaggaactgcatgaggcactgcgcagactcgtgcagtgggagctgctggacgtggtgcacaaccacgcggagaactaccgcacggccgaggactacgagcggcgcaacctgcagtactcgctgacccgccggggcgaggccgccctcgccggagtgcggcacgcgctggaggtcctcgcctccacgggggcgctgcagacagccgtgctggaggcgatcgccgaccggctggacgaactgtgcctgctgtccgccgaacccgcctcggccgatcgccggatcttcagcaccctgcgggagctggaggggcatctggacgccttggtggagaacaccaaggcgttcaacggcgaactgcagcggctgctgcgcgccgagagcgcggatccggaggtgttccgcgaggtcaaggccgccacggtcgcgtatctgcaggagttcctggtcaacctggaccggcgcgggcagacggtcgccgccgccgtggcccgggtggaggagcggggcgtcgccgtgctgcgcgagcgggcgctgagcggggccgagttaccgccggtggccggggaggatccggcggccggctggctggagagccgacgggcacgctgggcgggcctgcgggcgtggttcctgcccgacgacggggcgcgcccccggatcgagcagctgcacgacatcgcccggcgggccatcgtctcgctccttcaggtcctggagcggatcaacgagtcacgacgccgttcctccagcgccgtgcaggacttccgggagctggcgcgctggttcgccgccgccccggcggaggacgacctgcaccggctgtggtcggcggccttcggactcggcccggcgcgccacgcccacctcgcccaccccgacccggagttgatcccgtcgtcccggtcctgggccgagaccccgcccgtggaggtgtcggcgctcctgcggaccagcggacgcacggagcgcttcacccgcacggccagggtgcgggacgtcgcggcggtcagggccgagcgcgccgagcgggcccgcgccgagcgagcggaactcgcgcgagcctggcgggcgttggagacggacggacccgtgcggctgtcctccttcggagagctggatcccgccgtcttcgaccggcttctggacctgctgggccgtgccctgtccgcccggccggacgcgggcggactgcggcgcgccaccacgggggacggccgggtggagatcgagctggctccgcatcccgacggccggaccgccctgctgcgcacggcgacgggttcgctcgccggaccggactacctcgtccacatcaaggaggcgggaggggccaccgcgttcccggccctccgcgccgcacggcaggaggcggtgggatga

SEQ ID NO: 50855 - DNA, 1278 bp, Streptomyces scabiei
atgagcaccctcgccaaccaactggccgccgcggaacgggaggaggtcgcccgcgccgtccgcctcctgctggcccgccccctgctcaccgaggcctcggatccggccggcttcgagctggtacgacgccgtcgcgacccgctggcccagtggttcgactacacctgcggctggaccctgacggtggagccccgccgcggctacgcccgcctcgccaaggtccgcgctgacccggacggctcccgcccggcccgcagggcgcgttcgggccgggccccgttcgaccgccgccgctacgtgctgctgtgcgtgaccgcggccgagctgctgtcgatgccgatgacgaccatcggcatgctcgccgaccgggtcgtccgggccaccgccgccgaccgggcgctgcccgcgttcgacccggtccaccgcgcggaacggatggcgttcgtcgacgtcctgcggctgctggagtcgtacgacgtgctgcgtgcggtggacggggcgaccgaggcgtacgtcgcgtccccggaggcgaaggtcctctaccgcgtggacaccacgctgctgatgcggctgcccgcggcacccgtcggcgcctcccgcctcgccgttcccccggacgaggtgcccgcgcggttcgaggacctcctgtcgggcctggtgcgcgagcggcgctacggcggcccggtcgcgggcgacgggacgacggaggaagagcacggcgagacggccgccacggacgcccagcgcaatctgaggctgcgtcactcggtgctgcgccgcctcttcgacgaccccgtcctgtaccgggcggacctcgccgacgacgaactggcgtacgtcacctccctgaccggacgccagatcctgcgccgctcggtcgaacaggccggcttcctcctggaggaacgcgccgagggcttcctgctcgtcgacccggacgggatcgccaccgacgcccgtttccccgacgacacctcgaccgcccgcgtcgccgcgctcctcctcctcgaaccactctgcgccgcgcctgcaggcctgctccccgaacagctcgccgaggccggcaccgatctgctgcgccgcttcccgcgctgggccaaggcctatcagtcggaggacggcgctgcccggctgaccgacgacgccgtacgcgtcctgcgtgatgtcggtctggcccaccggaccgggggccgtgtggtcgcacgcccggccgcacaccgctaccgcctgacggagacgacgagttcggtcccggaagcagagggagacaagcagtga

SEQ ID NO: 50856 - DNA, 4179 bp, Streptomyces scabiei
gtgagtgtgacggaacttccgttcccgcggcggccggagttctccctcccccggcggccggaatccaccgagccggccgggacaccggcgggagcggcggacgcatccggcagccgctggcagccgcaccgcgcgggcatcctcaacgtctggcgctactacgacgagaccttcaccttccaccagggccgcctgctgctgcgcggccagaacggctcgggcaagtccaaggccctggaactgctgctgcccttcctcttcgacgccagcctccgccccaaccgcctttccacgttcggcggttcggagcgcaccatgcactggaacctcctgggcgaaggggcttccggcaagacccgcgtcgggtacgtgtggatggagttccgccgcgtcgccgacgacggtaccgagcgttggttcggctgcggggcccgtctgcaggcgagcgtccacaccacaggggtgcacgccgactacttcaccaccggcgccaggatcgcccaccccggcggcgtgctcctggtcaacgaggcgggacagcccctgacccgggccgccctcgccgaagccctgcacgaccgcggcgacgtgcacgcctcggccaccgaccaccgcacggccgtacgacgtgaactcttcgcaggcatgggggagcagcgatacgagtcgctgctgtccgcgctgctccagctgcgccagcccaaactctccgaacggctcgacccgtccctgctctccaccctcctttcccgcgcccttccgccgctgggcgagggcgagatcgccgaactcgccgagggcttcgaacggctggaccgccagcgggaacacctcaggcggctcgacgacgaggtggcggcggccgacacggtcgccgcccggcagcgcgcctacgcgcgacgggtcctgcgcgccggttcggccgcgctgatctcggccaccaccgagatggacggcctcacccgcgccgcccggcagagcgcccaagagctcgaacaggccctggcacaacgcgagtcggcccggactctgcgcgaggaccaggagctgcgcgcacacgccctggaggagaccgtcgagggcctgcgggagagcgacgcctaccagcagggtgaggaactggaccgcctccgccgccgcacccgagaagacgcagccgccgccggacggctgcgcaccaccgcccaggccgctcgggccacggcggaggaggacctcaggcacgccgatgaggcggcgggccgcgcccgcaccctcgaagagcacgcgcgcgaggccgccgaggaagcccgcaggtcggcccggtcggcgggcctggagtccatccaccacgaggcgaacacgatcctgcgcgcggaccccgcggtgcccctgcccgagggcacacggcgtgcggtggacggcggccggtccgaggaacccggcgccacaccgacgggcgagaacggggcccggcaggcccgtcggctgctgcggggcgcggtcaccgcccgacggcagcaggtcgccctcatcaccgaggcgatggacgaccatgatcgcgcggtacgcgaccggggtgccgccgaggacctgctggacgaggcccgtgcccggttcgcggaggcgatcgcccggcgggacgaggcgtccggggcctgggacgacgccctcgccgcacaggcggaacggctgctcgcctgggccgggggctgcacggaactgcgcatcgccgacccgggggaactggcggcgagagcggcgaccgaggctgaggtgacggccctggccgaagccgccgcccgcccgccggaacaggagatcgccactgcggagggcaccgcccgggccgcgcgtcaggctctgcgggacgagcggagccggctcgtggaggaggtgcggaggctcggcggccagaccgatctgccgcctgcgcccccgtccacccgcaccactgtccgcacggcgacggcgggagcacccctgtggcggctgatcgccttccgggaaggcgtcccgctccccgtccaggccggggtggaggccgcgctggaggcgtcgggcctcctggacgcgtgggtcagcccctacaacgggatcagactgccaggtcacgacacccgtgccgaggccgcgctggccgtgaccgccccggggcccagcctgctggaggtgctgcggcccgaggaggacatccccgtcccggtcgacaccgtgacccgcctcctcgccggtgtcgcgtacggcgcgggtctgcccgacggccactccgcggccgtgtcggccgacggtgcctggcgtctcgccctcgccaccgggtcatggaacaagccggaaccggcccacatcggcgccctcgcccggcagcgggcccggcagcgcaggatcgcagaactgaccgaccgcatcggcgggacgaacgcctccctcgccgcgctggacgaccggttgcgcgacctcgcggcccgccgcgcccggctggacgccgaccgtgcggcccgccccgaccaccgggaactcgaagcacggcggcgcgaccgggaccgggccgaggaggcagtggccgcccgggacgacgccgtacgcgacgccgccggacatctggcgcgctgcgagggagaggtggcgggcgccctgcgcacgctcggccgccgggccgcggaacaccaactgccgaccgaccgcggccggttgcgtgaactgtccgccgacatcgacaggttccgggacaccgccgacagctgggtggacgcccgcctcaccgcgaccgccgcggccgaccggaaccaccattcggccgcgcaggcggagcgttcgcgccgggcggccgaggaacgggccggggacgcggccgccgccgaagcgggggcggcgggtctgagggcacgtctggaggcggtggaggcgaccgtcggcgaggactaccggcagatcgtcgcgcgcgtcaccgaggcacgcgacgaactgcgccgctgcagggaggcggccgcccgggcggccgatctcctgctccgtctggaagggcgtatcggcgggctgcgggccaccagtggacaggacgccgtacgacgggagcaggccgtcctggtccgggaccgcgcggcgcagcggttccggcacctgtgtctggtcgggctggccgaggacgccggaatcgcaccggaacccgacgccggggacggcgccaaggccaccctggaggccgcccgcgccgtcgcggcgaactgggccgggatcccgcacgccccacgcaacctgggcgacgccgcgacccgtctctcggaagcggtccacgaggcccgccgacgcctcggcgcccgcgccgacctggacctggaacccgacgacgacgtccagctcttcaccgccaccctggacggcgtacgcgtgggggcgacgggcctgctcaccacgctcacccaggaacgcgaccgcagccgcgacgacatcaccaccggcgagcggcgcctcttcgaccagatcctcaccggcgacatccgtcggcacctcgcggtccgcatccgtcaggccggtgaactcgtcgaccgcatgaacgggcacctggagcgggtccgcaccgcctccaacgtcgccgtccaactcgtctgggacgtccgtccggatcttccggacagcacccgcaccgcccggcagctgctgctgaaggaccccggccggatcaccgagaccgaccgggaggccctgcacgccttcttccgcgcccgtgtcggggaggccaagggcagcgacacggccgcgagctgggaggaacagctcggcgaggtgctcgactacaccgcctggcaccgcttcaccgtccgcctcgaccgggcgaacggcaccggctggcagccgctgacgaagaagctgcacggcgcgctctccggcggggagaaggccatcgccctgcacctgccgctgttcgccgccgtcgccgcccactacgaggcggtgcccctggcaccccggccgatcctgctggacgaggtcttcgtcggtgtcgacaccgtcaaccgcggacaggtcttcgccctgctcaccgcgctcgacctggacctcatggtcacctccgaccacgagtggtgcacctacggcgagctgcccggaatcgccgtccaccaactcctgacggacgggcacgacgacgcggtcaccagcgcccgcttcgtgtggaacggaaccgacctggaggcgggatga

SEQ ID NO: 50857 - DNA, 1233 bp, Streptomyces scabiei
ctgggcgaacgcacccttcgccgcccggaactccgcccgctctggcacacggtgcacagtcgcctctcctccggccgccccgtcacccgggtgcgtccgggcccgctcgacgacgcccagcgcgaggccctcgccgatctgctcggcctggaccggctgccggacccccgcccctttgtcgccctggcccgtctggaggaggccgtcaccgaactgtggggccgcacggtacgcgaaaccgtcaccgcgctcgtcggccccctcgacgaccgcgcgggcgaacgacgccgccaggaaggcgaacgggccgagctgtgggcctggttggacggtcacgccgtcgtgcgggcccagcccgccctcgccgactgggccgcctcgtgccgaaccgccggcctggtcggcggctcaccggaacgcacccggtccctgctgaccgacgcactgaccgtgctcgcggcgctgcccgccgaggcggaaccactgcccgtgttctcggcccgggtcctgagaggcgactcccacgccctcgacgacggcacccgtccgtccgccctcgtcctgcgcgcgctggcggccctccatgacggcgtgccgccgcagtccgcggcggaccggcgcgccctgtgggcgcgcgcgggcgtcgccgacgacgacctctccgccaccgttctcgtcggtggactgcgcccgtgcggtgacggcccgctcgcccgcgtggcccgcgtctgcgccgaggccggtcagggcgccgccctgaccctcgcccaactacgtgccccgggcgagttcaccctcgccgcggatcccgcgcccgtcgtccacgcggtggagaaccccagcatcctggccctcgccgtacgccgcttcggcccggcctgtccgccgctcgtgtgcacgtcgggctggcccaacagcgcggccgtccaccttctccgtctcctcgcggaccacggcgcgaccctccgctaccacggtgacttcgacggcgaaggcatccgtatcgccgcgtatctcctggacaagacaccggcccggccctggcgcatggcggcggcggactaccgcaccgcggtcgcccgcaccccgcacggcccccggcccggccgtctcaccgaggcgccctgggaccccgaactgacccccgccatcctcgaccacggcaccgccgtcgtcgaggagctgatggccgacgtcctgctggcggacctcgccgcgacggtgcgggcctga

SEQ ID NO: 50858 - DNA, 1569 bp, Streptomyces scabiei
gtgttcgagcgtgatgacgcgggagtgtccgagtcattcgatcttgattcgttgacggtgggcgaccgtctgcggctgttcaatttcacgcagcgcgatgatcccttggcatacctgtgggtgctgcgggcgatgaacgtactgcgagcggtacaccaactacaggtccaccccgacgatgtggcgaatacgctgaacgaactcgcgacagtgcacgaggaggtaccggccgccgccgacttgaacctgcgcgggatgctcgacaatctctcctcggacaacgagcaggtcctctaccgggtggaggacccgttgcgttgcggcaatctggccgcgtaccggaaccggcagtcggtctaccagttcacggagatcggctaccgcgtctactgcgcggtggaggaggtcatcggctcccgggtccaggacgcgaacctgtcgcggctggtcttcgccgacatcctggcggacttcaaggcgctggcgagtgcgaaccatgagggcgaccaggacgaggtctaccgcaagctcgcccggctcgacaacgtgctggaggacatgacccagcgagcggcacggttttatctgactttgaacgacgtagcgcgtacgaccgacgtctccccggagacgttcctgcggtacaagcacgcgctgctagcgcacatgagtgagttcacagcagagctggagcgctacgcgccccggctcgccgaggccgtgtacgaggtcgaagacagcggggtggagacgctgttggaacgggctgcggcggtggatgaacggccgatgatgcggccggccgcgcggcttgaggactggcggcgacggtggatgggcctgcgccagtggttcttagccgacggccctggggagaccaaggccgctcagctgcaaggcgctacccgcacggctatctcaggagtcattgggttgctgcggcaggtgacggagtcgcgtcgaggaggggtgagccggaccacccagctgaggcatcttgccgcctgggcggctgctgcgccggatgagcaggcggcgaacgcgctggtgtccgccgctttcgacctgcgttcggtacggcacctgtcgggagcccacgacgacgatgaccagatttcgccgcgggcaacgtggtgggatgcacccggtgtggagatcagcatcagcctgttccggcatggcaagcggcctgcgccgggcgggccgcagccagtccggacgcgtcgtggcgcgcacgcccggctgcgagagcagcagctggcggatcgggccgcggaccgggaggccgccacggatctcctggaccacggtccccacgaccggctactgaacgaggcggagacccgagccgtgctcaagctgctgacccgtgccctccaggcacgaacagtcgtcgcgggtcggctgcgttcagggaccggcagcagcgacgtgctgacgctacgtctggtcccgaacgagcgcggcagccggctgcggaccgagaccggcacactgcacctgcccggcttcgccctggagatcaagcctcacggtgcgatgcgccggcgccgaacggagaagccctga

SEQ ID NO: 50859 - DNA, 1419 bp, Streptomyces scabiei
atgcctgcccatcgcgtcgccgcctcggtggagcctgcggacctcggctcgtaccagcaagctgcccggctcatgctgttgcacggcgtcgtcaccgagagttatccacgagccaaggctcttgctctggtgctgcagtggtcagacgaactggccaaggacttccgtgacttgttcggatactccttgcagacaagcgcccgtcacgcacggctgctgcggcggctggatgctttcgatgccagccaggcgttcctcacggtgaagagcaagaggccgttcgaccggcggcgactggcctacctgtgcctgatcctggcctgcttgcaccggtcacgcatcgagatcaacctcgccgatctcgtcaagctgctcacaccgtccgccaacgcgatcgagcacctgggcttcgatgcgaccgcgccgggccacaaggacgcagtcgtggatgtgatggactggcttgtcgaccggggtgcgctgcggatctccgatggctccacggaggactgggcccgtgaccacgaccgcggcgacgcgctgttcgacatcgaccacgacacctgtgcggcgcttttcagaccgaacaagccgctgcagcacctggtcagcgctgccggcctgctggacaccccgaccgccggcactggacgggacccccgtcggcggtttgctgcccagcgagctcgccgactcctgatcgagcacccggtggtctacttcagcgacaccgacgcggagacagcgatagcgctgcgccagcccaccctggccgaggacatcgcacggctgaccggattgccagtcgagcgccgcgccgaggggatcatgctcgtcgacaccacagggcacttcactgacaagcgattccccggccgcggcggagcggtcaaccgcactgccggactgctgctcgcgaagatcgcggacttgcgggaagacccggaccgggccagcagtcttcagtacctcatgtccgccggaccaggggaggaacacgcaaacctgctcagccgcatcgacatggcgctgccgcacgctggcacgctcgaagccttggcgcacgacccgcatgcggacgctggttggcacgcggacgaggccgatccggacgtccgagagcatgaagggcagacgggcttgcccttcgtggaacacggcacgttggagcagatgatcaccgagctctatgaagagttcgggccttcctccttcaccaacaagtggcaggccgaccccagcgggctgctggcagaggccgtcgctctcctggcggatctacgcctggtccatgtcgtccccggcggcattctggtccggcccgcggccggccgctaccgcaacatcaccgccgtcctgccgcgccccgcgcacggccagttcgctttcgacttccccactgaggacacctctcgatga

SEQ ID NO: 50860 - DNA, 4320 bp, Streptomyces scabiei
atgacgctcatcccccactctcgcaccgctgacgagtcggaggttcgcttcaagcccacccgcgccggagtgatcggcctatgggactacaccgacgaggaatttgtcttcgccgatggccgactggtcctgcggggccataacggctctggcaagaccaaggccctcgaagtgctgttccccctcgtgctggacggtgtcctcgacgcaaggcgtctcgatccgttcagcggcgaggagcggaccatgaagtcgaacctgctctacaaggggcaggagtccgcctacggctatgtgtggatggagttcgcccgcgccaacccggatggggaggtcctcgaagccgtcaccacggggatcggcatgcgggtgaccaaggcgatgtccacacccgcccgcttcttcttcgttaccgacggccgagtgggcatcgacttcggcctgctggacggggcctcgcgcccgctgcgggagaaggccctggaggcgctgctgggcaagaaggccatcttcgatacggcggaggcgtatcgggagaagatcgatgaccggctgttcgggctgggccgtgagcgctacagccagttggtcagccttctgctccagctgcggcgcccgctgctggccaaggatcttgatccggtcaagctgtccgagacccttaccgctggcctgcgccccgtcgacgatggcctcatcctgcaggccgcccgagacttcgagaacctcgccgagatccaagcgctcctcaacgccctgtcgggggcggataccgcggtccgtaacttcctacgtgactacaccacttacctgcgcgcccatgcccgtgaccgcgtcgaccacgtcaacggtcgcatccaggacactgccgcccagtgcgagaagatcatggaagccgcggaggaccgccgtacctcggagcgacagctggcttccgcacagcacgagcgggataccgctgagcgccagtgcaatgagctcggcgcccgcctggccgagtacaaggaccacgacgccatcaagcagcgggacggcctcaaggagctgcgcgatcgcgtacacgcggaacgccggggcatcgccgacagcgaacgccacctcagccaggcccagaagagcttggccgccctcaagggggaggcagagcgcgctgtccagcggcacggtgagctgcgcaaagcggcctcccggcacaccgacaacctgatggacgccgcgcgccgctgcggcatcctgcacgacgacgccacgctggatcttggtgccgaactggacacggacgtggcaggtcgcgtagccgcgcgtcgcagcgaactaaaggacgtacgcgcccacctccgcgcgtttgaggacgccaagaaagaccaggaccgcgagcaggaccactgggacacggccagcggtgagctgaccgagaccgaacgacagtccgccgcagcggccgagcaactcgagatcgcccgcaccacggccagccaggagctggacgaattcatcagccgctggagcagcggcaacgacatcgcggtcttggccgccaccgacggtgacgcgctgcgcgcggccatcaacgcggtgggggaccccgaagcggccccgctcttggaggtgtttcgttccctcaccgaccagcgccgtaccagggccgttacccgcgtcgagaccttggagcgggagcacagcgacgctgcggacgcgctgcgcagcagacaaggtgagcgcgacacggtggccgccgaggctgatgacgcgcccccgcccagtgacctgcgtcccgccagccgcgatgatcggcccggcgctccgctgtggcagctcgtacggttcgccgatcatgtcccggatgaccatgcagccgccgtggagggcgccctgtacgcggccggcctgctcaccgcctggctgcaccccgaccccgtgctgaccgatcaggcactgcacgacaaggtcgccgacgcctatctgcgccccctgcctcccgcgcagcggcccaccggacccaccctggccgacctactggtcgtcgaagatcagcagctcgtcgacgccgcggccgtacaggctgtcctgtcgtccatcgccgtggcggacgacctccctgcaatggacgacgcactgcccgctcctgcggtcacgaccggctcgcacttcagcctcggcgtccaggtcggcgcgcatcccaagaagcagccggagtacatcggggccaccgcgcgggccgccaggcggcgtgaacggctgcgattgctcgacgaatccatcgccaccctggaagctcagctcgccggcatcgaagagcagcaccgttacgcgcaagaggcattcgacgacttcgaccgcgccaggcgcgagttcccccgcacccagccgatcaccgaggcggtaggcgaggtggccgtggtggcggagaaggtcgccggtgcccgccgccgcctcgccgaagcccgcaagcggctcgacggggcgatcgcccgcacccatgagaagaacaggcagcttcggcatgcggccgcggccgcacgactgcccaccctccatgaggaactgaacaacgtcgcccaggccatcgacgacttcgccgacgccggcaaggcgctctccacatgccgtgagcaggccactgccgccgagcgcgacatcgccggccgccgggacatcatcgcaacgcagaccgagtcgtgtgcagaacaggctgaggcgctacaggcgcgtaaggatgagttcgccgttcaggaggaacgtctgcgcacccaggaagcaacgctcgaagcccccctgcaggcgattctgcagcggatcgcggacgcggaggagcagctcaccgcagcgcggaagacgtacggccgtgcgaagaaggacgcggaagcgcagcgagaccggcttctgaaggccgaccatgccctggagttcggccgaacagcactggccacggccgtggctgagcaggtgcgcaccacgctcacgctggagccgtatgcccggcccgacctcctcggcctcctcgaagcgaacgccgagaccgtctggcttccgcacgacacgtggccgagccccgagcaggcagtccaggcgctcatggaccgcctgacctcgcccggcacttccctcacaggcgtggaggccgcccagaacgtcgtccccgcatccgtcgcctccttgatcaacgcgctcgacgaggcgacccgaggccggccgatcaacgcgagcctcctgaagaccgtgacaaccaagatctctaccgctatcaccgcgctggaggcagccctgctggagtccgatcagggctacctcttcgagtgggagccggccggtgacatcatcctggcccgggtcaccgacagcgaaggcccggctcccgtagcggacttcgcccgccgcctggccgaacagctcgctgatcagagcgtgctgctggaagacaaggaacggaccgtcctggaggacggactcctgaccgggctggccgaacagatccacgatcgcaccgtcgccgcccgcgacctggtcaggagcatggacgccgacacccgctccaagccgatgtcctctggtcagacggtgggcatcaactgggtgatctccgacgcgctcaccgactcccagcaggctgtcaacaaactgctcgacaagaacgcctccggtctcggcccggccggactggccgaactccgctcccacctgcgcagccagatccgtgccaaggccgctgccgacaagaagaggagctaccagcaagtgatcgcggaagtcctggactaccgcgcatggcgcaagttcgaactccgtctgttccggccgggcatgagcgaggaggagcggaataagggagaactgctcaccaaggccaaacacagcgtgatgtccggcggagagaagtccgcctccatccacctgccgctcttcgcagccgcccatgcccagtacagctccgcgtacccgacctgcccgcggctgatcgcccttgacgaggctttcgccggcatcgacgaaaagtaccgccccgacctgcttgccctcacggccaagttcgacctcgacctcttcatgacgggctacgacctgtggattacctaccctgacgtgccgcagatctcgcactacgacatgaagcatgacgaggcgtctcacaccgtctccgccatgttgctggtctgggacggcgagcaggtcctcgatgacctcgagtaccccggatccgacgatctggccgccgaactcctcggcttcacgccccgccggcacgttcccgctcaggcaggactgctcgcggacatccccgaggacgagccgacgaacgacgaaaccgaggaagcagaatga

SEQ ID NO: 50861 - DNA, 1329 bp, Streptomyces scabiei
atgactgggccgacagaggcatacgagcgctaccgggcccctgagttccgccggctcctggccgctgcccggcgctcgctcgagcgtgacggcggcgagatcaagggctccatcggcctggccaacccaaccacggcagaacgcaacgccatcatcggcatcaccggcacataccggtcggccgacgtccgccgcatcaccatccccctctcagcattggagcagagcgtccacaacgtcacgggcatgtcgctccgcgatgtcctggaacggatcggccccaagctgcgctttcgcgccgacgagcggaccgcgctcgatcaggcccggcaggcgatcctcgctgagggcgaggccagccccctgcacgccgagcactcctggttccggcagtggctggccggcctcgcatccgacggcacgatcaccacactgatcaataagaaggacacccacctcttcagccaggccgtccgcgtcttggaacacctctacaaccggcccagcgacgctccaccgatcatgctgcccgccttggccgacgccaccacaggagacaccaaagccctcaacaccggccgcggctcgctgccgactctggtcctgcgggccctggccatggcacgtggaaagccactcgaaccaggagccgaggcccggcgcgagctgtgggacgccttcgacgtcatcgtcgacgacctcgccagccgtgtcctcgtcctcaacctccccgcgaccggccagggactgggccagtggctcaccgacgccgcccgctacggcactcccttccacgtcaccctccaccagctcatcaccctcccgatcaccgtgaacctgccaacggtgtacgcctgcgagaacccggctgtgctccgccgcgccgccggtgagctcggcgccggcagcccgccgctgatctgcgccgagggccgtccctcgaccgcctttcaccggctggcgcgactgatcgtcgaagctggcggcaccttgcgctatcacggggacttcgactggcccggcatcgacatgaccaaccagctccgcgcccgctaccaggccgaaccctggcggatgagcgccgcggactatctcagcgctgttcgcgccgacagcgatcacgtccgcctgagcggcaaggcacaggacaccgtctgggagccagggctcgctgaggccatgaagcgggagaagcgcgcggtctatgaagaggccgtcgctgacgtcctcctggcggattggaagggcccggccaggaaggagggcgacgggcaagcgccagggctacggcacggcctcccccatgagatacaagcgcgtgcccagtga

SEQ ID NO: 50862 - DNA, 1818 bp, Streptomyces scabiei; identical to SEQ ID NO: 49924

SEQ ID NO: 50863 - DNA, 1308 bp, Streptomyces scabiei; identical to SEQ ID NO: 49925

SEQ ID NO: 50864 - DNA, 4134 bp, Streptomyces scabiei
gtgagcctgacagagcttcccctgccccggcggcccgaggccaccgagcccgcgcgcccggcggcgcgagcggcggacacacccggcggccgctggcagccgcaccgtgcgggcatcctcaacgtctggcgctactacgacgagacgttcaccttccaccggggccgcctgctgctgcgcggccagaacggctcgggcaagtccaaggccctcgaactgctgctgcccttcctcttcgacgccagcctccgccccaaccgcctctccacgttcggcggttcggaacgcaccatgcactggaacctgctgggcgagggcgccaccggcaagacccgcgtcgggtacgtctggatggagttccgccgcgtcgacgacgacggcaccgagcgcttcttcggctgcggggcccggctgcaggcgagcgtgcacaccaccggggtgcacgccgactacttcaccaccggcgcccggatcgcccgtcccgacggcgtactcctcgtcaacgaggcgggacagccgctgacccgcgccgccctcgccgaagccctcggcgacaggggcgaggtgcacacctcggccaccggccaccgcaccgccgtacgccgtgcgctcttcgccgggatgggcgagcagcgctacgagtcactgctgtccgccctgctccagctgcgccagcccaaactctccgaacgcctcgacccgtcgctgctctccaccctgctgtcccgtgccctgccacccctgggcgagggcgagatcgccgaactcgccgcgggcttcgaacagttggaccgtcagcgcgaacacctccgccggctcgacgacgaggtggcggcggccgagaccctcgcccaggggcagcgggcgtacgcgcgacgggtcctgcgcgccggagcggccgcgctgatcgaggccaccgccgagacggacgacctcacccgcgccgcccggaagagcgccgaggagttcgcgcaggccctcgcccagcgcgagtcggcccgggccctgcgcgaggaacaggaacggcgggcccgcgccctggaggagaccgtcgagggcctgaggcagagcgaggcgtacgggcggggcgaggaaccggaccgcctccgccgccgcaccgaggacgcggcggccgccgccgcccgtcggcgcgccctcgcccgggccgctcgggcggcggcggagcaggaccgcgcgcacgccgacgggacggcgggccgggcccgcaccctcgacgagcacgcgcgcgccgccgccgaggaagcacgcggatcggcccggccggccgggctggagtccgtccacgacgaggccggcaccctcctcggcgccaccgacgacccgcggcgggccgcggacgacccggcgggcgagagcggggcccggcaggcccgcctgctgctgcgccgcgcggtcaccgcccggcggcagcagctcaccgccgtcaccggggcgatggacgagcacgaccgcgcggtacgcgaccgggacgccgccgaggatctgctggacgaggcccgggcccggctcgcggaggcgagcgccctgcgggacgaggccgccggcgcctgggacaccgccctggccgcccagggcgaacggctgctcgcctgggccgcgagctgtacggaactgcgcatcgccgaccccggggaactcgcggcgagcgcggcggccgagtccgaggtgacggccctggtcgaagcggccgcccgcccgtcggaacgggagatcgccaccgcggaggccaccgtacgggccgcccgtcccggcctgtgggacgagcggggcaggctcgtggaggaggtgcggcgcctcggcgacgagcccgatctgccgccaccggccccggcgacccgcaccaccgtccggtcggccaccgcgggagcacccctgtggcggctgatcgccttccgcgaaggcgtcccgatgcccgtccaggccgccgtggaagccgcgctggaggcgtccggtctcctggacgcctgggtcggcccctacggcgggatcacgctgcccgggcacgacacccgcgccgagtccgccctggccgtcgccgccccggggcacagcctgctggcggtgctgcggcccgaggagggcatcccggtccccgtcgacaccgtgaaccggatcctcgccggtgtcgcgttcggagcgggcctgcccgacggccacgcggcggccgtgtccgcccagggcgcctggcgtctggccctggccaccggctcctggagcaagccggaaccggtctacatcggcgccgccgcccggcagcgggcccggcagcgcgcgatcgccgcactcaccgacggcatcacccgcaccagcgcctccctcgccgcgctcgacgaccgctcgcgcgagatcgccgcccgccgggcgaggctggacgccgacctcgccgcccgccccggccaccgggaactcgacgcgccgcgccgcgaacgggaccgggccgaggaggcggtggccgcccacgacgacgccgtacgccacgccgccggccggctggcgcggtgcgaggacgcggtcgcgggcgccctgcgcgagctctcccgccgggccgcggagcacgagctgcccgccgaccgcggccggctgcgggcgctcgacgccgctctcggccggttccgggacaccgccgacggctgggtggacgcccgcctcgccgcgcacggcgcggccgacgcggcccggcaggcggccgcacacgcggccaggtcggggcaggtggccgacgaacaggccggggacgcggcggcggccgaggcggaggcggcggctctgcgggcgcgcctggaggcggcgctggccgggaccggcgcggaccaccggcagatcgtcgcgcggctcgccgaggcgcgtgaggaactgcgccgctgccgggaggcggtcgcccgggcggccgatctccagctccggctggagggccgtgccggcgggctgcgggccgtcagcggacaggacgccgcacgacacgaacaggccgtcctggcccgggaccgcgccgcgcaccggctcctgcatctgtgcctggccgggctggccgaggacgcgggcatcgcccccggaccggacgccggtgtcgcacccggaccggacgccggggacgaccccggggccgtgctggagacggcccgtgccatcgcggcgaagtggcccgcgctcccgtacgccccacgccacctgggtgaggccgcgacccgcctctcggaagcggtccacgaggcacgccggcacctgggtgcccgcgccgacctggacctggcggccgacgacgacgtcctggtcttcagcgccggcctggacggcgtacgcgtgggagcgacgggactgctcggcgcgctcgcccggcagcgcgacagcagccgcgacgacctcaccggcggcgagcggcatctgttcgaccagatcctcaccggggacgtccgccgccatctcgcggtcctcatccgccgggccggtgaactcgtcgaccggatgaacgagcacctggagcgggtccgtaccgcttcccgagtcgccgtccggctcgtctgggacgtccggccggacctgccggacagcacccgcaccgcccgggagctgctgctgaaggatcccggccgggtcaccgagtccgaccgggaggccctgcacgccttcctccgtgcccggatcggggaggccgggggcagcgacacggccgtgacctgggaggaacagctcggcgaggtgctcgactacaccgcctggcaccgcttcaccgtccacctcgaccgggccggtggtaccggctggcagccgttgacgaagaagctgcacggcgcgctctccggaggtgagaaggccatcgccctgcacctgccgctgttcgccgccgtcgccgcgcactacgaggcggtgcccctggcgccccggccgatcctgctggacgaggtcttcgtcggcgtcgacaccgtcaaccgcggccaggtcttcgccctgctcaccgcgctcgacctggacctgatgatcacctccgaccacgagtggtgcacctacggcgagctgcccggcatcgccgtccaccaactcctcaccgacgggcacgacgacgcggtcaccagcgcccgcttcgtctggaacggcgcggatctggagacgggatga

SEQ ID NO: 50865 - DNA, 1593 bp, Streptomyces mutabilis
gtgaccgacgcgcgtaaggccgtggaatatctggtgcggcaggagtccagcgaatacatcccgatcatggacgtgctggaggggtcggtgaccgacctgacggttgccgaggtcgcggcagcgctggtggctgccggagtgcgcctggacgcacgcctggtagaaagacgcctggacgcgctgaaagacatgggtgcggtttcgttccggtcggacaccagtcacgcgcgccggtacgccgagattctgcctcggaactggcgctacaccgccagcccggctggcaggcacgtccagcgtttttaccgccaggtcctggcgggaacggtcaccgtgcgggaaatcccgatcgtgtcgctcagccgcatcgtgtcccaccttgagcagctcgctgcagccctgggcgtgggcgagcccgatgccagccttctcgacgctaccgtgctggatgccgtgagttctgtgttcaccagccacgacgacctcgacgctgccctggtgggtgccgaggatgccctgatcggtctcgccgaccggttcgacctggacgaggaacacaccaacgacctcaagggtcttctggtcgactacgccacccgcgtggcagtcgaactcgactccggctccgcacgggccgccgcagcactcgcggtgctgcggccgtggttcggcctgctggcccaggcggtcgtcgatgcctcccaggcccgtgacctcatcgccgcgggtgccctcagcgcctcccgcggcggccgcgcggaggactgggacggactgtgcgcgtggttcgatgcccgaaccggacgggccgcacgtttttcgctgcgcctggtgagggcgctgccaggcatgcacgccaacctgcgtcggctgcactcctcggcaggcaccgcctccacccgtagccgcgccttggccctggcccgggcggtgctgactccggagattggggtgcagatcttccaggccgcggtcggtgaccattcctggcgcaagctctacggccaggccgacgaggacgacatgggccgcaacccgtcctggcgtggcggaccgcaggtgccggtgccgacactgctgcgcaccgccggccggtcggggccgcgtggcagaggcgccgcaccacgcgacgacaccgtggccaaggcccaggtcgccgaggcccgggcacgccgccaggccggacaccaaagggcactcgccgaggttctggccgcgcttcccggcgagcagctggacgaggcagccgcccgggccgcgctcgccgccctgatggccgccgcgcgcgccgccgcaaccgggccccgccgcaccggcacgagcgggggtcttgcctgcacgctcgtgcacaccggctctggtaccggcatcctgaacgcccccacctggagggtgctcctgcccggacgcatcccgctcttccatcggcccggccagcgtccttcggccgcggccctcgccgccctcgcgggaacgacgacgacggacgacatctcggcgcacgcaacactgcgaatcaccccgcataccggcccgagcacgtccgacaacgacacctcccgcatcatctcccggcaggagggcgcagcatga

SEQ ID NO: 50866 - DNA, 1242 bp, Streptomyces mutabilis
ctggcggccacctgctggctcatcggcggccgcgacgacgaacttatcgccgcggtacgccgcaacgagcacgcgctgcgctccgccgtcgcccggctgggatgggtcctgatcgtcgaacgcgacctggtccgcctgcgcaagagcccgccaccacgcccccaggcgtgggccgaccagggaccgaatgccgccgcctgctcctggttcttcctgctgctggctgccgccgagtcgatgccgccgcgtaccgccgtgggacacctggtcacccaggcccacgccgccgctgccgaggccggactgcccgtccaccatgacatcacggaacgtcgggcgatcctggccgccctgcacatgctcgacgaccgcggtgtgatcgaacgccttgacggtgacctcgaccgctacctgcacgacgaacaggcccctgtgctgctggccgtccaccacacccggctggcctacgtcatcgctaaccccggcaccctcgacccggccgccgacccgcacgcatggctggaacaggcacagcgcgaaccggacgccgcccgccggatgcgccgcgcgctcgtggacgacacctgtgtgcacaccgcgctgctggacgatgccgaggcgcaatggctgagccagcgtgtgcgcggcgacgacggcggcccgctggccgacgcgttcgggctcgtcctggagcgccgcgcggagggagccgcattcgtggtgcccgatggggccttccgtcacttcagcgaactcggcccaatgcacttcccggcacccgggaccatcgcccacgccgcgctgctgctcctcgaccacgcggcactgcacggtaccgccgacaacgcccccgggacgggctggcgcggcttggtggaggaggcggtggtggaagcactgacgacattcggtaccaacaacgcctccggccgtggcggctggagcaccgagtacgtccaagaccccctcctgctgaccggcaaagtacgcgacctgctgaccggtacccacctggcttggctgacccccaccaccttgcaggccgacggcgagacgacgctcatgtggtggttcgcccccatcaccggccgctgggcggaggaaggcaccgcccagcccaaaaccgcccccacccgcgcacgccgcagcacacccacaccgcagcgcccccatatccccgtacagcagggcctgttcagcgcgatcgagaccgacaagaacccggagggacaccctgcatga

SEQ ID NO: 50867 - DNA, 4239 bp, Streptomyces mutabilis
atgagtgacttcttcgacctcgacttcgccctgccgccggcgcccgcaccgtcaggcaacaccggccgtttcggcgggcgctggcggctggtcggcgccgggctgtcgaacgtgtggcgctacggcgacctggaattgcctgccgcctcgggccggctgttgctgcgcggacccaacgggaccggcaagaccaccgccctggaagccctgtggccctacctgctcgatctgaacggagccaaactggccgccggcaaggcacgccccaccaccctgaaactcctgatgagcgaaggtgcccctgccaagggccgccgctacggctatctttggctgacgttcgcagccccagccggcgaaccggcaccgaacacgccagacggtggggcagacggcgtcgtcagcttcggtgtccggctgcagtactcgcccagctccacccccgccgtcagggtcgtccccttcaccgtgccgggccagccgctgaaggacctggcgctgcgcggcccccacaacagcgccttggagcacgaggagttctccgatcgcgtcgaggccgccggtggacgggtctttgccgagcccgaggactacatcgaagagctggccgcccgcatctggtccaccacctccggcgaactgaggcttctcgcttcacggctgcgggaagtgcgcaatcccaccctgctgggcgacgtctccccggccgcagccgccgacgccctgcgccagtccctgcccggcgtggccgaggacgttctcaccgccaccgccgaggccctcgccgaatccgacaccacccgcgaggcgttcgaacgcgacgagcacgccgccaccctcctcgaggagttcgcccgcgtatggaccgggcacgccgtcgacgtcacccgcaccgcccacgccgcggcacgccgcgcccacgacgacgccatcacccgcaagcgccgcgtccaacaatgcaccggcctgctggagagcgcgaaggcagccgccgaccaggccgcaggcgacgtccaacggctcgacaacgccaaccagaaggctcaagcagccgtccgcgccatcgagaccagcgatgcctaccgcacccacgggcacgtcatggacctgcgtaaacggctccgcgccgaacagcgcgccgcatccagcagctacgacagcctgcacaccgccgcccagcaggctcgcacccagaccaagaccggccaagacgccctcgacgacgccatcggtgacatcgaggacaccctggccgacgcggaggctgccggttccccgccgggggccctggagaccctgctcgcccaccacccccgggcccgcgtcacccgtccggtcgccgaccgcatcgccgatccaggtccgggcatcaccctcatccacgaccgcgaaggcctcgaccagcttgccactacgttgaggacccgagcccaggaacaccgatccacggccgaccgggccacactggtcctacgcgaccacgaccccgtcgcggcggccgaaaagacagccgcgaccgcacaccgcacagcagccggcgccgagagcgcctacgacgaagccagccaagcccatgaccgcgccaccgcggcggctcgctcggccgcccgccaggcactcgccgagttgacccggtgggcacccgaacaccccgctctgcggggcctgcacgacgaagcacccctggccggcgatgaactgacggtatgggacacggacgacgtcgaggccctcatccacgcagaacccgccgcggtccgcgaccagctcaacacatgggccgaccaagccctgcgcatcggtgaaaccctcgccgccagtcacgagagcgcagcccagcagcacctcgccaccgcagcaagcctcgacgccaccgccgcccagcaccgcaccgaggctcaccacctgcgctcgggacggctcctaccactgccgcgccccgcctgggccgggccgggcgaggacgacactgcactcggcagcctgctcgaatggcaccccaccctggacgacgcggacgaccacaaggccctgctggagctggcccttgccagttccggaatcctcggcgcccacctgcacgagggcggcgccaccacccacgcctggcacatcagccccgcaggggccgtccaagagcacaacctgaccgcagtcctcgacatcgcccccagccaccctcacaccgacctcgcccgcgccatcctgcagcgcatcgccctggccgacaccgccaccacctccgaccgcccggacacgctggcgctcgtcatcggacgcgacggcaccttcaccgccggccccctcgccgcagaccccgccaccgccctgcatgccgccagcaaccaaatcccggccgcctcacacatcggcgcccgcacccgcctcgcacgggcacgagccagagccgacgaactcgacgccacagcgcaggaactcgagaccagcgccgccaacgagcgccggctcgctggcgagcgccgccagcaacgcgacgccctccgcgccgaaggacgaggcttccccccacgggacgaactgactaccgccgaggccgagcgctcccgcaccgcgaagacggcgcatgaacgccacggcaccgcacggaccctgcgcgggcgggccgatgacgccgcggcccaacacacccgcctgcgcaccgcctgggagacccgcgtccggagcctgggcctgccgaccgaccccggcggcctggcccagctgatcgacacaagccaggcatccgcccagcagctgaacggctacgcaacccagctgaccacccggctgctgccccggatccagcgcatcgtggacgctctgcctgacgaagccgccctcgccgagtgcctcgccgaactccagcacaccgcccaggacatgcacaccaccgtgctcgagacccaggcagagctcaccgaagcccagtcccacggcgacgccgatgacgcggcacgccgctacgagcaggccaccgcagaggccaaggacctccagcagcagctcaaacaagccgcagagcaggtcctcatcgccgaaaaacgcctcagcacctgcgaaagtgacctcaccgccgcccaagaacgcctcaacgaatccctacccctgcagaaaaccacccgggcgcacctgaccgcactgctcgcctgccctccccttgcccaggccctcggcgccgatgcccgcctcacagccaaggacaccgacaccgccgacctcctcaccgccgtcgacaacctgctcgcccgccgccccaccgcctccaagaagaccctcggcgagcactacgacgccgtccgtgccgaactcgcccaaacctggaccatcgcccacgacgacgcacccgccggcgccgaagagctcgacaccttcgtcctcacccacgcagaaacccactacggccccctcaccgccgcccaacgcgccaaggccctcgccagccgggccaaagccgcactcgatgccgcagaagcggctgcgctgcgcgacttcgtcatcggccgcctgccctccgccatcggcaccgcatgggccgccctgaccggctggaagaagaccgtcaaccgcaaaatgcgggcggcccaggcatcctccggcgtcggtgtacaagtccagatcgacctgcgcagcgacctcgacgccgccacccgcaccgtgtacgagctgtcctgcaccgtcggtgacgccctacgcaccgacgcacagaaggaagaagtcggccaggcactgcagtccctgctggccgccgcggacggctccaccatgcaagaacgcctcgccgccgccgtcgacatccgcaattgggtcgacgtccgctacctcgtggaacgccccggccccgacgggaagcccgtcaccggtcagtggggctcgcgcaccggcctgtccggcggcgaacggcgcctggtcgtcctggcacccatgctcgccgccatcgccgccagctacgaccgcttcaccagcaccggcctgcgcctggtcccgctcgacgaagttcccgcggaagtcgacgagcgcggccgcgaaggactggcccgctacctcgccgaactcgacctcgacatcctgtgcacctcctatctgtgggacggcgcacccggagcctgggacggcatcgacgcccacgacctcgaagcaggcgccgacggcaccgtcgtcgccttccccatgctcatccgcgcaggccaggccttgcccggaggcacgggttccgcaccccaggccgggggagtggcatga

SEQ ID NO: 50868 - DNA, 585 bp, Streptomyces mutabilis
gtggactgcgacgatctgctcggcgggctcatcatcaccggcgtcacgccccgggggtggcgggtcccgcccggtgccacattcactctgccgcctcgcgagctggcccatatcgactgggagcctgccgagaccaccggcacgtgggtcttcgttaccgagaacccctccgtgctggccgcagccagcacccaggccctggcccgggacagcctcgtgagaccacgggtgatctgcaccgccggcacaccctcccaacgggaatgcgaagccattggcgctctggcggacaccggatggaacatcgccgtccgcgctgacttcgaccaggctggcctggcacacatgcgtgccctcctggctgcagcaccttccgcggttgcgtggcggatgggcgcagctgactacctcgcggccgtccccgagggcagtgacgtcctgcatctgcagggctcagatgctccctgggacgaccacctggtacccgtgatgcgcaaacactctgtgccggtctacgaggaggatctgcttcccgcgctgctggccgacatcacggccggtgcaccgggctcttgtgctttgtga

SEQ ID NO: 50869 - DNA, 1491 bp, Geobacillus stearothermophilus
atggacgccacgtggttgaagcccattgtcgaaacaaaatatttatcgacggaaaacgcgcaccgctaccgggcgattttgcgctatttctacattcagcacgagcggatgcggcaatatttgtttccggaagaagtgtacgcctttttaaagcagcacgaggagtttgccgattacacagaagacgacttgcagcaagacctcgaccagctcgtgaaatggaacaacttgatcgcccgtcaagagacttctcacgtgcggacgattgaagagtttaagaaaaagcgattccgctaccaatgcagtccgtacacggtggagatcgagcggatgatccgcacgcttgagcagcttggggattcgttcggaggatcgcttgagaaaacgcggtttgaccgcttgtatgcttccctttcccgcatcgaggcgatcatcgcctccgggtttcaggaacagagagatgaaatgtaccaagtatgggaagagacgttcgattatttcaagaaaatcatccaaaattccgcagactatatggcctatttacatagcgaaaacgtggaagagcggatgacgtctgagtcgtttctcgtttataaagagcagtttactgcttatttgcgcgattttatcgtcgccttgcaaaaaacgtcgatgcaaatcgaacaattgctggaaaacttgccggaggatggggttcggcagttcatcgggcatgtcgtcgactatgagcggtcgattccgcgctttgccgattcactgccgccgcgtccgatgcagattgaagaaaaatgggagacgtggcgcagcttgtgtgaatggtttttaggccgcaacgggcgcgagagcgagcttttgtttttgcaatatcagacgaatgaggcgattcgccgcctgacgcgcgtcgtgcagcggcttggcgagcggcatcatcattttcgcagccgcaaaggcgactacttgcatttggcgcggtggttttcccgtctcgaatcgattgaagaggcgcattgtctgtcggcggtcgtgttcggctgtttccatacgaaacatctcgtcgctgacacggaagcgaccgacaacatataccgcgatgtgtgggacgagccgccagctgagtgggtgacgaagccgcgcgtccgccattatggggaaaagaaaaagccgcaggcgatggaagataaagagcgggagaaagaagaagcgcgtctccgctatttggaagaaaaagcgcgcgaggaagcggcgcttaggcagcttgtgaccgacgggaaaatcgtgctggctgaccttcccgaggtgactccatatgtacgaaaaacgctgctcggttggatcgccaaggcgatggggcgcgaggggcaagctattaagacggaaaacgggtgggtggtcaaggtggcggcgaaagaggggacgatttgccttcgggcggaagacggggaactcgtaatgcccaactatgaaatccacgtgctggcaggaggtgaatga

SEQ ID NO: 50870 - DNA, 1197 bp, Geobacillus stearothermophilus
gtggagacggcgtttgacgacaaggcgaaggaagcgctcgccgcgctgtttgagcagttttggatcattcgcgaccaagagccggatttgtatcagctcgtccgtgagcgcgaacatgtgttgaaaaagtatgtggaggagaagtttggctatcggctcatcgtccaccgctatttcgccaagctcgagaaaattcccgccgatcccgagccgtggatgggcatcgagtcgttccaagagccgcttgactatgcgttgttttgctgtttgatggcgtatttggaaggcaaggcggtggaggacaagtttttgctttccgacgtgtgcgaagaaatccgcgccatgtacccgggtgatctaccggtcgattggacgaactacgcgcatcggcgcgcgctcatccgcgtgttgaaaacggcggaacaaatcgggctcgtccgccggatggacggggagattgaagcgttcgcgcaacatgcggaggaagaagcgttgtacgaagtgcccgtgctcgcccgctattttatgcgtacgcatccgaaagatttgcttcggtatgaatcgattgaggagctgatggccgaggagtggaaagcatcaccgcaagattatcggcgccatcgcctgtatcgaaagctgtttttatccccggcggtgcaccggacggaaggcgacgagcaagatttttactacttgcgcaacttccgccatcggctgcgcgatgacatcgaagcgcatacgccgtttcggtacgagttgtacaaaaacgccgccatgttgacgctgcctgagcggcaggcgccgtacacgacatttcccgaccagaaaggaacgtcggagatcatccttcatttttctgccttggtgcgcgagcggcttcaggactatccgccggatgaatacggccgcattcgcttgacgccggaacagttttccgcctggcttgccgattgccgccgccgttacggggcggggtgggggaaaacgtaccgtgacatgtcggccgccgagctcgtccgcgaggtgcttgcggcgctttgcgaatggcgcatggctgatatagagcgcgacacaggaatgatcgttctctatccgcttctcggacgggtggcgggacggtatccagatgattttgacgcaaaagagggggaggaacatggcgaatccatgggtgcttcatcgcgcgggactgattaa

SEQ ID NO: 50871 - DNA, 4122 bp, Geobacillus stearothermophilus
atggcgaatccatgggtgcttcatcgcgcgggactgattaacttttggtattacgacgagcaatactttcacttcgctgacggcaagctgctgttgcgggggagcaacggggcgggcaagtcggtgacgatgcaaagcttgatcccggtgctgcttgacggcaagaagacgcccgaccgcctcgatccgttcggctcgcgggcgcggcggatggaagactacttgcttggagaaaaagatgtcgtcaaccgcgacgagcggacggggtatttgtttttggaatataaacggaaagaatccgaccaatacgtcacaacgggcatcggcctgcgcgcgaagcggcaaaaaagcctcgacttttgggggtttgtcattttcgacaaccgccgcatcggtcatcatcttaccctatataaaaaagaaaaaacaggagagaaaatcccgctcacgaaacgcgagctcgccgcagcgctcggcgcgggcgggacggtcgtcgacacgcaaaaagagtatatggagcttgtgaataaacatgtgtttcgctttgaatcgcttgagtcgtttcaagagctcatcgaactgctcattcaactgcgcagcccgaagctgtcgaaagactttaagccgacggtcatttatgagattttggaaagctcgctgcctccgttgactgatgacgagctccgccatctatcggacacgatcgaaaacatggaccaagccaagcagcagcttgagcagctcgagcgtgacgagcgggcgttgaagcgcctttgcgatcaataccgcctgtacaacgaatatatgatcgccgaaaaagcggcagaatacgtaaaagcggtcaagcaggccgaacagctcgccgccgagcaacaacgcctgcacgatgaagaagagcaggcgcgaacgacgcttgatgagcttgaggagtccatcacccgccttggccgcgaagaagacgtgctgcgagcgcgcgaaatcgatttggccggccacgaagtgttccagcaggcggagaagtatgaacagctgaaagctgaacagcagcgcctagaggaacggcggaagcgtcacgaacaaacgattgcggaaaaagaacgacaggaacgtcagcaccgccgccgcctcgatgaagcggaagcacggttggacgaccttgagcggaagcttgaagacgagctggagcagctgcgtatggatgccgacgaaggatccttttccttgcatgaaacgaacgaaggcgactttcaccgccatcgccaaaaggagcaggagtttttgtttgccgcttggaaacaggaagccgaccgccatatcgagcggcttgaagggctggcccgcctttggcgcaggcatgacgaggtgaaacagcgctatgaggaagcgagcagcgaagcgggcgaacggcagcgggaaatggacgaatggcgccatcagcagcggaaatgggaagagctgctcgagcaggagaaagagcggtttgaacaagccgtgctggcttggatcgggcaaggagacgtcgacatttccgaagcggatattcagtcgtttttgcaacaaatggacgccctctatgagcagtattcgctcgatgatctgaagcgcccgttcgtgcaagcgtattacgatgccgtcgggaagaaaaaggatgagaaatggcggctcgagcatgacatccgtctgttggaagagaaacgggcagaacgtgaagccgaactgcgccgttggcgggaacaacgcgaccccgagcctgaacgggatgaacaaaccactgccgcccggttggcgttggaggagaaaggcattccgtttgtcccgctttatgccgcggtggaatttgtcgacgatgtgcctgacgatgtgcgcgagcgaatcgaatcggcgctttcgcacgcggggctgcttgacgccctcattactgctcgcgagatcgacgtcgcctgcgaccgtgtgctcattccgaaaccggtccatatggcgcacacgcttgctgattatttgcgcccagatgccaatgcccctgtgtcaatggagcggattgacgaagtgctccgaagcatcgtcatcaccgatgccgaccaagaaggcggcatgacgatcgatgaaacggggcgctattcgctcggccttgtccgcggccatgcgccgcggggatcgaaggcggcgttcattggccgtgcggcgcgcgagcggtggcggcttgagaacatcgcggcgctggaagcggagatcgccgcgatggggcaagagatcgaccgtctgcgtggggcgcatgaggacgtggaagcggccattcaagcgctcgccgactggttggcgtccttcccggcggaccgcgacgtgcgcaccgcgtttgacgaagcgcaagaagcgcgccgccaagcggaaagcaaagagcgggaatggaagcggcaagaagaaaaagcggccctccttgcgcgcgaatggaaacaaatcaaacagcagcttcgtgacgaatcggctgagcttgatttagccttcaccttggacggctgcgaacaagccatgctcgccatgaaatcgtacgtccgccatttgcacgaactcgaagtgctttaccgcgaaacgcgccataccgaagccgtgatcgctcagcagcgcgagcagcttgcggtgctggaagcggagatcgacgaggcgaaaggcgaacgaaatcgacttcgggatgaaaccgagcggctcgccttgcgaatcgcggagatggagcggacgctcgcacaaatgggagcggatgacattcgcgccgaaatcgcccgcattcaagaacggttggcgtctttgcgccgcgaaattccgcgccttgtcaacgaacgggcgcggacggaacagcagctcatgcgcctggccgaagaacgggaaaaagaggcgcggcgggaagcgttcgcccgtgagctcgccgcgatgtgggaaaagtcgtttgcccgtgaagcggcgcttgggcttgtggatcttgatcgttcccgctccctcctggagcaggcgaaagaagcgaaacaacggtacgaagcagtgttaaaagagacgcgttcctcgcttctggcgcggctgaacaccgtctttttccaagagtcgtccaacttgaccgaatatcgggcgtccttcgagccgctggaagaacaaacgaagcccgaatggaccgccgctgccccagacgatgagatggccatgaaagccgcggactggcgggagaaacaagaacggcacgtcatttacctcgactacaaaggcgagcgcgccacgccgtttgcggtgctggcggaagtggagcgcgacatcgtcttgcagcacgagtatatgaaagaacaagaccgcgagctgtatgaggacgtcatcttaaaatcagtcggccgcattttgcgcagccgcattcagcgcgccgaacggtgggtgaatgatatgaataaactgatgggcggcctcgacacatcatcagggcttgtgctgtccattcaatggaagccgaaaacggcggagacggaagcggagctcgatacgaaagaattggtgcgcctgttgcggctcgatccgcggctgcttagagaggaagatttacagcgagtgacgaaccatttccgctcgaaaatcgcccgcgcccgcgaattgcttgaagagcgcggccaaggcagcacgctccatcaaatcattaaagaagtgctcgactatcggaaatggttttccttcactttgtactatgaaaaaacaaacgagccgaaacgcgagctgacgaaccaccgcttttaccaattcagcggtggggaaaaggcgatggcgatgtacattccgcttttcgccgcggcgtattcgcgctaccaagaagcgggcgatgatgccccgtacatcatttcgctcgacgaggcgttcgccggcgtcgatgaaaacaacatccgcaacctgttcggacttgtcgaacagctcggctttaactacatcatgaactcgcaggcgctttggggcgactacgacaccgtgcccgcgttgtccatttgcgaactcgtccgcccgcgcaatgcgtcgtttgtgaccgtcattcattaccgttggaacggccgcgtcaaacagctgatggtcaatgataaagaatgggagacgatcgagacgtga

SEQ ID NO: 50872 - DNA, 1221 bp, Geobacillus stearothermophilus
gtgagcacggccaaggaggcagccgcctttttccgctctgaaccgggcttccgccgtctgtttatcgagatgaagcacaagtacgagtcgctcggccgcgtcggcggcgcggtgtctttagaggcgttcaccgatgaagagcgggaggcggtggccgcctttttcggcaaagacgtctcccgcgtctcccttatcgcgtttgaaaaacagctcggacagacgaggtttgcgggcgttgggcttgtcgagctgcttgaacagtacttcggcgccccgcttgtctcaaacaaagaacggcgccaggcggaggaagaggaacgggatcgtttttttgcgcgtctgaccgaggagcatcattgggttgagtcggtccgccctcagcgcttcgtccaaacggcgtacgaaaccgaccgccgtagcctggaggaggccatccgccttgtcagcgcggctctcggccgcctcccgctcccgtcatacatgcgcctcccgctctttgcccagcaagtggccggcgacccgcatgcgttcgatttgtccacgctaccggggagattgttgctttcggcgttgcaagcgaccgtgcccggggattgggacatggcatctgtagagagcgtcaacgagttgctccagtccgtcggcttgctccgtgaggatatcctgaactttgtcacatgcgccaacattcttgctgaaaccaaggacggaccgcatcctgttttctccgctgcctgggaggcgaacacggcgctgaacatgccgcttagagatgtgctgtcgcttgtccgcgcccgccctgcccatggggggacggtgtacattgtcgaaaacgcgggcgtcttttcgacgctgcttgacacccgcgccccgcttgtcagcacgaacgggcaaatgaacttggcgacgatgaagctgctcgatcttctcacctcttcaggcgccaagctgtattactccggcgacttcgacccagaaggattggccatggcagagcggctgcaggagcggtatggacaggccgtcaccctttggcgcttttccgtcgaggattatagggccgccaaccctgtcgtcgacctcacccccgagcgcctcgccaagctcgcatccgtcacatcggaaccattgcggccggtgaaagaagccatcggccgaaagaaaaaagccgggtatcaagaggcgatcattgggaggttgacaggggatatcaacgggtag

SEQ ID NO: 50873 - DNA, 1476 bp, Lysinibacillus sp. BF-4
atgaatgttttgaccaagcaagtgattgaaacaagctatttaacagcaccttctgcagcgcaatatcgagttattttgcgatttttttatgagcaacatgagcgaatgagagactatatagctccagaagaagttttacaccatatgcgcactttcaatcaattcgaaaattttgatgaagaacagctccaccaaaatttagcacagctcgtgttgtggaataatttggttgcacggcaagatatgactaaggcacgtacagtagaagagtataaaaagaagcgctttcgttaccaacctacaccatatacaatcgaaatagaacgtatgttaattaaacttgaaagtattgtagataatactttcagcggttctcttgaatcttcgcaatttgaacgcttgttacaggctttacaaagtttagaagataagtcgttgaacattgagcaacaagtgaagatttgggaagatattgttcactactttaatgaaattagaagaaatacagcagattatattgcgtatattaatagtgaaaagatcgatcaacgtatgcttacagaagcttttttagtgtataaaactcaatttagccattacttgcgaaattttattgtttcattgcaacaaacttctttacagattatagagttgttacaaaacaaaagtatagaacatacaatgttagccgtttttgacagccttattactaaagagaaaatacatgatcaaatagtaggagtcattgtttctgatgacagccgtttaaaaagttatcaagcaaaatttgagtcgattaaaagatggtttttggaaacagacggtcaaaagagtgagttagaaatgctgcaatggcaaacaaatgaaatgattagacgagtcacacgttatgtacaacgattaggagagcgtcagcattactttaaaagtaggcaaaatgattatttacagttagcaaagtggtttagtgaatgtccaacaatagtagaagcacatgaaatatccgcaatagtgtttggagctatgcaaacgcaacatgtgcaactgaaaacagatacgacggatgatttgtatagtgacacatggtctgagaagccagaaaaaatagtaattaaaccacgcactaatcggtaccgtgaaaaaacaaaagcgacaggtattgacttaaaggaaacagaaaaaagagctcaacgtgaaaaatacttatctgagcgtaggcaacaagaattgttagtgaaaaattactttaagcatggcactgtgcaattatcaaaacttagtgtaatagagccttttatgaggaagctattattaacgtggatgtcaaaagcgagaacaagtgacaagaatttagtaactacagagtttggtacactgttacgcataacgatgcttgaagaaaaaacaacgttaagagcgcaagatggtgatttattaattcaagatgctttatttgaatatgtgaaggaggcatag

SEQ ID NO: 50874 - DNA, 1149 bp, Lysinibacillus sp. BF-4
atggaggaagtatttgatgagaaagctgtgcaaggtttggattatttattgcatcatttatgggtattacgaaaagataatgcaaatatgtatcgacaaattagagagcggcaaaaagtgttacaacgctatgtttccgataagcttgggttgcaacttcatgttcaccaacattttataaaacttgataaactgcctgttaaagcagaaagtgggatggggattcagcaatttacaacaccaatggattatattgttttctgctatgctttagcatttattgaaggaaagcgcattgaggagcagtttttactatcagaattaacggaagaaattcaagccacgagttataaacaaattgctttagattggacgttatttcatcatcgtaaatcattaattcgtgtaatgaaggtacttgtagagtttcacttgattgaaattatagatggtgatgtccaacgctttgaccatcatgaagagcaagaggtactgtatgaagttacaatctatagtcgctactttatgagaacacacccaaaggcttttacccaactacaaaatgcacaagagctcttgcaactagagcatcaattagtgagcgaagatgagaggcgtaaaagagtttatcgacaattactcttaacgccagcgctttatagagaaagtaatcaagaccaagattttttatatgtacgtaactatagaaatcgcattagtgatgatatagaaaagtatacagattttaaattgcatgtttttaaaaatgttgcgtttttatctgtaacagagcctaagcgatactatcaaagctttccgaatactaaagcgattacagatattgttttgcaactatcacaatatcttcatcaaaatattgctaattataatagccaagaaaatggcatgattgcattgacggaacatcagctaacggaaattttactgcaacttaaagagcaattaggtgagggatgggccaaattgtatcgagacaaatcaatagcaagtgtacaaaaagaacttatagatgaactaatctattggcgaatgggttcaatttgtgcagattttatttatattcactcgctattaggtgcatttgtagggagctatccctcagattatagcaaggaggagaaattatga

SEQ ID NO: 50875 - DNA, 1236 bp, Lysinibacillus sp. BF-4
ttgactaatataaatgtttttagacatagtgcatttttgaagttatttaagcaatttaagcgaaaatattattcttttggtagtatgagaggcaatgtaagtttgaaagattttacagcagacgaagttaaagaaattgctgggtttttaggagtgcctgaataccagcttaatcagaaaagaagtgtgtcgcttcaacaatttgaagcccaacttgcaactacttctttttctcaatttaccttaaaagaattattagaagaaattttagaagaaaagctacaatcgaaagaggaagatgagcgtctgaaaggcaatacaaaaaaacaatttatcaatgatttacaggaaatactaagtgatttaccacagtggtacaatcaaattcaaaagcaaacaggagattcaaagtttatttggcaagaacaaaaagcactactgcctactattcaattagtagcaaaggctgtaagtagacaacttaaaggtaatgattttattaggttacctattttggcacaacttgcaacaggagacccacatgcatttgatagtaagaatatagctggcaaactattagtacatgcagtgtatagtttgagtaaacaacctgtaaattatccaaaaactagagaagaacaagttgatttgctaggggacctgaaaattattcaagatgatttgtggaattttgttacgtttcaagggcttttaggttatgaacagaaggagttgcatcccctatggcaagcagctgtagcaacaaagagcgccgtaaatatgccaatgcgtcacttagtctctattactaaggtgagacctgctattggtaaacgtgtttatattgtagagaattcgagtgttgcgtctactttaatggatgctcatcctaaagctcctattatttgtacacatgggcagttacgtatggccagttggcgtttattagatttattaagctctgaaattgagctgtactattcaggtgatttagatccagaaggattacgtattgcgcaacatattagcaatcgttatagtgagcgagttcatctttggcgtatggatgaagcttgttatcatttgggaatgacaggtgaattaacagcaaagcgtttgtctaacttgcaatcacttacaatactgccaactataactgaacaaatgaagaggcataaaaaagtttcttatcaagaagcatggcttgatttattggtagctgatattaaaatctga

SEQ ID NO: 50876 - DNA, 1494 bp, Amycolatopsis lurida NRRL 2430
atggatccgatccgtgttccgcccgagatgttccgtttcaccgacggcagcagatccgggctccccctggcgatcctgcacgccttcggcgaggcgaacgagcggctcgagacggcgctcgggatcgacgacgtccgcacgaggctgcgcgaggtcggctggctggagacgctggacgacgaagacctcgtcaaagcgctggaccagctgaggagccaaggccacctcgacgtcgtccagagccacgcgggcgactatcggaccgcgtcggagtacgagcgccgcaacctccagtactcgctcagccggcagggcgaagcggcgtacgcgggggtggtccgtgcgaacgaggtgctcaacgcgtccggggcgctccagacggcgacgctcgaggcgctgggtgagcggctcggcgagctcgcgaagcagctcgaagacggcacggaccggcgtgtgttcagcacgctcaccgaggtcgagagccacctcgaagcgttccgcgacaacaccaaacgcttcaacggcgacctccagcgcctcctgcacgccgaagccgacctcgcgacgttccacgaggtcaaggcggccacggtcacgtatctgcaggagttcctgaacgacctggagcatcacacgcacacgatcgccacccggatcaaggagatcgacgaccacggcgtcgagcgggtgcaccggcgggcgctcaacggagcgtcgctgccgaaccccgatgcgcgctggatcgacgtccgcaaggcgcgctgggacggccttcgcgcgtggttcctgcccgaggacggggcgacgccgcgggtcgaggaccttcatcgcctcgcgcggcgggcgatcatcacgcttctccaggtcctggaccggatcaccgaatcgaggcggcgcgcgagcagcgcggtcgcggatttccgcgagctggcgcgatggttcaccgtcgtcccggcgcaggaggacctgcaccgcctgtggtccacgatgttcgggctgagctccgcgcggcacgcgcatctcgcccacgcggatccggaagtggtcagcacgacggcgtcgtggctcgacgcgccgccggtcgaggtgtcggaactgctgcgctccgcgggccgcaccgagcggttcaccaggaccggacgggtccgcgacgtcagcgcgatcagggcggcacgggtccagcaggcgatcgcggagcgcgccgaactcgaagcggcgtggaacatgctcgacaccggcggcgtcgtgcggctttcggcgttcgagaagctggaccacagcgttttcgagcggctgctcgacctgctgggtcaagcgctgggcagtgccgtcggcgcggacggcacccggcggagcacgacgtccgacggccagatcgagatcgtcctgcggccgccgcagaacggcgcggtcgcgcgcctgaccaccacgagcggtgtcttccggggccccgactacgagatcgagatcagtacggccggaggcggtgcgtga

SEQ ID NO: 50877 - DNA, 1221 bp, Amycolatopsis lurida NRRL 2430
gtgagcctcaccaaccaactggtcatcgcggagcgcgaagaggtcgcgcgcgggatccgggccctgctggccaccccgttgatcggcgaacgcggctcccccgagaccttcgacctcatccgccgccgccgcgagcccatccggcagtggttcgactactactgcggctggacgctcaccgtcgaaccgcggctcggctacgcgcggctggtcaaggtccgcgcggccaccgatcccacgcgtccggcgaggcggctgcgctccgggcgcgccgcgttcgaccgccgccgctacgtcctgctgtgcgtggtggccgccgaactgctgaccgtgccggtgaccaccatcggcctgctcgccggccgcgtcgcgcaggcgagcgccgccgacgatctcgtcaccaccttcgacgtcgccaccagggcggagcgcctcgccttcgtggacgtcctcaagctgctggagtcctacggcgtcctcgaagccgccgacggcgatccggagtcctttgtggacgatccggcggcgaaggtgctgttccgggtggacgcgaccctgttgctgcggttgctcgccgcgccggtcggaccgtcgcagctggccgtgcccgccgacgacgtcgcgctgcggttcgaggaactgctggaggcggtgtcgcacgagcagcgctacggcctctcgtcgggccgccacgaggacacgccgagcgcgtcggacgtccagcggaacctgtggctccggcacacggtcttccgccgtctggtcgacgacccggtgctgtacttcgccgaactgaccgcggaagagcgcgcgtacctcgggacgccgaccggacgccagttgctgcggcgagccgcggagcaaggcggtttcgtcctcgaagaacgcgcggagggggtgctgctcgtcgacgtcgacgggctggccaccgacgagcggttcccggacgacggcagcaacgccaaggtcgccgcgctcctcctgctcgacgcgctcgacgagccgaggaccaccgattacctgcagaaggccaccgccaagctgctgaaacgcttcccgcgctgggccaagacgtaccggggcaaggacggtgtgcggcggctgaccgtcgacgcgctcgccgtgctgaccggcttcggcctgatccgcaccgaagccgaactcgtccggccgctcccggccgccgcgaggtacaccgaccgcaccgaggaggcgccgtga

SEQ ID NO: 50878 - DNA, 3984 bp, Amycolatopsis lurida NRRL 2430
gtgaccgtgacgaggtggatgccctcccgtgcgggcattctcaacatctggcgctactacgacgagatcttcgagttccacgacgggcgcctgctgttgcgcgggcccaacgggagcgggaagtcgaaggcgctggagctgctgctgccgttcctgttcgacgcgagcctgcgcgccaaccggctgtcgaccttcggcaccagcgaacgcagcatgcactggaacctgatgggcgagggcgcttccggcgccacccgcgtcgggtacgtctggctcgaattcggcatggcgggcgagaaatggttcacctgcggcgcgcggcttcaggccagcacgcacaccagcacggtgcacgccgacttcttcaccaccgatctgcgcgtgggcgacggtttgccgctggtcaacgaggcaggccagccgctgaccaagaacgcgctggaggaagccctcggcgaccacggcaccgtgcacgacggcgcggccgagtaccgcgcggcgatccgcgcgaaactgttccccaccttgagcgaacagcgctacgacgcgctgatcaccgcgctgctccagctgcggatgcccaagctctcgcagcggctcgacccgagcctgctgtccaatctgctctcccgcgcgcttcctccgttggggcagcaggagatcgcggatctcgccgagggtttcgagcggctcgacgcgcaacgcgaacggctgggctcgctggagaccgaagtcgacgcgacccgcgcgctcgccgcgcggcagaagacctacgcccagcgtgtgctgcgcgcgggcgccgcgaacctcatcgccgcgaccaccgaactcgacgaactcgccgcggccgcccgccgttcggcggaggagtacgacgaggtcgccgcgaagaaggaagccgccgaggaacgggcggcgaagctcgaaaaggacgtcgaggagaccgaagcccgcctgtccgggctgaccgaatccgagtcgtaccgcaagggccaggagctcgacaagctgcggcaacgggccctgtccacgcgcgaaaaggcggaagcactgcgcgcggacgcggatcggctccgtgccgaggcggacgccgacgaggagcgttcacgggcggcgaagcaggtcgcgaaacggcaggccgatctcgtgcgctcgctggagaccgaggtccgtgccgccgcgacccgcgcgaacctggccggggtgcacgacgaactcgtcgccgggctgggtgaaccggcccggctccgtccgttgctgcaggccgccgtccgcggcaagcgcgaccaggtcgaaacgctcggccgggcgctggacaggcacgaactcgcggtcgggcggcgtcacgcggccgaggcggatctcgaccgcgcgcggtcggatttctcggccgcgcaggagcggctggacctcacgacggcgacgcgggaactcgcgctgagcgatctgcgcacccggctcgccgaatgggcgatcggctgccgcgagctgcggttccccgacgtggaagcggtcgtccgggatgccgaggcggaggtttcgctggtgagcaggctcggcgtcgtcgccgagacggtgctcgaagacatcgtccggcgggagacggcgaccggtgccgcgctggccaccgcgcgcgccgagcacgacgaactcctcgtcgaggccggcgtgctcgaaacggaggacgtcctcacgcccgaaccgccgcgcacccgcacgacggaccgcaccgagatgagcggcgcgccgctgtggcgcctggtcgatttcgcgggcacggtcccggaaagcgcccgggcggggatcgaggccgcgctcgaaggcgccggcctgctggacgcctgggtgaactcccacggcgtcgtcgacggacacgacgtgctcgcggagaccgggacgctgccggtggccaccggcaggtcactcgccgacgtcctcgtacccgaacccgacgcggagctttccccggcgaagatccgccggatcctggaagtgatcgccttcgacgacacgctccccgccgggcccgccgcgatcggggcggacggcgcctggcggatgggcggcctgtcgggcagctgggcgaaggacgccccggcgtacatcggcgcgcccgtccgccttcgcgcgcgggagcgccggatcgccggactgcgggacaaaatctctctccgcgagaagaccatcgccgagctggagagtgagctggccgcgctgcgcggcaggcgcgagctgatcaagatcgaacgcgccgcccgccccagtcacgaagatctctttgccgcgacgggagaactgaccgcggccgaggccgagttgaccgccgccgacgccgccgtccggcacttggagaccgccgtctccgcgctggagatcgaggcgaagaccgcgctgcacgagctgaccgcccaggcgtcggagagcgggctgccctccgaacgcgcgccgctggccgcgctcgccccggccctgcgcacctactccgaccagggcgagaactggttgtacgagcacgggaacctgctcaccgcgacccaacgggccgagctgtgcgccgaacaggcggaccggtcggaggcgaacgcggcccggcgcgaggacgaggcttccgaggcggaggccgaacgcgtcaagctcacggcgatgctcgaagcgatcgaaggaaccgcgggcagcggtcagcgcgaggtgctcgccgaaatcgaggggcttcgcacgaaactgcgtgaactctcgggcgaactccgcgccgcgaacgccgacgccaaggagctcgcggtgtcgttgggcgcgctcggcgtccgccgcacgaccgacgcacgggcccgcgaggacgccgccaagaagcaggacgcggccgcgcaccggttccggaagctcgcgaccggcgtcttccccgccgacggcgggatcgaggatctgccgaagttccaggccaccctgtccgcctccgacggggtgcggtcggcgctcgaaacggcgcggctggtggccgcggcgtggccgtccgtgccacacgcgccgaggaacctcggcgaggcgctgcaccggctctccgaggccgtgcacacctgccggaacactctcagctcgcgggcggaactcgatctggagaccgacgaggacgtccagatcttcaccgccgtcgtcgacgggctgcgggtcggcgcggccgaactgctgaagatcctctacgcggaagcggaacagagcaggcacgagatcaccgaccgggaaagcgacctgttcgacaagacgctgaccggcgacacgcgccgccatctcgcggcccggatccggcaggccaacgacctcgtcgacggcatgaacgcgcggctggaacgcgtgcggaccgcgtccagggtcgccgtccggctggtctggcaggtctcccccgatctgccgccgggcaccaagaccgcgcgggatctgctgctgaaggatccggatcagctgaccgccgaggatcgcgcgtccctgcacaagttcttccgggaacgcgtcgaacaggcgaaggcggacgacacggcgaccagctgggaacagcagctcgcgcaggtcttcgactacacgtcctggcaccggttcgtggtcaaggtggaccgcgcgaacggcgcgggatggcagctgctgaccaagaaactgcacggcgcgctttccggtggggagaaggcgatcgcgctgcatctgccgctgttcgccgccgtcgccgcgcactaccaggccgcgcccgaagcaccgagggtcatcctgctcgacgaggtgttcgtcggcgtcgacaccaccaaccgggggcaggtgttcggcctgctgtccgaactcgacctggacctgatgctgacgtcggaccacgaatggtgcacctacgccgaactcggcggcgtcggaatccaccagctcatcaccggcggcgacggtgacgacgcggtcaccacggcccggttcacctggaacggtcacgacctcgcgcccgcggggcattag

SEQ ID NO: 50879 - DNA, 1491 bp, Geobacillus stearothermophilus; identical to SEQ ID NO: 50869

SEQ ID NO: 50880 - DNA, 1197 bp, Geobacillus stearothermophilus; identical to SEQ ID NO: 50870

SEQ ID NO: 50881 - DNA, 4122 bp, Geobacillus stearothermophilus; identical to SEQ ID NO: 50871

SEQ ID NO: 50882 - DNA, 1221 bp, Geobacillus stearothermophilus; identical to SEQ ID NO: 50872

SEQ ID NO: 50883 - DNA, 1512 bp, Geobacillus icigianus
atggatgcttcttggttgaagccgattgtcgaaacaaagtatttgtcggcggaaaatgcacaccgttatcgcgcgattttgcggtatttctacattcagcacgaacggatgcggcaatatttgttccccgaggaagtgtatgcgtttttgaaacagcatgccgaatttgccgattatactgaggatgatttgcagcaagacctcgatcagcttgtcaaatggaacaatttgatcgcccgccaagagacttcccatgtacggacgatcgaggaatttaagaaaaagcggtttcgttatcaatgcagcccgtacacagtggaaatagagcgaatgattcgcacgctcgaacagttgggcgactcgtttggcggttcgctcgagaaaacgcggtttgaccgtctgtacgcctccctttctcgcatggaaacgatcatatctgctaatttccaagaaaaaccggacgaaatacaccaagtgtgggaggagacgtttgattatttcaaaaaaatcattcaccattcggctgattatatcgcctatttgcatagcgaaaatttggaagaacggatgacggcggaatcgtttctcgtttacaaggaacaatttaccgcctatttgcgtgattttatcgtcgccttacagaagacatcgatgcaaattgagcggctgttggaagaccttccagacgaaggagtggaccggttcattgagcatgtagtcgattatgagcggtcgattccacgctttgccgacagcgccccgtcgcgcgccgaatgcatcgaagaaaagcgcgagacgtggcgcagtttgcgcgaatggtttttaggtcgggacggccacgaaagcgagctggcgtttttgcagcatcagacgaatgaagcgattcgtcgcttgacgcgcatcgtgcagcggcttggtgagcggcatcaccactttcgcagccgcaaaggcgattatttgcacttggcacgctggttttcgcaactgtcctcgatcgaagaggcgcactgtttgtcggcggtcgtgttcggctgcttccatacgaaacatctgatcgcagacaatgaggcgacagatgatatgtatcgcgatgtttgggacgaggcgccgatggaatgggtgacgaagccgcgcgtgcgccattatggagaaaagaagaaaccgcaggcgatcgaggagaaaaagcgggaaaaagaagaagcgcgccgccgctatttggaggagaaggcacgcgaggaagccgaactgaaacagctggtgaaagacggaaaaatcgtgctggccgaactcggtgaagtgaccccgtacgtacggaagacattgctcgcctggatcgccaaagcgatggggaaagaacagccaaccgtgaaaacggagaacggctgggacatccgcattgttcgtcgggacgacacgatttgccttcatgctgaagacggaacgcttgtgatgcccaactacgaaatcgaagtgatggcggaaggagggagcgaagatggagacggcgtttga

SEQ ID NO: 50884 - DNA, 1158 bp, Geobacillus icigianus
atggagacggcgtttgatgacaaggcaaaagaagcgttggcggcgctgtttgaacaattttggatcgtccgcgacgccgacccggaacggtatcagcttgtccgcgaacgcgaacacgtgctcaaaagatatgtcgaggagaagttcggctaccgcttgatcgtgcaccggcatttcgcgaagctcgaaaaaattccggctgagccggagccgtggatggggattccgtcgtttcaagagccgctcgactatgcgctgttttgctgcttgatggcgtatgttgaaagcaaggcggttgaagaaaaatttttgctttccgatgtatgcgaggaaatccgcgccatgtatccgggcgatgtgccggtcgattggacgaactattcgcagcggcgcgcgctcattcgcgtgctgaaaacagcggaacaaatcggactgatccgccggatggatggagagatcgaagcgttcgcgcaacatgcggacgaagaagcgctttatgaagtgtcggtgttggcgcgctactttatgcgcacatatccgaaagacttgctgcaatatacgtcgattgatgaactgttggcggaagaatggaaagcagcgccgcaagattaccggcgccatcgtctgtaccggaagctgtttttatcaccggctgtgcaccgaacagaaggcgacgagcaagatttttattacttgcgcaacttccggcatcggctgcgtgaggatattgagtcccatacgccgtttcgatatgagctgtacaaaaacgtcgccatgttgacgattccggaacggcaggcgccgtatacgctttttcccgatctaaaagggacatctgacatcatccttcattttgccgccgtcgtccgcgagcggttggcgtcctttccgccggacgagtacgggcgcctttggctgacgccggcgcagttttctgaatcgctcgccgatacgaagcgtcgttacgaagctggatgggggaagacgcatcgcgaagcatcgcttgcggagttagctcgcgaggtgctggcggagctcgaagcatggcgaatggcagacacggatcccgagacgggcatggtcgtcctctacccgctccttgggcggctttgtgggcgatacccggacgattttcaagcgaaagagagggagctatga

SEQ ID NO: 50885 - DNA, 4119 bp, Geobacillus icigianus
atggcagatcgatggatgttgcatcgcgcgggattgatcaatttctggtattatgatgaacaatattttcattttgccgacggaaagttgtttttgcgcggaagcaatggagcgggcaaatcggtgacgatgcaaagcttgatcccggtgctgcttgacgggaaaaagacgcccgaccggctcgatccgttcggttcgcgggcgcggcgaatggaagattacttgctcggggaaaaagatgtcgtcaaccgcgatgagcggaccggttatttgtttctcgaatataagcggaccgaaaccgatcaatatcttacgaccggcatcggtttgcgagcgaaacggcaaaaaaatctcgacttttggggctttgtcattttggacaaccgccgcatcggccatgatgttgacttgtacaaaaaagaaaaaacaggcgagaaaattcctttgacaaagcgcgagctcgccgatgcgctcggcgctgggggaacggtggtcgagacgcaaaaagaatatatggagctcgtcaataagcatgtgttccgcttcgaatcgctcgaggcgtttcaagagttgatcgagctgttgattcaattgcggagcccgaaattatcgaaagatttcaagccgacggtgatttacgaaattttggaaagcgcattgccgccgttaaccgatgaggaattgcgccatttgtccgagacgattgaaaatatggaccaagcaaagcagcagctggagcagctcgagcgtgatgcgcgggcgctcaagcggctttgcgaccattaccgtcattacaatgaatatatgattgccgaaaaagccgtggaatacgagaaagcggtccaacgagccgaacagctcgccgctgagcagcgaacaagatcagaagaggagaacaaagcgcggcagcggcttgatgagttggatgaggagatcatccgcctcagtcgtgaagaagacgtgttgcgtgcacgggaagtggagcttgcgggccatgaagtctttcaacaagccgaaacgtacgaaaagttaaaggaacagcagcgcgacctagcgaggcggcgggagcggcaagagcgggtgatcgaagagaaggagcggcttgaacggcagcgccgccatcaaattgatgaggcggaagcgcgcctcgatgagctggaacggaaggtggaagagacgttggcgcagttgcgcgccgacgcggacgaaggggcgtttgccggccatgaagtgaatgaaggcgattttctccgtcatcatcgtcaacagcgcgaatttccgtttacggtttggaagcaggaagcggaccgccatgcggaacggctcgaagcgctcgccgacctttggcggcgtcatgagggactgcaagcgcgctatgaagaagcaagcaaagaagcaggcgaactgcagcgggaagttgacgaatggcggcatcaataccggaaatgggacgaactgcttgaccaagaaaaagagcggtgggaacaagcggtgctcgcttggctggagcgtggcggcgtcacggtggacgaagcgcgcattcagacgtttttgcgacagacggacggcttgtatgatcaatattccatcgatgacctcaagcagccgttcacggcggcgtattatgatgccgtcgggaagaaaaacgatgaaaaatggcggcttgaacacgaaatgcgcttgcttggcggccagctcgccgagcgcgagcaggagcttcgccattggcagacagaacaagacccagaaccggaacgcgatccacagacggacgccatgcgcgcagagttggagcaacaaggagttgtttccgttccgctgtatgcggcagtcgaatttttcgaccatgtgccggagcctgtccgcgagcggatcgaatcggcgctcgcccatgccggactgctcgatgcgctgatcattgaccgcgatatggcggtgacgtatgaccgggtgctcgtcccgaacccggtgcatatggcgcatacgttggccgattatctccagccagatgcaggtgtccctgtcgctgcggagcggattgatgccgtgcttcgcagcattgtcattgccgatgaggcgcaagacggtggcatgacgcttaatgaagctggacgctatgcgcttggtctcgtacgcggtcatgcgcccgcccgcgagcgcgccatgttcatcggccgcacggcaaggcggcggtggcggatggagaagatcgcttcattggaagaagagatcgcttccttgcggcaagcgcttgaccgcctgcaggcggaacacaaagcggtggaagctcatatcgccgcattggcggagtggtttgccgcgtttccatccgaccgcgatgtgcgcgcggcgtttgaggaacgggaggaagcgcgccgccgcgcggaaagcaaagagcgcgactggcagcggcaacaagaaaaggtatcccgactcgctcgcgagtggcagcacctcaagcaaacgttgcgcgagcaatcggcagggcttgacgtggcgttttccgtggaaggatgcgatcgagcccgcttggcgatgaaatcgtatctccgctttttgcatgaactggaagtgcatgttcgagaagcgctctatgtcgcggtgatgatcacccagcagcgcgagcagctgcaggagcttcgcgacgacatcgatgaggccaaaggggagcggaatcgcctgctcgatgaagacgaacgtctggcgctccgcatggctgagatcgaacgaacgctccaacaaatgggggcggatgacattcgcgcggaaatcgcccgcgtgcgggagcggctcagcgctctgcgcgaggcagttccgcgtctagtcaacgagcgggcgcggaccgaacagcgccttgcgcgtcttgccgaagaacgggaacaaggagagaaacgggcaacgttcgctcgcgagctggccgccgcatgggagcaggcctttgcccgtgaggcggcgctcaagttggtggagctggaccgttcgcgtccgcttcgcgagcaggcgagcgaagcgaaacagcggtatgggggaacgttgaaagacagccgctcttcgctgctggctcggctgaacacaatctttttccaagaatcatccaatttgaccgaataccgggcgacgttcgaatcgctcccgttcgaggagaaagaatggagcaccgcggcgccggacgacgaaatggcgatgaaagcagctgattggagggaaaaacaagagcgaaacgtcattttccttgactacaaagggcagcgtgccacgccgtctgtcgttttggcggaagttgagcgggaaatcgcgttgcagcacgagtatatgaaagaacaagaccgggaactgtacgaagaagtcattttaaagtcggtcggccgcattttgcgcagccgcatccaacgcgcggagcgatgggtgaacgacatgaacaagcggatgagcgaaatcgatacgtcatcgagcctcgttctatccattcaatggaagccgaaaacggcggagacggaagacgagctcgacacgaaagagctggtggggttgctgcggatggattcacggctgctcaaggaggaagatttgcagcgggtgacgaaccatttccgctcgaaaatcgcccgcgcccgcgaactgcttgaggaacgcggccaaggcaacacgcttcatcaaattataaaagaagtgctcgactatcggaaatggttttcgtttaccctctactatgaaaaagaacacgaaccgaagcgcgaactgacaaaccaacgcttttatcggttcagcggcggggaaaaagcgttggcgatgtacattccgctgtttgcggcggcgtattcacgctatcaggaagcaggcgatgatgcgccgtacatcatctcgcttgatgaagcgttcgccggcgtcgatgaaaacaacatccgcatgatgttcggccttgttgaacagctcggctttaactacatcatgaactcgcaggcgctttggggtgactacgacaccgtgccggccctgtcgatttgcgagctcgtccgtccgcgcaatgcgccgtttgtcaccgtcatccagtattattggaacgggcgcatcaagcaattagtagcgaatgaggaagaatgggagttgatcgagacatga

SEQ ID NO: 50886 - DNA, 1221 bp, Geobacillus icigianus
atgaaccgggccgaagaggccgctgcctttttccgttccgaactgggctttcaccgtttgtttgtcgagatgaagaggaaatacgagtcgctcggtcgtgttggtggcgtcgtctccttggcatcgttcagcgagaacgagcgcgaagccatcgctgcctttttcggccgagacgtttcccgcgtttccctgcccgcctttgaacggcagctcgaacgaacacggtttgccggcgttggcctcatcgagctgctcgagcactatttcggtgagccgctcgtgccgaaaaaagaacagcgtcaggcggccgaaaaggagcgggagcggtttttcgggcatctcgcccacgagcacccttggcttgaagacatttgtggccaacggttcatccaagcagcgtatgaggcaaaccgcgaagagttggcggcggcgatccgtcttgtcggcgccgcccttcgccgcttgccgctcggctcgtatgaacggctcccattgtttgcccagcgtatcgccggtgatccacacgcttttgacctgtcaacgctccccggcaaggtgttgctgtcggccttgcaagcaaccgtgctaggcgagtgggatgtgacctctgtagagagcgtcaatgaattgctgcagtccgtcggcctgctccgcgaggatattttgaactttgccacctgcgccaacttgttggccgaaacgaagaaaggccctcacccggtcttcaccgctgccgtcgaagccaacagcgcattgaatgcaccgctaagggacgtgttgtcgctcattcgcgcctatccagccaacggcggcatcgtatacgtcgtcgaaaacgcgggcgttttctcgaccttgcttgacacccgcgccccgcttgtctgcgcgaacgggcaaatgaatttagcgacgatgcggctccttgatttgctcgcggcttcaggcgccaagctgcattactccggcgactttgacccggaaggtttgaaaatggccgaccgttttctcgagcgatacggctcggcggctgttccatggcgctacagcgtcgatgattacttcgccgccaccccatcggttcacttgcctccggagcggctcgccaaactcgcctccgtagcgtcaacgccgctgcagccagtgaaagaagcgatagcgaaaaccgaaaaagcgggataccaagaggcgatcatcagccgactgcttggagacataaaaagttag

SEQ ID NO: 50887 - DNA, 1482 bp, Anoxybacillus sp. KU2-6(11)
atggatacgtcatggctaaagccgattacagaggcgaaatatttagtagttgacaatgcatatcggtaccgcgcgattttgcgctatttttatacgcagcacgagcgaatgcgccaatatttgtttccagaagaagtgtacgcttttttaaaacaattcgatgaatttcaagcgtatacagaagaggagctgcaacaagacttagagcagctcgtcaaatggaaaaacttaatcgctagacaagaaacgggccatattcggacgattgaggaatttaaaaagaaacggtttcgctatcaatgcagcccgtatacggtcgaaatcgaacgaatgattcgcacgcttgagcagctaggggatacgtttggcggctcgctcgaaaaaacacgatttgatcgcctgtatgcatcacttgtccgaatggaatcgattattcacgctggatttgtcgaaaaacgagaggaaatgaatcaagtgtgggaagaaacgttcgattattttaaaaaaatcatccaaaattctgccgattacatcgcctatttaaacggagaaaacatggaagaacggatgatgtctgattcgtttctcgtgtataaagagcaatttaccgcctatttgcgcgattttatcgtcgcattgcaaaaaacatcgatgcaaattgaaaagctgctcgaagacttgccagaggaaggtgtgcgccgattgattgaggaagtagttgcttaccaactcgccattccccgttttgaaggcgcagttttttcgcgtgaacagctaacggaagagaagctagacacgtggcgcagtttaaaagaatggtttttagggcgaaacggccacgaaagtgaactgtcgtttttgcaaaagcagacgaacgaagccattcggcgaatgacgcgtgtcgttcagcggttaggggagcgccatcatcattttcgcagccgaaagaaagactacttgcatttagccaaatggttttcgtcattagaaacggtagaagaagcacataaactgtccgcggttgtgttcggctgtttccatacgaaacacatcgtcgccgaaaatgatgcaacggaaaacatgtaccgcgatatttgggaggaacaaccggcagaatggctcgtcaaaccgcgcgttcgccactatcgagaaaagaaaaagccagaagcaatgatcgataggcgaaaagaaaaagaggaaacgatgaccgcctacttagcagcgaagcaacaagaagaagagcagctggaacaactcataaacgacaggaaaatcatacttcgggaactcccggtcgttgcttcgcatatccgcaagacgttgctcggatggattgcgaaagcgatggggcgggaagaccgtatcgtgcaaacggaaaacggatggaaagtgaaagtggtccaatgcgaaggaacgattacactgaaagcagaagatggtacgttaatgatgccaaattacgaaatccatttgctagactag

SEQ ID NO: 50888 - DNA, 4140 bp, Anoxybacillus sp. KU2-6(11)
atgacgaataaatgggtgcttcatcgcgcgggattgattaatttttggtattacgatgagcaatatttcgaatttgctgacggcaagttgttgcttcgcgggacgaacggttctgggaagtcagtgacgatgcaaagcttgcttcctgttttattggacggcaaaaaaacgccggaccggctcgacccgttcggttctcgggcacggcgaatggaagattacttgcttggtgaaaaagaaattgtcgatcgcgatgaacggacaggttatttgtttttagaatataaacgaaagcagacggagcaatatgtgacaacgggaatcgggttgcgggcaaagcggcaaaaaaatatggatttttgggggttcgtcatttttgataaccgccgcatcggtcgcgatttatttttatataaaacggaaaaatcagcgaacggaacagaaaaaatcccgctcacgaaacgcgagttagccaatttgcttggcaacggcggaacggttgttgattcacaaaaagaatatatggagctcgtcaataagcacatcttccgctttgaatcgatggaggcgtttcaagaattaattgagctattgattcaattgcgcagcccgaaactatcgaaagattttaagccgacggttatttatgaaattttagaaagctcgcttccggcgttgacagacgacgagttgcgccatttatcggaaacgattgaaaatatggatcaaacaaagcaacaactcgagcagctagagcgcgacgagcaatcgctaaagcggctttgtgcgcaatatcgagcatataacgagtatatgatcgcagaaaaagcaagtgaatggataaaggcagacaaacaggtgaagcggctagcagaagaaggaaaacaatggcttacggaagaagcagaaaaacaaacgcaccttgcggatttgagcgaatatattcaaacgcttgcaaacgaacaggacgtattgcatcaacgagaaatagagttagcgagccacgaagtgttccaagcgacaaaagaatatgaacgagttcaacaagaaataaacgacattcacgaaaagcaacaaaaactattgcggcaaattgacgagaaagagcaactagaacgccgctataagcgccagttaggagaagacgaagatcggcggtatcagatagaaaagcaactcgcacagcaactagaagatttacggcacgatgcgatggaaagttcattttctgcgcatgatctgaacgaagctgatttctctcgccagcgccaaacgaaatttgactttaccgtctggaagagagaagggcaagaatacgccgaaaaactagaacaggcgattgcgctttggcgccgacacgacgaaatgaaggcgcgctatgaagagacgagtaaagaggtaggtgacttgcagcgggaagtagacgaattgcgccatgaagaaacgaaatggctcgaactgttagaaaacgaaaaatcacggttccaacaagaagtatttcgctggctcgaacaatgccaagacgttttcgtacgagaagcatctgtccaactatttttacagcgcctccatgaactatacgaaacgtatcatgtcgatgagatgaagcagccgtttacggaagcgtattacgaagcactcaatcgaaaaaacgaagaaaaaatggcgcaaaagcatgcgtgtgcgttattagaagagaagattgccgcaaaagaggcggaatggaaccaatggaaaacgcaaaaagatcccgagctagcgcgcgatgaacaaacgatggcagcgcgggcggagttagacgaaaaagggattgctttcgtcccgttttatgcaggagtggaatttcaagaccacgtaccagaaccgcttcgggagcggattgaatccgcgctatatcacgctgggctgctcgatgcgttgattacggaaaccgatgtcgaagtaagttgtgaccgagtgattgtcccacgcccaatcgaaatggcgcatacattagcagactatttacagccggacgtagatgaagagtgtggggtttcaaaagcgcgcattaaagaagtactccaaagcatcgtgcttgccgatagagaaatggacggggcgtttatgctcaacgaagaggggcattatacgcttggaatagtcaaagggcatgctccggcaagggaaaaagcgctgtttatcggacgggctgcccgcaagcgttggcggctagaaaaaatcgctgcccttgaagcggaattaattgagcttcgtgctcagttgcacgagcaaaccgataggctcaaacagctcgagcagacgattgcgcaaataaacagctggtttcgcgcctttccaaccgaccgcgacatgcgcgcagcttttgaagaacgggaaaaaacgaaacgaatgacgataagcaagcaacaagaatgggagcggaaaaacgagaagcttgcccaactagcccgcgactggcaacaagcaaaacaaacgttgcgcgagtacaccgagggactcgatttagagttttccaaagacggctatgaacaggcgcttctctttatgaaatcgtatatgcgcgggcttcacgaactgcaaatgattcatcgggagtttcttcatttgctcgacatgattcgccatcgtacagaacagctagaaacggtacaacaagaaatcgatgaaacaaaaggtgaacgacatgtgcttgcaaaagagcagcaaaaactcgaactaaaacggcaagaagtcgaacgcacgctgcaactaatgggcgcagaagaaattcaagcagagattcaacgcgttcgtgaccggttagcatttttacagcgagaaatgccagcgaaactgaacgagcgtatcgcgctagagcatgagctaaaagctattggcgaaaaatgcgaacagttggtggtgaaagaagcgttcgctaagcggttagcggaggcgtggaagcggtcgtttgagcgagaggtcgcccttgaacttgttgacctgcatgcccatgatacgttcgaacaggcgaaagaggcgattcagcgatatggggcgctgttaaaagaaacgagaacgtcgcttgtgaaccgattaaatagcatcttttttcaagaatcagcgaatttaacggaataccggctcagccaagagccagtctcggtagaggaaacgaatccatttatcgatatcgaattagacgaagaaatggaattaaaagtcgcagggtggagagaaaagcaagaccgcatcgtccttttgcttgattataaagggcagcgcgtatcaccattttatgtactacatgaaatcgagcatgacattttcttgcagcgcgaatatatgaaagagcaagaccgcgaattgtatgaagaaattattttaaaaacaatcgggcggattttgcgcagccgcattcaacgggcggagcgttgggtaaaagatatgaacgaactaatgcaacagctcgacacatcttccggtcttgtgttgtttattcaatggaagccgcgcactgcggaaacggaagaagagatggatacgaaagagcttgtcgaattgttgcggatgaactcgcggctattaaaagaggaagatttgcagcgagtgacgaaacatttccgctcgaaaattaaccgcgcccgcgagttgttagaagagcgtggtcaaggcaatacgctgcaccaaattattaaagaagtgttggattatcggaaatggttttcgttcaccctttattaccaaaagacgaacgaaccgaaacgggagttgacgaaccaacgtttctatcaatttagcggcggggagaaagcgatggcgatgtatattccgttatttgccgcgacgtattcgcgctatcaagaagcggcagaagatgcaccgtacattatttcgctcgatgaagcgttcgcgggggtagacgaaaataatattcgcaacatgttcgggcttgtcgaacaacttgggtttaattatgtgatgaactcgcaggcgctttggggcgattacgatacagttccggcgctatcgatttgtgaactcgttcgtccgaaaaacgcctcgttcgtgaccgtcattcgctattattggaacggaaaagtaaagcagcttgtcgctgaggatgcaagaaagggtgagctcattgaaccgattagatga

SEQ ID NO: 50889 - DNA, 1233 bp, Anoxybacillus sp. KU2-6(11)
ttgaaccgattagatgaggcggtgcaattttttcgcggtgaacgttcgtttcaccgccttttttgcgaaatgaaaaagaaatacgaatcgcttggccgcattggcggcacgatttccgttgcatctttttcaatggaagaaaaagatgcgattgcgtcgttttttggcaaagaaatgagccgtgtgtcgctcgcagcgtttgaacaacagcttactaatacaaggtttgccggtatttcgctgattgaactattagagcattattttggcgaaccgcttgtgacgaaaaaagaacagcagatagaagcggagcgggaaaaagaagcatattttacacggttgatgcatacgtatcgagcacagcgcgattggctgatagcggtagagaagcagcggtttgtgcaattagcatatcaacaaactcctcaaacgttagaggtagcactttctgccgtttgccgcgcgcttgaacagcttccgtccacttacacgcgccttcctgtgtttgcgcaaaaagtaacaaacgacccccatgcgtttgatttgcataccctctcagggaagctattgctttcggcgctgcaattttatgcggacaccgagtacgacctttcgtcggtagaagacgtgaacgaactattgcagtcgtatcggctgttgcgggaagatgtgttaaactttgtgacgtgtgttggcgtgatggcagaaatagagaagggtcgccatcctgttttcgctgctgcatgcgaaacgaatacggcgctaaatgtgccgcttcgggaagtaatgccgttgacacgggcgtatccgtccattggcaacaccgtctttgtcgtcgaaaatgcgggcgtgttttcgacgctattagatgcgaacgtgccgctcattagcacaaacggtcagctcaatttagcgacgatgtggctgcttgatttacttgtccaagaaggagtcattctctgttattcgggcgattttgacccagaaggattaaaaatggcgcagcgccttgtcgagcggtacgggcaatcggtgcggctttggcattacgactgttctgattatttggcgacaaaaccgaccgttccgctatccgacgagcgcttagcgaaattgcaatcggttacgctttatgacttgcaagcggtaaaacaagaaatgttgcggcggaaaaaagcaggataccaagaggcgcttgttgaacagttgaggggggaggtgaagagaaggtaa

SEQ ID NO: 50890 - DNA, 1494 bp, Amycolatopsis sp. MJM2582
atggatccgttccgtgtaccgcccgagctgttccgtttcaccgacgggagcagatcagggcttcccctggcgatcctgcacgccttcggcgaggcgaacgagcggctggagacggcgctcgggatcgacgacgtccgcacgcggctgcgtgaggtcggctggctggagacgctcgacgacgaagacctcgtcaaggcgttggaccagctcaagggccagggccacctcgacgtcgtccagagccacgcgggtgactaccggaccgcgtccgagtacgagcgccgcaatctccagtacgcgctgacccggcagggcgaggcggcgtacgcgggtgtggtccgcgcgaacgaggtgctcaacgcgacgggggcgcttcagacggcgacgctcgaagcgctcggcgaacggctcggtgagctcgcgaagcagctcgaagacggcaccgacaggcgtgttttcagtgcgctctccgaagtcgagggccacctcgaagcgttccgcgacaacacgaagcgcttcaacggcgacctccagcgcctgctgcacgcggaggccgatctcgcgacgttccacgaggtcaaggcggcgacggtcgcgtatctgcaggagttcctcaacgatctcgagcatcacacccacaccatcgccacccgcatcaaggagatcgacgaccacggcatcgagcgcgtgcaccggcgggcgctcaacggagcggccctcaacaacccggatcagcgctggctcgacgtccgcaaggcgcggtgggacgggctgcgcgcgtggttcctgcccgcggacggggcgacgccgcgggtcgaggacctccacaacctcgcgcggcgggcgatcatcacgcttctccaggtcctggaccggatcaccgagtcgcggcggcgcgcgagcagcgcggtcgccgatttccgggagctggcgcggtggttcaccgtcgtcccggcgcaggaggacctgcatcgcctgtggtccacgatgttcggcctgagctccgcgcggcacgcgcatctcgcccacgccgacccggaagtggtcagcacgacggcttcgtggctcgacgcgccgccggtcgaggtgtcggaactgctccgctccgcgggccgcaccgagcggttcacccggaccgggcgggtccgcgacgtcagcgcgatcagagccgcgagagccgaaaaagccctgcaggaacgcgccgagctcgaagccgcgtggaacatgctcgacaccggcggcgtcgtgcggctttcggcgttcgagaagctggaccacaccgttttcgagcggctgctggatctgctgggacaggcgctgggcaggcctcccggcgcggagggcgcccggcggagcacgacgtccgacggccagatcgagatcgtcctgcggccaccgcggaacggcgcggtcgcgcgcctgaccaccacgagcggcgtcttccgtggccccgactacgaaatcgagatcagcacggccggaggcggtgcgtga

SEQ ID NO: 50891 - DNA, 1221 bp, Amycolatopsis sp. MJM2582
gtgagcctcacgaaccaactggtcatcgcggaacgcgaagaggtcgcgcgcgggatccgggccctgctggccaccccgctgatcggcgaacgcggctcccccgagaccttcgacctcatccggcgccgccgcgaacccatccggcagtggttcgactactactgcggatggacgctcacggtcgaaccgcggctcggctacgcccggctggtcaaggtccgcgcggccgccgaccccacccgacctgcgcgacggctgcgctccgggcgcgcggcgttcgaccgccgccgctacgtcctgctgtgcgtggtggcggccgaactgctgaccgtgccggtgacgaccatcggactcctcgccggccgcgtcgcgcaggcgagcgccgccgacgatctcgtcaccacgttcgacgtcgccaccagggcggagcgtttggcgttcgtagacgtcctcaagctcctggagtccttcggcgtcctcgaagcggccgacggggatccggagtcctttgtggacgatccggcggcgaaggtgctgttccgggtcgacgcgacactgttgctgcggctgctcgccgcgccggtcggtccttcccagctggccgtgcccgccgacgacgtcgcgctgcggttcgaggaactgctggaggcggtgtcgcacgagcagcgctacggcctttcctccggccgccacgaggacacgccgagcgcgtcggacgtccagcggaacctgtggctgcggcacacggtgttccgccgtctcgtcgacgatccggtgctgtacttcgccgaactgaccgcggaggaacgcgcgtacctcggcacgccgaccggccgccagttgctgcggcgtgccgccgagcagggcggtttcgtcctcgaagagcgcgcggagggtgtgctgctcgtcgacgtcgacgggctggccaccgacgagcggttcccggacgacggcagcaacgcgaaggtcgccgcgctcctgctgctcgacgtgctcgacgagccgcggaccatcgactacctgcagaaggcgaccgccaaactgctgaaacgcttcccgcgctgggccaagacgtaccggggcaaggacggcgtgcgacggctgaccgtcgacgcgctcgccgtgctgaccggcttcggactggtccgcaccgaagccgaactcgtccggccgctcccggccgccgcgaggtacaccgaccgcaccgaggaggcaccgtga

SEQ ID NO: 50892 - DNA, 3984 bp, Amycolatopsis sp. MJM2582
gtgaccgtgacgaggtggatcccctcccgtgcgggcatcctcaacatctggcgctactacgacgagatcttcgagttccacgacgggcgcctgctgctgcgcggtcccaacgggagcgggaagtcgaaggcgctggagctgctgctgccgttcctgttcgacgcgagcctgcgcgcgaaccggttgtcgacgttcggcaccagcgagcgcagcatgcactggaacctgatgggtgaaggcgcttccggcgccacgcgcgtcgggtacgtctggctcgaattcggcatggcgggcgaaaagtggttcacctgcggcgcgcggctgcaggccagcacccacaccagcacggtgcacgccgatttcttcaccaccgatctgcgcgtgggcgacggcctggcgttggtcaacgaggccggtcagccactgaccaagggcgcgctggaagaggcgctcggcgagcacgggacggtgcacgacggcgcggccgagtaccgcgcggcgatccgcgcgaaactgttccccactttgagcgaacagcgctacgacgcgctgatcaccgcgctgctgcagctgcggatgcccaaactctcgcagcggctcgacccgagcctgctgtccaacctgctctcccgcgcgcttccgccgttggggcagcaggagatcgcggacctcgccgagggtttcgagcggctcgacgcgcaacgcgaacggctgggctcgctggagaccgaggtcgacgcgacccgcgcgctcgccgcgcggcagaagacctacgcccagcgtgtgctgcgcgcgggcgccgcgaacctcatcaacgccaccacggaactcgacgagctcgccgcggccgcccgccgttcggccgaggagcacgacgaagtggccgcgaagaaggaggccgccgaagcacgggcggcgaagctcgaaaaagacgtcgaagagaccgaagcgcgtctgtcggggctgaccgaatccgagtcgtatcgcaagggccaggagctcgacaagctgcggcaacggaccttgtccacgagcgagaaagcggaggcactgcgcgcggacgcggaccggctccgtgccgaggcggatgccgacgaggagcgctcatgggcggcgaagcaggtcgtgaaacggcaggccgacctcgtgcgctcgctggagaccgaggtccgcgccgctgcgacccgcgcgaatctggccggggtacacgacgaactcgtcgccgggctggacgaaccggcccggctccgcccgttgctgcaggccgccgtccgcggcaaacgcgatcaggtcgaggcactcggccggacactggacaaacacgaacgcgccgtcggacgacgtcaccaggccgaagcggacctggaccgcgcacgagcggatttctcggtcgcgcaggagcgggtcgaactcacgacggcgacgcgggaactcgcgctgagcgatctgcgcacccggctcgccgaatgggcgatcggctgccgcgagctgcgcttccccgacgtggaagcggtcgtccgggacgccgaggcggaggtctcgctgctgggcaggctcggcgtcgtcgccgagaccgtgctcgaagacatcatccggcgggaggcggcgaccggtgccgcgctggccaccgcgcgcgccgagcacgacgaactcctcgtcgaggcgggcgtgctcgaaacggaggacatcctcgcgcccgagccgccgcgcacccgcacggcggaccgggccgagatgagcggcgcgccgttgtggcggctggtcgatttcgccggctcggtcccggaaagcagccacgcggggatcgaggccgcgctcgaaggcgccggtctgctggacgcctgggtgaactcccacggggtcgtcgacgggcacgacgtgctcgcggagtccgggacgctgccggtggcctccggtcgttcgctcgccgacgtcctcgtgccggaacccgacgcggaggtttcccccacgaagatccgccggatcctggaagtgatcgcgttcgacgacaccctccccgccggtcccgcggcgatcggcgcggacggtggctggcggatgggcagcctgtcgggtagctgggcgaaggacgccccggcctacattggcggttccgcgcggctgcgcgcccgcgaacgccgcatcgccgcgctgcgggacaagatctccctccgtgagaagaccatcgccgagctggagggcgagctggccgccctgcgcggcaggcgcgagctgatcaagatcgaacgcgccgcccgccccggtcacgacgatctcctcgccgccacaggggaactgaccacggccgaggccgagctgaccgccgccgacgccgccgtccggcatctggagggcgccgtctccgcgctggagatcgaggccaagaccgcgctgcacgagctgaccgcgcaggcttcggaatccgggttgccgaccgaacgcgcaccgctggccgcgctcgccacggctctgcgtacgtactccgaccagggcgagaactggttgtacgagcacgggaacctgctcaccgcgacccagcgggccgagctgtgcgccgagcaggcggaccggtcggaggggaacgcggcccggcgcgaggacgaggccgccgacgcggaggccgaacgcaccaagctcaccgcgatgctcgacgcgatcgacgggacggtcggcaccggccagcgcgaggtgctcgccgagatcgacggcctgcgcacgaaactgcgtgaactctcgggcgaactccgcgccgcgaacgccgacgccaaggagctcgcggtgtcgctgggcgcgctcggcgtccgccggaccaccgacgcgcgggcacgcgaagaggcggccaagaagcaggacgccgccgcgctccggttccggaagctcgccaccgggatcttccccgcggacggcgggatcgaggatctgccgaagttccaggccaccctgtccgcgtccgagagcgtccgtgcggcgctggacacggcccggctggtggccgccgcgtggccgtccgtgccgcacgcgccgagcaacctcggtgaggcactgcaccggctgtcggaagccgtgcacacctgccggaacacgctcagctcgcgcgcggaactcgatctggagaccgacgaggacgtccagatcttcaccgccgtcgtcgacgggctgcgggtcggcgcggccgaactgctcaagatcctttacgcggaagcggagcagagcaggcacgagatcaccgatcgcgagagcgacctgttcgacaagacgctgaccggcgacacccgccgtcatctcgcggcccgcatccggcaggccaacgacctcgtcgacggcatgaacgcgcggctggaacgcgtgcggaccgcgtcgagggtcgccgtccggctggtctggcaggtctccccggatctgccgccgggtaccaagaccgcgcgggatctgctgctgaaggatccggatcagctgaccgccgaagaccgtgtgtcgctgcacaagttcttccgtgagcgcgtcgagcaggcgaaggcggacgacacggcgaccagctgggaacagcagctcgcgcaggtcttcgactacacgtcgtggcaccggttcgtggtcaaggtggaccgcgcgaacggggcgggctggcagctgctgaccaagaagctgcacggcgcgctttccggtggggagaaggcgatcgcgctgcacctgccgctgttcgccgccgtcgccgcgcactaccaggccgcgcccgaggcgccgagggtgatcctgctcgacgaggtgttcgtcggcgtcgacaccaccaaccgggggcaggtgttcggcctgctgtccgcactcgacctcgacctgatgctgacgtcggaccacgaatggtgcacctacgccgaactcggcggcgtcgggatccaccagctcatcaccggcggtgacggcgacgacgcggtcaccacggcccggttcacctggaacggccacgacctccagcccgccgggcattag

SEQ ID NO: 50893 - DNA, 1533 bp, Burkholderia oklahomensis
gtgcagtcgaatgcaactgcggcggaacttttcaggcatttgggcgccgagaagtccgcgttctatcgatgcatcatggatgtcttcgccgcggccaagcggcaatacaggctccagctgcgccccgacgaggttctcgctgaggcgaactggtccgaagggatgccgcgtatcgaggaagtcaacgctgcactgacccaattgaccgaatgggggaatctcgaatcccagccggatacggcacgcgtttcttcgctcagcgacttttaccgcgcacgcttcctttaccggctttctcacggaggcgaggccgtggagacgagcctagccgtgttcttccagacactacagcgacgggccgaattgcaaagcgtggcgctggaggacattgccagccgcctgcaggctctacagcagctgatcgacgatgacacccctgaaaatggactcgacgtcgccaagacacaccagctcctgcgcgatctggtcggcgtcttccatgaccttgccgagaatgcacaggcattcatggcaggcgtcgcacgaagcctggagcttcggcaagccgaagcaaatgctgtcgtcgcgtacaagcgccgcctcatcgattacctcgatcgctttcttggcgatctggtacggcgctccgacttcatcgctcagcttatcgaggaactagccccccgcatcgactctgtcttccttctggtggcggaccgagaagctcaggatgccgctccggaagacacgcagaatcaagccgacgaaaaattgaggcgctggcgggcttggcgcgaacgctggaaaggcctgcgcggctggtttttgtcgacgggacaggaaccacctcaagccgagttgctgcgtgcacgcgcacgcgccgccataccgctactcttgggcgccatcgccacgttgaacgaacgccgcagcggacgcagtgatcgctctgccgactttcgcatgctcgcctactggttcgccgcatgcaacagcgacagcgaagcccatcggatggcgcgggcagctttcgcacttcatcccgcccggcactattccctgaatccccaggccgacgacgacctgcctgccaccacgccttgggcagatgcgcccccgctccaaatcaaccctcgcttgcgcgagtatggcgaggccgccccccggggaccgctcccgaaggtacgtgaccgcagcacggagcgcgcgctcatggccgagcagttggcagaagaatcgcgccaggtcgatgctgctcggcaacgcttggccaccgggcgtccaatccgcctttccgaactgggcgacctggacgttcacgcctttgccctgtttctcaacctcctaggagaagcattgaccgaacaagcgcatcccgaccagaccgtcgagcgccaaacgggcgacggactgctctatatccgcatggagccgctcgacgccaccacagaagctcgcatcacgacccctgccggcgttttcgcgggtcgggatcaccttctcacgatcacgcttacgcaagaaccgacatga

SEQ ID NO: 50894 - DNA, 1275 bp, Burkholderia oklahomensis
atgactgcacgcacatcatggggacacgatcgtcagcgaatcggtgaactccaacgtgtccagcaacaagacgagtttcgccgagcgctgcgtgccctgctgttgcagccgctgatggcaccggaccatgacgctttcccggcggtacgccgccaagccgaacgattgcgcgactggtttgcgcgggaaactggctggcccctgcatgtcgaacgcgatggcgcccggcttttcaagcgacccgcgaaccttgccgacgatacgcgcgggctgccgaacttcgaccggcagcgctatgtcttgctctgcctcgcgtgtgccgtgcttgagagagctgatccgcagattacgttgcagttgctcggcgaacgcctgatgcagttggcgtccgatccaacgttggtttcttgcggcttccagttcacgctcggtagcgttgccgagcggcgtgacctcgttgccgtgtgtcgcactctgctcgacttcggcgtcttacaacgtgtcgctggcgacgaggataatttcgtccatgaaaatggctggacgcagtcagacgcgctctacgatgtccagcggcgcatgctggcgggcatgcttgcggccgtgcgtggaccgtcgacgtggcgtgtcgaagatgcgccgatcgatttcgaggatcggttgcgctcattggtagcggagcatgtcgccgacagcgagcagggacaccgcgatgctcttcgtcaccatctggcgcgccggcttctggacgatcccgttatctacggcgcgtctttggatcccgagcatctcgcgtacttcatcaatcagcgtggcgcaatggcggcccgcctttgcgaagccactggactaaccaccgagcagcgagccgaagggctcgcgttgaccgacgaatcgggagaactcaccgacatctcgatgcctgccgaaggaactgaagcgcacattacgctgctggtcgccgagtttttggcctcacgccagcgagaagtgccggaaatcgcattgacatcccaggacgctgtagccgccttcctgcgcggcgccacggagcaatatggtcgctactggcgcaaatcggcacgcgaacctggcgctgaaatggagctggccgaaatcgcactcgaccgattggagcggcttcaactgattgtccgaatccatcgcgagattcgaccgctgccggccatcgcccgcttcgctctgggcgatcccgaaattcgttcgaaagcaaccggcgacgttactccagaattattgcttattgacgcatga

SEQ ID NO: 50895 - DNA, 4182 bp, Burkholderia oklahomensis
atgaccgacaccctcttcgattcgccccaagcactgcgtccggtattgccggaaccccgacacgagcggtggcagcccctgcggatcggcctcgtggaactttttcactacgacagtgaggaattctggttccgcgacggccatttgctgctacgtggcaacaacggcaccggcaagtccaaagtgctgtctctcaccttgccatttctcttcgacgcccaactgcgtccgtcgcgtatcgaaccggacggggacagcggcaagaagatggcctggaacctgcttatggacggctataaacgccgaatcggctacacgtggattgagttcggcagacggaaagccgacggcatggcgcgctatttgaccctaggggccgggttgtcggcggtgaccggcaaaacgcaggtcgatagttggttttttttgatcgaaagctcgtcaggtgaacaagatccgcgtatcggtcaagatctgtggctcacgaacgaacagcggatcgtgttgacccgcgagcggttgcgcgaacgcctggaagagcgcggtcatggcacagtctttgagaacggtcgcaactatcgccgagctgtggatgagcggctcttccaccttggcgaaaagcggtacgaagcgctcatggacactttgatccaactgcgccagcctcaattgtcgaagaagcccgacgaatcgggtctttcccacgcactaacggaagcgctcccccctatgccacaggaattgttggcggacgtggcggacgcgctgaatcagttggaggcggatcgcgagcagttgaacaacacgcgtcagctcgagcaggcagtcaggcatttcgagcaaagataccggacgtacgctagcacgttgactcgacgccaagcgcgcgaacttcgtcaggcgcagaccgcattcgacaatgccagcgaggagcgcaacaatgcacagaacgtattgcacactgcgaaggaagcagaggccgaagcgatccgcactcgtgacgccgcgaagcaagcatcgaccgcggcgcgagagcgcctggaaacgctgcaaagcgatccggccaatcaggacgccaaccgcctgagccaagccgaaagagatgtcaaggaccgaaaggaggaagcggccaaggcagaggaacagcgcgaggaggctcggcggcaactggaacgcgaaaaggaacgcagccgggcgtccaaccaacgggccgaggcagcacgaagcgaagtcgcgtccgcgcgcacgcaatgcgcgtccgacgcgcaaaccgcaggcacggccgtcgcgctgtcccgcaacccactcgtcgccctccccctcgacgaactcgccgagctaccggtgacgcagttcacgtccgcggcgaccgagttgcgcgatgccgcgaacaggcgccgcgagaacatccggtatctggaacagcgccacgctgccgtggctaccaaacggtcgacgcttcaaacattgcaggcagcccaaaacgactgccaagcagaactcgaggaagcgatagagcggcgcgccgaggccgatctggatgcggaaacgacaggcaatgcgctgatcgacgcctggacgaaatattgcgccggtctggaacagctacgtttcgaaccacagaacgcactatccgagcttgcaggctggacagcccgtcctgagggcatcaatccggttcactcggcgctgatcacagcttactcgcaagcattggaacaacacgccgctcgccaaaccgaacttgcaacgcgccagcgtgacctggatcaggaacgccgtgttctggccgacgaacgggaacagctcgcggcaggccaggacgccatcccgcccgttccctcgacccggggcgcgaacgttcgcgagggacgggcaggcgccccgctctggcagctgatcgattttcactcccatgtcacgccgcaacagcgtgcaggtctggaggcatcgctggaagcgtgcggcctgctggacgcatgggtcgcgcctgacggcaacgtgtgcgatacggcgggaagaccgatttgggacacacaatggcggcaacgtcccgccgtcgcgggcgagaatctgctgagcctgctgtcgccggcggtacctgaagattgcacggtagatccagcgctggtggaagccttgcttgccagcatcgcctgcggaccggaagacgatctcgctgccgaatcctggatcgctgcggatgggcgcttccggttaggtgcacttacaggtgcgtgggataagctggaagccgtatacatcggccacactgcccgggcgcaagcccgacagtgccggatgcaggaaattgcgctacggcttcggcaactggacgctgaagcttctatcctgttgcaggcagttgaagcgcttgccgccgatcgcgcgaaaaccaaagaagagttgggcggcgcgcctaccgatacctcgctccgtcaggcgattcttgccgcggcaagcgccgagcgtgatgtacttcaagctcgcactcgactcgatcaagccgacacccgatgccgagcagcggagaccgaactctacgcggcacgcgaagcgcttgagaacgatgccgtcgacctgcaactgccgctcgaccaggcaggcctcgctccgatcgacagtgccctggaccgattcaccgatgcgctccacatattgtcccaagccggccgggaatggcgtagcgcctggccggaccacctgaagcagcaggagcgtgagatcgaagcccaagtcactctggaacgccgagaggacgaactcagcactgtaaatgaacggagggaaaaaactcttgcgcgctacgcagtcctgacggaggcgattggcgcgaaagttgaaacattgcgcctgcaactgaacgaggcaaaccggaacgcaaccgaagccgcgaccgacgccgaccacaaacaagcagtcttgatcgaagcagccgaagcccgcgccgtagccgatactcaagccaccaccgcgaatcgtgtgctggcggagcgcgcggacattcgcacactggctgtcgagcggctgcaacgctttactgaaagcacgctgctggcctctgcgctgcccgacctgcccctcccgcccgccagcatgccctggaccatcgatcctgcgctgcaactggcgcgcagagcagaacaagcgctcgcgcacatcggggatgacgacgtcagttggagccgcatccagcgccaagtctcagaggacctgaccgaactacaacgctcgctcagcgcgctcggccatcaggcggcctccgaacccaacgattggggcttcacagtccacgtcaattatcagaaccgctcggagcgaccggacacactggccgttcaccttgctgacgacattgcgcagcgcagcgaactgctatcggccagagagcgggagattctggagaaccaccttcaagcggagatcgctgcggaaatccagcgcttgatgcgtgcagcggacaaacaggtcaacgcgatcaatgacgagttgtacaaacgtcctaccacgaccggcgtccgctaccgcttgcaatggcaacctcttgcgccggaagaaggtgggcccttgggcctcgagatcgcacgcgaacggctgctcaatacgagttcggacctttggtccgcagaagatcgtcgcgtggtgggcgtcatgttgcagcagcaaatcgccatggagcgagcccgtgctgaagacgatgccaccgcgtccggtttcagcctgaacgatcaattggcgcgagcgctggactaccgccgatggcatcggtttcgcgtccagcgtcaaagagacaagaacagcagctggcaaaaactctccggccccgcctcgagcggagaacgtgcgcttggactgaccgttccacttttcgcggccatcgccagcttctatggtcgaggaggcaacccgcacgcgccccgcctgatgttgctggacgaagccttcgcaggcatcgatgatgcagctcgcgcacattgtatgggactcatccgcgaattcgatctggatttcgtcatcaccagcgaacgcgaatgggcatgctatgcagaactgcccggcgtgtcgatttgccagttgcaacggcgcgagggtatggatgccgtcttcgtttcgcgctggacatgggatgggcgagccaagcggcgcgaaagcgatcccgatcggagatttcccgataaatga

SEQ ID NO: 50896 - DNA, 1296 bp, Burkholderia oklahomensis
atgatgcggaccgacacaccagccagccccgacgcccggctgcaacgcttgctaggtggtgctcagctaggctcgctccgccagcgtatgcggcgccacttcgaacgcgtcgacaacggcacggcgggaagtagcctgctgctgacccagctcagccccgcggaacacgaagctttggggtcgcttatcggccgaccatttcgcatttcccgatctgtacgggtcgacattgaacgactggacagtgcgctgcgagatgctggcatcgccgattcgctgcgagcagcgctcgaacgcatcgatggtccgattgtgagtcgcgccgccgtcaaggcaaacacccacgcacagtgggcccgcatgatcgcacttgactcctggcacggcgtactgcgcgcctggctcaagacccctgcggcgctgggtctgctcaaacgcctttcccgacaggatccgacaacgggaaagcaattgctcggacgagcagatgccacgctgcatcggctgccggcccagggtatcgcacgctctcaactggccgcagagaccctaggcaatgcacatgcactcgacggcggtgaacctacagccacgattgtattggccgcttggcggcacatggaacatacagccgcctataacgacaacttgcgcgacgcaaacagcaatccggatgacccgccgcaactcgacgatcgcactcgcgacatttgggcgcgggcgggcgtgctggtcaacgagctgtcccgccccgccctgttcctgaatcttccggtcaccgctggcgacccggcaggagggcctcccggcgagccaggctacgcatcgttgcgcaggttgctgcgaacaccgccggcgtggtccgtacgtggcaccacggtgttcgtctgtgaaaatcccaacttcgtagccatcgcggccgaccaactgggggcggcaagcgcgccgctggtctgcacagatggtatgccagcagccgcgcaacggacactgttgacccagttggtgcatgcgggagctcatttgacgtaccacggggatttcgactggccaggcttgcagatcggaaaccaagtgatgagcacatggcatgcgcgtccatggcgattcgcgacccgggactatgaggctgccgtgacaaattctcctcccgtaacgcacgaactgagtggcacttcggtatcagcctcatgggatgaatcattggctgctgtgatgcaacgccatggcatcgccattgccgaagaggcggtggcggcagtattgctcgaggatctgagtcgaaggtgcccgtag

SEQ ID NO: 50897 - DNA, 1491 bp, Bacillus coagulans
atggatcagatcatgaagaaagttgtcgaagcgagttatctgacggcggattcggccgcccaataccgtgtgattttgcgcttcttttatcgacaacatgaaaggatgcgcgactttattgcaccggaggaagtgctcgaatatctgcgttcgctcccggccttccaggattatgcggaagaacagctgcaccagcagttggcccagcttgtgaaatggaataatctggttgctcgccaggatatgaccaatgccaaaacaatcgaagaatataagaaaaaaagattccgctaccagtgcacaccttacacggtagaaatcgagcggatgctgatccagcttgaaaaattgggagaccagttccaaggatcgctcgaacgttcgcaatttgaccgcctactcgcctctttggaaaaactggaagaggaactggaacagccattgaataaacctgcagccgattacatgcatatttgggatgacatttttcactttttcgggaccatccggacgaatacggcggattacatcgcttatatcaacagcgaaaagacgtcacaacggatgcagacggaagcctttctcgtatataaaaaccaatttacggcttatttgcgtgattttatcgtatcgttgcaaaaaacttccctgcaaatcaggggaagactgcgtgaactggatgggcaaagattggcaccgttttttgaaaaactcgtggaacacaggcgccaaattccgcgattggaagatacggcagcttccgaacaagaatggctggaagagttccacgaatactgggggtctttgcggcggtggtttcttgggggcagctcttcccaaagtgaattggaaatgttgcagatgcaaacaaatgagatgatccggagaatggcccgttatgtacaacggatcagtgaacgccagcaacatttccggagccggaaaaaagattatttgcatctggccaaatggtttgccgaatgccgcaatcttgaagaggcccatcaattgtcatcgatcgtgttcgggacgatgacagtaaggcatttgcacctggaggaagcgacaacggacaatcttcatgccgagacatgggaagaacagccggagatgcggcaaatcaagccgcgaacgaaccggtaccgcgagaaaacaaagccgggcgctttccgatctaatcatgaacagaaagaaaaacagcggctcgcctatttaaaagagcgcgaacaggaaaaacagctgattgaaaaatacatgaaaaacggagagattcgccttgcagaaattggaaccgtagaaccgtttgtccggaaagtgctgctcggctggattggaaaatcaatggcagcgaaaaaccatgaggtaaaaacggattacgggatgaccgtaagagttgcgatgaatccggatcatctcatcacactcgatgcagaagacgggaaactgatcatgccggatgtcgtatttgaacgatcaggaggagagcgctga

SEQ ID NO: 50898 - DNA, 1164 bp, Bacillus coagulans
atggatccgttacaaatttttgatgaaaaagcggtgcagggaatggacttgttattccatcattattggattttgcggtccgagcacccggactggtaccagctcatccgcgaacgcgaaaaagtgctgcgccgttacatcagcgagaaatttggccttaggctgatcatccatcagcattttatcaaactcgaaaaaatcccggtggaaccggaaagctggatgggcatcctgcattttcaggagccgatggattatgcaattttttgctgtgcgctctcctttttggaaggaaaagcggtggatgaacagtttctcttgtcggaaatgtgccaggaaatccaaaacaattatcctgtagaagatgagctggactggacgctttatcttcatcggaagtcgctcatccgggcagtccaggctctgatggaattcagtctgattcgcacaatagacggcgatatttctaggttcgacacttacgaagaccaggaagtcctatatgaagcgaccgtttacagccgctattttctaagaagctttccggatgattttacaagttatccggactggaccgggctccttgaagaagactggaaacaaaatcaggaagatgaacggcgtaagcgggtgtatcggaaattgtttttctcacctggcctgcaccggaaagatatgcaggaccctgattttctttatatccgcaatttccgcaaccggcttttggaggacattgaagaacacagccattataaactccatgttttcaaaaacactgcatttttatctgccgcagaaccgcggagttaccatcatgtttacccgaatgcaaaaggttccacggatctgatgctgcagttgtctaagacgctacacgaccatccggaaaaatatgtccccaatgaagcgggggaaattttgcttacggaaggcgagttggaagcggtgatagacgatatgcgcacccgccttgaacgcgggtggtcgaaacattttcgagatgccggtacaaaagcggtatgtgcggaattgctcgaaatgatgaaagaatggatgatggcggaaacggatgaagcagcgggactgatccggataaaaccgctgttgggcgtgcttgcaggcgagtatccggctgattttgagaaaggggatgaggaaccgtga

SEQ ID NO: 50899 - DNA, 4095 bp, Bacillus coagulans
atgaaccgcgccggcttgttaaatttttggtattatgacgatgaagtttttgaatttgcagacggaaagctgttgttgcgcggcacaaacggttcagggaaatcggtgacgatgcaaagcattttgccggttttgctggatgggaaaaagacgcctgatcggcttgatccattcggctcaaaagcaaggaaaatggaagattatctgcttggggaaaaagaagtgtccggccatgacgagcggaccggctacttgtttctggaatatcgaaagcaagggacaaagcagtatatcacaacggggatcggcatgcaggcaaagcggcacaaaactttaaaatcatggtattttgtcctgactgacaaccgcaggatcggctacaattttgaattgacacacacccgccaatcggaacggattccgttgtctgcaaaagagcttgaaaaccgaatcgggtctggggggcatcttgtccattcgcagaaagaatatatggaactggtgaacaaatatatttttggtttccagtcgatggaagcttttgaagatttgatcaagcttttgattcagctcagaagcccgaaattgtcaaaggatttcaagccgacggtcatctatgaaattctcgagtctgcgttaccacctttgacagatgacgagcttcgccatttgtccgacacgattgaaagcatggacgaaacggagcagcagcttgaacagcttgaaagagagcacgaatcggcaaaaaaactggtgcgccaatacgatctttacaatcaatatattttggcagaacgcgcccaaaaatggcaggaggccgaaagcaggctgcaggaagcaaagcaggaggccggtacgttagcagttcgctgtgaatccctgcgcggagtgattgaaaacctgacagaagatcaaaaacagaacgaacagaaacgcgacgttttaaaagcggaacaggaacggctgcagcaccatgaggtatggcgccttgaaaaagaaaaaggagagcaacaggccagggctgaaaagctaaaaagtgaagcagcagatctggagaaaaagtgggaattaaagaaaagccagcttttaaacatccgcttggaacaggaccggttggaaacagaaaacagcaaggatgaagccagcatgcaggagacgctggatgaacttgcactggatgccggagaagcggctttcccccagcacgagatcaatgccggagacttttctcggcatgaaggggaagcttttgatttttctgtttggaaacaggaaatcaaacagcacagcggacttttgcaaaagttgcagcaactggccggagaagcggagcggcttcacgagatgcatatgaaattgcagcgccagtcatctgccaaaaagcaggaaattgacgaactccgtaaacaacttgaccatttggagaactggtttaccgaacaaaaacaagaactggaagatgccgtgtttttatggattgaacagcatccggccctcccctttacagacgaacgactccggcgcattgccgtcgcgctggacgggctctatgaagaaaaccgttatgaagcggtcagggaagaaattgtgaaggcggcaaacgattatattttgcaagtgcagaaggaaatttcccgcgcggagcaggcgcaaaaggcaaaagaacaggaattggctgaagccgaagaaacacttatgtattggaaaaacttgaaacttgccaatccggagcgccctcaggatacggaagctttccgcgccggtctcgatggagcagggaaacgctatctccccttttatgccgcggtggaattccaggatcatgtgaccgaagcccaaaaagccagaattgaagcggcactccggcagacgggaattttggacagcctgattacggaagaaccggttacacctgtgcacgaccgggttatccgtccaaatccgcacattctcggctacacacttgccgattacttaaagccggatccggataatgacagcccggtatcagccgcacgcattgacgaagtgttgcgcagcattccgcttgaaccgtcggacagcggctttcacattgatgcggatggctctttttcagtcggctgccttgttggccatgctccggatgaaggaccttccaaattcatcggcagaacatcccggaaacggtaccagcaggaaaaaataaaagaaacagagcaaacgattgctgaaatccgcctagcccttttgcaaatcgaaaaccgcctttcggaatgggctaggaaagtacaagaagcagaagattggaaagcgggcattccagatgacaaagatttacgcgaccttgaagaacagattgaaaaaacagcgcgcagcctgaaacaggaacaggaatttctgacagaaattgaccgcgattggaaacaagtataccagcatttgcaaaacatccggctacagctgcatgagcaaggagccggcttgaaccttgtccttcaaagcggtccgctcgatgaagcactagcagctgcgaaaagttatgaagaacatcttcacagcctggagctcatttttcaacgtttgttttccgggcgcaaaatgcttgcgcgtcttgctgcggatatccttgaaaaagagcaggaactcgatgaaattcgcggtgaagagaacatccgccggtcagaatgggagaaaacggtggcaaatattgaagcgattgagcagcagctgaaattgcaggggattgatgaggttcgcgcccggattcaggcagtccaacacgaatataccagtacggaggaaaaaatcagggagatctacgaagaaaagccgaaaaaagaagcagaactagaaaaatgcaccaccaatttgtctcttgccaaaacgcgtaccacgttttggacaaatatggcggcggaatgggagaaactcgtaaaagcagaactttccctcggcttcgtggagagcgagcacacagaaccggaaagcattttgacggcgttttctggtgtgctggaaaagtatgaccgcgcaaaattaaatgaaaacttgacaaaagtttttttcaacgaacagtcaaatttaacagaataccgcatgtctgagtttacaaaagaagcggacccgccggattggttcgctgaaaaactcgatgactattacgaaacgttcaaaaaggaatgggaaggcttgcggggccgccgcctcatccagatggaataccgcggccgcagggtgagcccgtatacggtactcgagtctcttgaaaaagaacttttaaacttgcaaagttatttggatgagcaggacagaaggctgtacgaagatattatcgtcaatacggttggcgtcattttgcggaaccggatccagcgggcagccaagtgggtaaaagaaatggatgcgatcatgagaaaccgggataattcgtccggacttactttttcgattgcctggaaggaaaaaacggcggagtccgaggatgagctcgatacaaaagatcttgtcgcgttgctgcagcgcaacagcaagtttttaaacgaggacgatttgaaccggattacgaaacatttccgctcacggattgcggctgccaaagaactgattgaaatccgcaatgaagggtcgacgctccatcaagttttaaaagaagtgctcgattaccggaaatggttccaattcgtgctgtcatacaaacgtgccggcgagccgaaacgcgaactgagcaataccgcgtttttcaaattcagtggcggagaaaaggcaatggccatgtacattccgctctttacagcagcctattcgcgctatttggaggcaggcagtatggcgccgtacatcatttcgctggacgaagcgtttgccggggtagatgaaaacaatatccgtgacatgttcgaagtcgtcgagcagcttggattcaattacatcatgaattcgcaggcgctctggggtgattatgacaccatatccagtcttgccatctgtgaccttgtccgcccgaaaaacgccaattatgtgacagtgatccgttaccggtgggatgggcataaacggtcgattgtagagaagccgaaagaatcattggcaggcgccaccccggatctgctttga

SEQ ID NO: 50900 - DNA, 1296 bp, Bacillus coagulans
atgaaggatgcgatcgatctgttaaggaaggaaccggggatgctgaaactgttccacctttttaaagaaaaataccgttcgctcggccatattgggggaacagtcagcctttccggttttacgcgcaccgaactggaggcgattgccgggctggccggcacgtcccctgatttgctcagagagaaaaacaaaatttcgctgcgggcatttgaaaaagcgctggcaccgactgttttcggaaaatacacccttgtcgaactgcttgaagcggttttgaaggaaagaattttttccaaagcggaagaggaagaaattgagaaaaagaaagaggaacaatttttggcacggctgacggaaacgatgccggacggaaatgggtggtggcgccggattgccagtaaaacggctgacacgcgttttatctggcatgcatacaagcaggacccggatacgttgtccgcacagctcaaaatggtttggaaagctttcacgatgcttccagaagaagggaaatacgaacggattccgttttattcccagcgtattaccgggaacccgcatttttttgatcaaacccgtttcgcgggcaagctctttatccactgtttgttcaccgaccaatggttaaaagggctgatcgaagaagtgccgaaaacaacggaagaattgaacgaactgtacgcaaatgctgggcttatgcgggatgacttatggagtttcgtgacatgccgcgcatttttggcggaaaccgaaaacggtctgcacccggtctggcgtgaagccgcagctactgggacggtcatgaacgtcccagtgaaagaattattgcagctaacgaatatttggccacgagcgggaaaaaaggtttggatcattgagaattccggtgtcgcttcggctgtgcttgatgcagtgtccgatgcgcctgtgatttgcacgcatggccagttccgcactgctgcctggatcatgctgcaacatcttgcaaaaaacggctgtactttttattattcgggtgatctcgatccggaaggcgttgtcatggcagagcgcctcagcagccgtttcccggggcaaacggtattttggcggatggatccggatgcatactttttgaccctgtcggaagaggatatatccacccggctttccaagctggatgcggttcaatcccctgaactgcttttggtggcaaatgaaatgcggttaaagaaaaaagcaggataccaggaaggccttgccgatttgttgatagaagatttgaagaaaagatggttgagtggaaaagaagcatga

SEQ ID NO: 50901 - DNA, 1515 bp, Paenibacillus sp. FSL R5-0345
atggacgcaactttgttttcggatgtgaaggaagcatcctatttgtctacgaaaaaaacgcaccgttatcgtccaatcataagatatatgtacgaacaaaaacgtatttttaataccgaagttttaccaatcgaaatttttaattatttgatacaataccctcagttcggtgattacaacatagaagagttgttcgcggatttaaacgcacttgtgaagagtaacaatttgacagagattccggataacactgaagtcgaaggcatcgatgagttcaaaagaaatcgaagattatttatcttgacggactttacttttgaaatcgaaaaaatgctgacgtcattcgaaaaaaactttcatcgcatcggtacctcattggagccgacacttccagagaagctttacaacgcactgcatagacttcgtgattttagccgaaggaaaaccgtggataaagacgatttagtttacctaaatgaagtttgggaagatatgttcgataaatttttaaaattagataacaatgcctcgacgtatatgtcccatatcaatgcagaaaaattagaggcgattatggcacaaccggacgcttttatcgtctttaaagacgaatttgtagcgtatttaaccaacttcattattggactaaagagaaatgcgccttacatcgagcagctcctgcgggatattgaaggtccgggatttgctgttttgaagaaatatttgattcaatttcaacgcacaattccaaagaccgaggttattcctgacagtgaattcgaaatggcgtacgacgaaatttggctaggtgtcacgcactggttcatctctagagaagcaaaagaaagtaaagtgcggcaattagaaagacgaacgaatagttcgattgtgcgtgttacgaaacttgcgcagcaagctgctgaacggcaattttatacgcgcaatcgcaaaaccgactatttgcacctggctaaaatagtgcaccaacaaaacaacctggaagaggcaggtaaattatttagttttcttttcgggtttgataacatcaaacatttcaaaacaaacggaaaagaaacagactctactaagtatacgatctgggattgtcagccagaggaagtggatattaaataccgtgcaaagtcgcctacggataaacaaacaaagcgtagcctgaaagttccgacgatggacgaagaagcgttgcaacgtaaacgaatgctggaggcgcgacgggattatgaagaaaaagcaataaaaaagctgctggattgtaactatttggcgcttcgtgaattaggtactgttgagccattcattcgtagcgctatcttgacctggattaacaaagggatgttgtccaagacgcaagattcgaacatttgcgaaggaagaacggaacatggcgttaagtttaagctcgcgcaagtgagtgaagatattatcgaattgcattctcctgatgggatactaaaattgcccgattacgaatttacctttagcgaggtgaaataa

SEQ ID NO: 50902 - DNA, 1170 bp, Paenibacillus sp. FSL R5-0345
atgaagaaacttacggatgaatacttggaatgtattcagcggctgttggatgatttttgggttctgcgtttcgaaaacgaagagctctttttttacatcagacaatacgaacatgagcttcgaacctactttagagatacattccggtttaagctcgttgtaggaagcgactttgcgaagctagagaaatttcagcttacgccgcaaccggatatgggcatcgaagattttaaagaaaacaaagactatgttttctatttctgcttgctcgctttcttagaagggaaaacgacacagcaatttacaatatcggatgtttgcgaagcaatcgttgcgtattttccggaacgaatcggctcagacggactccctgaaacgaccctcatcagttggaaagaagcagaagggtactacaatcgtttatcggtaatccgcgttttgaaagaggcggaacgcagacatctaattattgtggtcgacagagaactggacggatttcgaaattcagattccaacgacgcccttttgaagagcacggggcttggtaaatattttattcgtaatttcggcttcgatattacaaaggcaaatacactagacgatatcatttcgatgcaaacggagcaagagaaaggacttggtatcgaaaccaaacacaaaatgtatcggcgactgtttttggagccggtaatgtataaagatgaagctcaagggatggagtttgattacttgcgcacctacggtcaccatattggagaccacgcggataaattctatgatatgaattttgaactatatctcaacactgcaatgctcacacgaagaagcagtcggcgaaacgaatttacttttccagccgacaatgcggaatccaacttggtcgttcaatttgctagcgaagttcgcagcctttatattgatgaatctattatttctacggcaaatggaaacatttcactatctgtcgcgcacatagaagacatcgttcgtacacttatcgaacaaaaaagcagtaaatggacagccacattaaaatcccaaagcgttcatgaattaattacgaccattacgaaatttctgtataaatggaatttggctcgcccgctagatgatggcggactcatgctgtatgacgctacggttcgcttcgatgaaaaaataacatcctaa

SEQ ID NO: 50903 - DNA, 4206 bp, Paenibacillus sp. FSL R5-0345
atggttacattcaaaaaagaaactaaccgatggaaacctcacaggcttatactgtgcaactactggtactatccgtacaaagtatatcaatttaaaaatggttgcattctttttcgaggacacaatggttccggaaaatctattacaatgcaatcactcttcacatttttactcgacgggaataaatccccatcaagactagacccttttggttcctcggcgaggaaactctatgaaatcctgctaggcgaagaatcggtgaatcgcgatattcaagagcggattggttatatcgccattgagtacaaaagagagaagaccgaggaatatatgacgaccggttttggtcttcattcaaaacgcaaagacaaccgcctaaaaaatgcgtggggcttcgtgattcacgacccttcccgtagaattaacaaaggagaaaatccccttcccgtctacaaacgcgaaaagttggacggaaaatgggaacggctgcctctgacccgcgaggagtttgttaaagccgtaggtaacagcggcatagtggttgacgaatctcattatgccgcgctcgttaacagccatttgttcaaattccctgatgtttcgcatctagagatgttcacggaggttttgacgcagctaaaaagcccgaagttgtcgcgtgaagcgggtccaaacaaactcaaagaagttctacacaactcacttatgcccatttcggacaaggaaatatctccgcttaccgttactgttgaatccatggacaaaactcaagcaaccatcgaaaaacatgagcaggacttggcagcggttagaagtttggcaactgaatatgccaaatataagcgatacgtatttgccgagaaagcaaagtattatctcgacaataaacgcatcctagaaagtcacgtcaagaaatttatggaaatggaaaatgcgattcaccttaaatcggctgagaaagaaacgatggaagccgaaaaggaaagtaaaagcaatgaactcgaagttttaaaccgagagtatgatgaatatcggggcggtgaggtagctaaactgcaaggcaatctagataaagctgaacgggaactgacgcagatgtcaaaagaagctcttgcaaaaaaagagcgctataacacaaaaaacgacctggttacgaaatcgattgaaaaaatcaggaaactcgaagatgcaatttacactgcaaaaagagaaataggtgcttatttagtagaactcgaagatatgatcgaagataccggctttgatgaccttcagcacctcactcattttaaaaaatgtgccgatgatactacctatgacttttccatttgggaacaggattcgaaaaaatacctttccgcacttcagacaacacgctccaagattaaagaatatgagtctcataaagaaaaaacaaatgcgcttaaatccgaaatcgaacgtttacatagcctgtacaatgaagaacgcgaacttctcaaggaacttgctgacacctatgattgggagagagaagagagcgtgaaagagttgtcggtgtgggttgagtcgcttcgcacattgaccgcaagcaatggggcgataaaagaaacgctcgatttgcttccggagtacctgatctctgtgtcggacgagcaattgaaaggtccgcttttgattgagaaagatgctcaggttgaacatgcacaattggagtcgattaaacttcaaaacctgatggattccttgaagttgagaagaggggagctcgaagctactcttactgaccttgaaaataacaaagaaattgagccatacatatctgacgctaagactgagcaattcaaagggctaactgaaatgggtattccttttatcccgttttgggcggcggttgagtttaaagaaggtttgagtgaggaaacgaaagcaaatattgagtcggtcgctattgagcttgatttgcttaacgcagttattgttcctgttcatgcttacgataaagccaaaacaaacagtgttgtactctcacgcaacaacaaatgtgactgtaatttgaccgaatatttgacccctgtttcaagtgacaacgtttctgataccgatatacttgctatcttaatgggcatttcgattgaccatacaagccaaactttcgtcacagctaccggcgaatttaaaaccggtatcgtagaaggaacatctccttcttttggcgacgcaaagtttattggtaaaacggctcgtgaattgcttcgtaaaaaagagattgtccgtattcaaggagaaattgcaactattgaggaagaactcgaacagcttcattcgcaaaaagaggcatggattgaaacgaagcaacagattgcaaatgagttttcttctttcccgttctttaatgcgttaaaaacagcaaagaatcagtacgaagaaaaaaagaattttattacgtatatcgtcaaatccgaattggataacaagatggagcaacataaaaaactagccgctgaactagaagggctactgttgactgttaaagctatggttgctttcacaaaactgccacttacagagaaagcattctcggaagccgttgaacaaacgagcgcgtatttactccttttgacaaatatcaaaagcgatttccgctctcttgttgataaacgtcattcctttcgcacggaacaagagaacaaggaagatcatgagaacgaactcgaggaatataggggagaattgtttaccatccgtaacaagatagaccgaacatcgaaatatatacagtctcttaatgaccaactgaaactaagcggtgccgaagaagtacgtaaacacatcgcgaaggttattgcgaaacttcaatctttgccggctgaaataagtcaactcgcaacggatgtaggagttattcgaaacaaaattgaaaccatggttgaatccctgccttcacatacatcgacgattcatttttacaacgagctttgctcgtcatgggaagtgatttttgtccaagatgtacgagaaaatgtttcggaatatgagcttgatgaaacgttggataccaagatgatggcgaagcaaattcacgacaagtttggcgctctgctcgacaaaaaggaaaagtctcaagtaaatactgaattgacaaaaaattttacagcaagcagcatgagcttaattgaatacgatgcggaattaaaagctgttccttacacggttaacttcacaaacattccaaaagaggaacaagcaaacgtagaactgctaaaatcggtagcgcagttctcgaaaattacgcttcaacttcaaattgaaggtgaacttcgtacgctttcaccatctgaattacgcacgaaactcgaaggctacgttaatatgcaaaagaaaacactcactgataaagaccgcgaactcttcgaagatattatgattaattccattggagaaacgattcgcaacaagattcgtagtgctaatgattgggtgaatcgcatcagtgcttttatggaacttgcgaaaaattcaagcggcttgaggttccaagtccaatggaaaccgattaccaagcaagaggaaggcgaactaaaaaccgaagatttggtcaaactgctcgaacgcgaccccaaattactagccgatcatgatcgactcagtatatctcagcatttccgttcgaaggtaaatgcggcgaagaaaatcatggaggctgacggtaaagtgcagttcttggaggtaatcaaatccgttctggactatcgcaaatggtatgaaatcatcataaggtatgaaaaaccaggagaaaccatgaaagaaatgcagacaaagcatttcaactcgttcagtggaggcgaaaaggcgctcgcgatgtatacgccgttacttgctgctgtcgatgctagacttcaaagcgccggcgaagatgccccgcgtatttttgcactcgacgaagctttcgcaggcgttgacgataacaacatagaagaaacctttaagattatcgaaatgtttgattttgactataccttgaattcgcaagcattgtggggatgtttttctgaagtgaaacatctttctatttacgacttgtcccgtccgcaaaacgcaagctacgttatcaccactcaatacgagtgggacggcattcaaaaaaacataatcgctgatagtttcgatgacattatgccggaagatacgattgaaatagtaaacgaacaagctgttcttttctaa

SEQ ID NO: 50904 - DNA, 1308 bp, Paenibacillus sp. FSL R5-0345
atgccaactattgcagaagccacacaatatttcaaggaggaaagaggatttgaccgcctctttccccttatattgaagcgatacaaaggtcttcaagcgttaagcggaaccgtgaagttgaaagatatagagccaaatgaagttaacgccattgaacgctttttagccaaaccgcttaaaatagttaatggcgtagctactatttctgttgaaaaaattgttgaggaatacagcaaaacgctgtacgggaacatccctttccttgacctattagaatcttattttggcaaaccgattttaactaacaaaaaggaaagagaaatacgtagctccgttaagttttctttttttgaaaacagctacctgccttacaagagtgctttgggcaatattatttacgaccgaattcaatcaaggtctctcggaagcgctcaggtgcatttgttatatgagcgagataaattgttattaggttccattttgccttctgtgtttattgctatttccaaacttcctttggatgaaccgatcagacttccgctgttcgcgtctgaaatcaatggaaatcctcactttctggatctcgatacagaagcgggacgtatttttatttcttttcttcaaattttactggaaaatgatgatgttaaaagttacgaatcgcaacctagagccgaagaaatgactgagatattaaatttttttggtatttggagagacgatgttcttaaccaagtgtcgtgtttcggaattcgtggatataagagtgatgactcttcatttcttatgctggatgccgctactgaggaaaaaacatttatcaacttaccccttcgcgatgtgcttcgtttaaagcgagttgaaacttatcaaaataccgtttttattgtagaaaattcctctttgttttctagtcttgttgaatgttttattcaagaagataactttccaagtatcttatgcacgcatggtcaattgagtttggcttcgcttaagatgctcgataaattgtctcaaaccgctgatgtaatttattattccggggaccacgatgtggacggtcttattattgccgagaacgtcagtcgcaggcttggacataaattagtattgtggcgttttgatgctgagagttatacgagtagcctttcggatgtgccgctaagaaacgaatctcgattgcaatttataaccaatgagcatttactgcccttaaagcaccttttgcaagaacgaaactgcgcagcgtatcaagagcgtttgttccctgaatacattaaagacattaaaaacgcactgaatgtttaa

SEQ ID NO: 50905 - DNA, 1539 bp, Paenibacillus sp. FSL R7-0331
ttgagtagaattcctgatatacaatctcttcgaggcgtttctgagttgaagtatttaaatgcggataatgttacccgctaccgatctatcatgaagtatctgtaccagcaatatcataaactgaattattggctcaaaccggagcagatatacgacggagtgattgcatggaagttacataaaaattatacattggaacaatgtcaacttgatctggaacaacttgttgagtggggaaatttaacctcgcgtcattatggtgaacgggctgtctcagtagatgaatatttaaaaaagaaatttcaatacttattgacgccttattcgattgaaattgaacggctgctggaaaacttggtaacagtccggggatatggtggatctcttgagcctaccttgtttgatacaattgcaaacaccctgtttacaattagagcccgatcaggcgagtatgaacatggggaagcattagtattatgggatcaaattaatgaatcgttccaaaaacttcacgaagcatcagtggattatatagctagtcttcagacaggaaaggcagaagagctaatggtcactgatgattttttaatatataaagatgctattacaaattatttaaaagactttgttcacactatgcagcgacgttcttacaaaattgaaggtaacttagtacaaatatcaaatggagtgagagatgtttttctagaagctgtgattgaagatgagtggagaattcctaaacttgaggaaataattacgaaacagcaatattatgatgagctctttgaaaaatggcatatactgagcaaatggtttctgggtgaacacggaacaatcagcgaaatgcagttgctagaaagggcaacaaaagaggcaattgtgaagatggtacggagtgctttacggattcaggaaaaaaaacgtactagtattagccgcagaaaagaattggagcatttaggtcaatggttttacaaaatagataatctggattctgctcataagcttgctgcctacgcctttggaatattttccaccagacatttccacggagaagacagacgggaatcagatagctctggacaatccatgtggttggaaacaccaattgtcaaaaatttgcgatctcggagcagaaaaagacatgaacgccaggatacagaagcagcgattgataattctcaggagaaagaacggctgagattagaatttataacaaggcaaaaacaagaacttcaatttttaaaagagatggtagatcagcgggatataagtatatctcaactggatgtaataactacctcatctagattgcaattgttggattggattagtcgttgtaacaattcctcaaactccataatgcagacctctgaaggtgtcaaaattcatttaactaagccagtagataatgagcgagcgagtttgagatgtgaggacggccaacttgaattgcttgattatcattttacttttgtagttgttgataaagataattggagtaatttgcttagctgggcaattgagaataactaa

SEQ ID NO: 50906 - DNA, 1215 bp, Paenibacillus sp. FSL R7-0331
attagagttggtaaattaacaaaaaagagaaaacggtcaaatattgtggataaggaagaattgttaaatagaaggcgagtatgtatgaatgccctattaaatcgtccatgggtatccaaagagcaagattctcaattatattattggattaaagataatttcacctcattaagagattggttttctaattacacaggttacattcttatcttaaacggtaagcttgcaaaattagaaaaggtacctgaagtcgcatatccgtggatgggatttcaagagtttcgagaacctttagactactctttgtttacatattgtttatggtttctggaagccaaatcagagcaagaacagtttttgctgactgatctaataaaggaagttcgtgattctatgatggaatcgggaatagaagtagactggaaaaattactatcatcgtttatctatggcaagggctttgaaaaagctaaaaagtctacaagttatcatagcagtagatggtacagaggccgattgggcatcaactgatgacaagcatgatgtgttatatgaaagcacacattattcaaggtatgtgtttcgtaattttacaaaggaacttgccggttatattgatatgaatcaaatgaaagaaatcatagattatggagatagtcctgaagaacagaatagtagaaaaaaacatcgattgttccggcgctatcttatagaaccagttgtacttgatgaagaatggcaagaggatctgttctacttccatggacaaaaaaataatgtaattaatcaaataagaatgatgtttgggtggggaggcagcaaatatcgagagggcattttgttttttgaatccgacatagtttccgaggcagaaatatttccaacattagcttcactttctgatcttacattgctggtattaggagaaatcagacaacaaccggccgttgaaaatattgatgaagtttcagaccagacccatttgtacatcactagacatcatttggaacgcattcttattcatttgaaagaacattatggagagtattggacgaatgatcatcgaaagatgaaatcttccgaattggctgaacagatatttacgcatttgatggaatggggatttggacagtgggaagataacacattattcgctttgcgggcagtagcgggcaaatgggtggcccgatatggagcggtggaattggaagtatag

SEQ ID NO: 50907 - DNA, 4080 bp, Paenibacillus sp. FSL R7-0331
atgaaccgagcaggtgttttgaatttttggtattacgatgaagaagtatttggttttgaagaaggacggatgattttaagagggaccaatggttcagggaaatcggttactatgcaaagtcttattccattggtgcttgacggagacaaacgacctgaaaggctcgatccttttgggtctcgggatcggaaacttgagtattatttgcttggagatagtgagcatggacataccgatcggactgggtatttatggatggaatttcatcatccagctaaaaatatttataagactattggtatcggcctaagggcacgccgaggtacagctcagttaggtttttgggggttccttttagaggatggtagaagaatcaatcatgatttttggctatacaataattctctatggcgggaacaagggagtaaggtaccactaaatcgaaaagaattggaaattgcagttgattcaggcgggagagttgtacaggaacaacgggaataccgtgatttggtcaatgcggctttgtttggttttcaggattcagattcatataaggatttactaaagctgctgctggaattgcgcagtcctaaactttcaaaggatttcaaaccttcttctatgtatgagatattaacgaaagcgttacctcccttaatggaagatgatttgaactcactttcagatgtgatagaggatatggatcaaataacggatcgtttggatgaattgaatatacaagtggaagatatgagaaaattaaacgataaatataatgaatataatcgttttttactattacatcactctgagattgtacttaaacaatttcaagtgtacgacgaatcagagaagcaggttattgagttaacacggcaagttcaaatgaatggcgatgataaagataaggttatatcagctatcgaacataggaagttaacacttaaagaaatcgatgcagggatggatatattaaatcgtagtgaagtgatagagaagcagcgagaattaggtgatgcagaagaacaaattaaggatacccaaaagcagctagtaactctaaatgaacgaatcgagcgcaactccaataacttacttattatagaaaatgaaattgcaaaatcccagaacaagctggaacagctcgagattgagcagaataatgtcattgatgagttagaggatactgcccgagttattgaatttagagaacatgatatttaccacaatatttggttaagaggaattcttgaggatgaaagctgggtcaacaactggattaaagatcttagccaacatagagaggaattaaacaaagcgtataacattgcgtgcgaagaacgcgaagcttatcgtaaggtaacggaagcggaattaagtttgggtgaaattcatcgagaacgaatccatgttgaagaagaacgtgaggggcaagccaatctaggcgaaattattaaagcctcgatgaaagaacgtctaattcgttggcagcaggagttacatcaacttcccgtgaataacgagacaattcgagaagtgttgcgagtcttaacttcccttacggctaacgaacgtcagtatgatcgggtacgttatccagccattcaagtgtttcagattaagaatcaggaattgatagaacaatctcttcgattgcagcatcataaagagctattacaatctgagtgcaataaactagaacaagaactagaacaatggaaaacaactaaagagcccgaaccagttcgtaaagagaagaggaagaattctcgcaagttaaggagcttgaacacaggatcgcctttatatgcagtatgtgaatttaatgaaactcttccagaagatgttcggcctcacttagaagaaacgttagaacaagcaggcatattagatgcgtggatatttccgggtggaaatgtagctgtaatagattgggaacacaatgaagaggtatggcttgaacccagtttgaaatctactaaatcatcccttgcagatgtgctatgcgctacaccttctctggaaagtggattaactgttgaggatattatgtcagcacttaatggtatagattgggataataatacttctgatattgctgcaggcaatgagaagctagcaattggcccaactggcttttgtatagggggattatctggaaaagggttctctaaagagcgggcagagtacattggcaaagaaacaagaatacgtacaaaacaaatactcatagcagatattgaaactaatattagccaattaagcagtgaaatagtgtttcttgatgagcagttaagaaagaatgaacataataaaggaactttacaatcagagattaatgcatttccagatgacagagaactgcaagaacattttgacacgtctatacaactaactcacagactcaaagaaataatgagccaggagtttaaactggaagttcaatacagagaaaaattaagcacatacaaaaaacttcaactgacattagaagaagcaacacgaaagtggtcggcgttaaaaaatgaaaaacggatttgggaagcactggattcatggccttcttatcgtgagagggttacggaattgcaatcattgtgtgttcgccataatgagatttcacagcatcaacttataagaatgaatcagcaaaacgatatagttatacaagcggaagaggatgaggcagagaaggatttattggaagaaaagagaattaagtgtgaagcgaaaatcaggcagcttagaaaattaatgctcgaaatgggcagtgaagagatctatgagcaacttgcaaaattgaaacagagcaagacatcattaaataaccaattaaccgatttagagaataaaaaagataaacttatcgcaatattagccagtcatgaaacgaatctcaatacacgcaaagatgagtacgaaagaaataatgatcaattacagctcgtaataaatttttggcacagtgagttacagttaaagcttatacatgaatggaaagatacagtcattcagacatcagataaggcagatatcaagaggatttgcaggcaaattaagaagacgtatgagttcggtaatattaacaaagatagattaggaaacgaagttcagcaaatatgtaatgtagtcgagagtaatttgcgtgaatatatgttgcaattggagtatttgttatctggtcgtatacttattacctcaaaccgggatcggctaaatcccttacctccatctgtattattggaggagttaattcaacagagagatgagcaacgaatactattaacacaaagagacagggagctttatgaagaaataattattggaagtgtaggtaaagcaatccgaaaaagaattcatcgtgcgaaagattgggttcttcaaatggatagtttaatgaacctccgtgatacttcgagtggcttaaagttatcactcagttgggaacctaaaaaagcagaaactgaaacagagatccctacagatgcactagtaggattactattaagggacgctcatcaaatggatgatgaagagattgatcaggttgtagagcatttccgcactcgtatattaaaagcgaaagtcagtgctgaggaagagcaggggatgttaaggcattatctgaatgaaatactggattatcgttcttggttcgaattcagactatacttccgtaaaggagaacaacttggttataaggagcttacggattctaagtttaatgtgttaagcggtggggaacgagcgatggctatgtatattcctttgttcgccgccacatattccagatatagcgatgctcgtgatgaagctccgaaaatcatatcactagatgaagcttttgcgggcgtggatgatgcgaacatgcgcgacatgtttcagttaataacagagatgggctttgattatattatgacctctcaggtgctgtggggctgttatgacacagtaccacgtttggctatttatgaaatatatcgccccaaggatgttcgtgtagtgacattatttcattatcgctggaacggtaagagtaaaatgctagttgaaccagagccttcattgactgaatag

SEQ ID NO: 50908 - DNA, 1413 bp, Paenibacillus sp. FSL R7-0331
atggagattggatttcgtaaaacagccaagcagtattacagcgaccccctatttgaaaggcttcttacggctgtgtttaaaaaatatcagggacaaggtggcgtacgggggaacgccaaaatagttgtgagttcatttgctgaggctaatcgcttgcaagagtttttcggcaataaggtagagagaataatccggcctaatactatcctcgaagtacccttatggttgtttacagaagaaattatacgggggcatcagcttacaatccctgatttgtatgagttgttatatgatagtcctcttttgactaagaaagaggacaaacaacttaaagatcatcaatggatagatatgtttgatcgtatagcaacacgctttactaaggaagcccaactggatttatttaacggacagtttagtgtagtgacatatgattggttctgtcgattaagggaaggtaaggcattaggataccaaatagtaaaaacagtgatccgcaatggtggtgacgctgaaaacgatcttttctactgtgcaaaagctttgtggaagttacttcttgagaaaaacaaattaagatatgagatgaatactgacgcggattatatttacattcctatattctctgaaaagatcaccaaaaattctcatttctttgatgtgaaattttctagtggaagactttttttagctgcactatgtgacatttacaatattaaagttgaatcaggagaagttaccataaacgaaaatttgatcaatacagacttcatgaaagaccgacaaatctataggtactttgggcttatggatgatagtctcagttccatttcacatgtatttgcttcaggatttgttgatggtgcttcaccgagaacattaaatcttcacgaaattgaggcgaagaattattggcctaaatattctaaaatttatctttttgaaaatccctcagtgttttcttatttagtgttagaaactacacatttttttgataagaatggttttatatacaaccatttttctaatgcttttccaccgcttatttgtacatctggacaggcaagaagtgcaaccaagttctttattagaaaatgtcttgaggttaatcctgattgtatcatcttttattctggtgattttgatcttcatggtcttcagatgatgcataaaatagaagaactggctcagaaaaaagttgttcaacattttatggatgcagcaacgtataggagattcttagatcctgattgcttaccaatatcctctcaagataaaaagcttcttcgcaaaatgcatggtgaacagttagctcgaacaatggctgagacgggggttaaggtataccaggaatctactgtagctgaattgaaagaggaatggataaatttgattaccggccttgtaaaataa

SEQ ID NO: 50909 - DNA, 1503 bp, Paenibacillus odorifer
atgagctttctgattaatcctattaaagaagctacttatctttctactactaaatcagacagatatcgtcctatatgttacgttttttatcagaaatatcgtcaggaatataatgcgtatatgtttctggatgagatatatcaagaattagtaacatctgaaatttttggcacctactttacagattataacgaaaaggaattggaagaagaccttaaatcgcttgtgaaatggaataacctaattattcatcaagacgaatcgcatgcacaacgtatcgaggacttttataagcgtaagaattactatgaggtcacacaatacactatttcactagaacgttctctagaagaaatgcggcataatctgcaggcgattcgcggaggatcttttgagcgtatattagcagaccatattttagaggatctgactaaacttcagaagtggaattcttcggataaagaatcatttggtgacatccgcaacatctggcgtgatcttatgtcccgctttgaagctcttcgtaacggaactgccgacttcttatcacacgtaaatagcgaaccatatgaacgtcttattcacacagaatcttttttgccatataaagaaaaatttgtacggctactaagcgacttcgtggtaggtatcatggaaaagaaagatttaattgaagaaagcctcagtctaattgatgaaaaaaatatcgagaatatcatttctataattgtttcctacgaagctgaacaacaaataaatgacatgtttgaagaggaagttgtcttagagcgaagaagggcagagtggctcggttttaaagggtggtttgtggaaattaatggtcgcaaagcgagttcccgatttcttatagagcagacacgcggtactattcagaaaattgtacggattgcggatcagattagtgataaattcaattattttaaaagtcgcaagaatgactacttggaactagcccgtatttttgcaaatacttctgatataagggactgtcatatcattgctggtgcgatgtttggtgtgtccaatacaaaacatttcttagttccccacaaatccgaggatgacattactaaacatgtgtgggagtgtgatccattcgaactgccacttaacaaaaagacacctggaaatcgtaacaaacgtaccaaactgcctatatacgaaaaccctttagctcagatggtcctgattcaggaacatttggagaaaacacggatgatacaagagaaatttaacagtataatcaaggacgggaaaattatcctggaggagattggtgtagtgtatcctgaagtgcgggatttattgcttgagttattaggacaagccatgattacaaaaaaatttgaaagtagaacagaagatggtcgccgattttatcttaggttgcgttcaaataaacgtattcacttgcgctccactgacggaaccctgacgatgaatgattatgagtttgtgtttatggaggaaatgtatggatag

SEQ ID NO: 50910 - DNA, 1140 bp, Paenibacillus odorifer
atggatagagatcagatggtgctccaggaatgtgttgaagctttgtttcatttttactggattcatcgtgacaagcaggctgacctatattttcagattctctctagaaaagcagagcttactgacatgatgcgagattattttggctatcgtttaatattacgtactgagtttattaaattggaaaaaatacctgtctcttctaagccctttatgggtattaataacttttcaacagtacatcattatatgtttttttgctgcttccttacttatttagaagacaaaggtgaagatcagcagtttactttacaaaatgcatgcgatgctattcgcatgtattatccggaagacgccatccattttgcctgggaggaacgttcacatcgcagggcatttgcagatgttttgcagcattgcgttatgttaaggctcgtttatgtcgtggatcgcgatatcgacggatttagagacgatataaatcacgatgttttatttcagacgacgccatattttcgtcattttgccccactctacttcttggatctgagtaaaattcaaagttggagtcaattagaagaacatattacgaaggaaattacgaataacacaacaccaaaacaacgggttctacgtcggttttttttagaatcggccatttatgatgatgaactttcagaagatgaagttattttgctagaagataggcaggagcttgaaagactaaatgaaataatttgtgagtcatttgaatattggcatctcgaacggtaccatcgtacaacgatgctcatacattcagaagttcgttatggagactattatccaaaagatgaacaaatctcaaatacagctgtgcagtatgcgacctttatttgggatatggtaaatgagcaaaaagtagcccttgaccacaatgggcgcattacatgcacagaatatgaggcactaaaatggtttcaagcaataaaagaattgcatagtcatgggtggaccaaatcgtttacagaacggcccgtcactaccatttggagagaagttatggaatacatgtctgactttcatatggcagaagtacagatggacaagcagattgtattttattctgctactggccgagttacaggatattatgcttaa

SEQ ID NO: 50911 - DNA, 4104 bp, Paenibacillus odorifer
atgagttcgtttcatttgaatcgctttggtcttgtgaatttttggtaccatagtgacacaatttttgagtttagcaatggacgcctttttgttcgtggtgcaaacggatctggcaagtcagtatctactaccatggcagtgccctttttgctagatggtgataagcgaccgtcacgtcttgatccatttggttcgcaagatcggcggatgattgatctattgctgggcaacaaacatgtgtctaagcgcgaggaaggtactggatatttatacacagaatatcgtaaaggagatacctttgtaactgttggtattggattgaatggtaaacggcgggagagcgacaatactatgcagacatggtatttcattcttttcaataagagaattgggtatgatattaagttgcacgaagaaaagattgtaagcggagaatcccgaaagtttcctttaactatgggtgacttagcagaacatattggcagagacggagaagtaacagatagccaacagcgttacatggagttagtgaatcaaaatatctatcgtttcaaaactacgcaagagtttaaagaactgataggcgtattgcttcagctaagaagtccgaaactctccaatgctgtgaaagcgagcgaagtatccaatgttctctctgatgctcttcctgaattgtcacaaactgaattagccccgctatcttcttctttggagagtatggatagcctgcaagataagaaggctcgtcttgagaaggaattgaggttcctaacgatgttggcggatgcgtatgatacttacaatcagttttctctttatgagaaagcgaagcatcttatatacagtgaaaaacgacttgatgaatcaattgagctcataaagaaatataaagtttctgaaactattgctattgaaaataaaaatgatttagaacataaacggatagagcaaagtaacattaaagaaacactccataaaaaaatctctttattgaatgggcatgccctctttacagcggaagaagagttagaaaaagccaaaaaaaatttatatgatttagagcgaaaactacaaaatacaactgaagctatggataataatgcaacacagcaacgtgaggtagaggaacgaatcaagaaaaacgtgggaaaagaatacaaggctgtaaaaagccgcgaagatgtgctttctgagcttgaggcgcttgcggatgaaacttttttcatatcacattctactttaagtcagtactttgaacaaaatcttaggaatttttcggaagcaggatttaaaaactggcaagaaattcttcaggagtatcataccaaggtacaagaaatcgcgagccaattacattccttacaagcacggctcgaacacgaggggcaattgaagcgaaatttagcaattgaagaagatcatgtgaaggaattagaggtagagatcagtgccttagagaaagaacatattaaaaatgcagatattgttgaacatgatgttatggaatgggctgagggagcacgacaatttcaagtcaagccaaatgagctgctggaagcacggggaattctacaggggattggagaactattggatgacttttctactgcagccgttatagattggttaaataatttgttccacaaatgtcttaccggactacaagaagagcgagcacacatcacagccgccataggtattctccaaaagaaaatcgaggacacagagacacagatttatgagctatcagcacataaagagataatgcctgtgcttactgcttccgagctaataaaaatggagcacttgcgtactcagaatatccgtactgcgtatttttacgagagcgttgagtttttagatcacatagatgcgtcagtaaaagaagctattgaaggtgcaatcactcgagcaggacttctaacagcacttatcgtgcatgaaagtgatctttcgatggttgctgattctacgactgtggtacaaaaaggctcttacaaaaaagaaaatatgctaacttatttacgttccgtaccaattaatgggctctctgagaatgacattgatgctgtgctacaaactatatcaattgttccccatgaagaaggatatatacttgaaacgggggagtttcggagtggcatgattgggggactggcaccacaatatgaggatttatatattggaaaatcagcgcgtgaacaaattcgtgctcgcaggctaaatgaattacgaaagctaattgatgaactcgagcatagaaaatatgatttggattctgaatgttgttctatcgaagatcagaaacgtttacttcagatggagaaagagatatttccatcaatggaactgttgataggttcacttgtccgctatgaaaacaagtctcaggagcgtgtagcacagctttctatgatggaaagactacatgtggctctgcgaatttaccaaaatgaaactcaagttgcgcgaaatgcgatttactatgccgcacaaaatatggaacttccacttacatacaccggttatcaaagagcgcttaatgatattgaacagtataaagatatgctaaatgagcttcgtatggtacacaacgcatggcttgatgcatatcagtctatatctaactgtttatcggagaaagaaaatttgttgaatttttatgattatcttacagatgctagaacagaaatagagcaagatattaaacgtaacaagtcttacgaagcgatgtgtgtcaagaaaattcatgatcttggcgatacagacgtaaagaaagaaattgaggtggcaagaaaaaatttgcaggaaacagatagacttttggaaacaaatcataaactaataaatgaagcagaaaatagtattcgtatcttgaaagaaaaactagagaaagaacaacctcttatggaagaatggctacgattattcaatgcatggacaaaattatatgaaaaagagatttccttcggtttagttcctcattcatctagtccttatcaggttataggagcattagaggaaacttgtagagccttttcattaaatacaatactttcagcaatgaaagatgcggaagcccatgcccaacgtgagcttgtggactattttcttaagcaatcacatgttacgttcccatttgagatttcggctaaagagatggaagacgcacgctggcagatctttgaacagcactgttcacgacagtttttggtttttgcacctcagtatgtggaaaatacaccgcgtgaagtgcatagcgaagttgctgatcaactaaaacttatttcgggacatatacagaatgaggaacaaaagttgtttgaaaaagtgcttattgatgtcatcggtactgcaattcatgagaaagtgaggtctgcgaagaaatgggagcaagatgctaacgcaatgttgcagcgtgtaaccggcacgatccagatgcgacttgagtgggttcctctcactagcaaggaagaggatcaaatttctacgactgagttattatcatacttgtccaaggaatccatctttttgacaccattacaaaaggaaaaagtacgcttgcattttacatccaagattaatgaggctcgcaaaaaatgcaaagatgacaccagtttttctatgtttgaagagatgaaaaaggcgttagactaccgcaagtggtaccgatttgatatgttcatcacacgcaagggaattccagaggaacgttttacaaataaagtgtttggggaacttagcggaggggaaaaggcgatgagtatttattcaccattgtttgcagcgatagccgctaaatactcttatgctgcaccagatgcccctcgtgtcatttcactagatgaggcttttgcaggaattgatagcgaaaatattgcacaaatgttccaacttgtacacgactttgaattcgactatattatgaattcccaggtgttatgggggtgttacgatacggtagatgaactatctattgctcaaattctacgctctgtagattctcctgtgctcgctgttgcgcgttactactgggacggaaaagaaaaatatcttttatcggtagagaatagtattgaggagtattctagcaatgcaggataa

SEQ ID NO: 50912 - DNA, 1404 bp, Paenibacillus odorifer
atgcaggataagtggcaactaatcgagatttttcggcgtagcatcggtttcggccgcctcttcgatttgtatcgtaagaagtttgaaagctatggagcattcggaactgttaaaatgctgcccactagagaagaggacaaagcactaaggggatttcttggcgttagatacaagggacctcgttttcctgcaatagattttgaaaaagcggtcatagaagcaggttactctatttctctaattgagttgttagagctctattatggctgtcgattacttactaagcgtgaacaaaaggaactaaaggtttcagcatgggagaacctttttgtacgcgtagaacaagactttattatgcgattcaatgtttctgattctgataaagaatattttttccagaagacatttagatggtgtgaaagattaaaagcgggggacgtcaaaggtcataggattttgagtattgcttttgacaaaggcgcaaatgttgattcagaattattcacctgtataagcgctctatggcatttgctcatgagaaaggatgagatgtttaaagcttgtggaatatctactgggaaaattagattaccaatgtttgctgcttatgttactgaagattcacatgcttttgataaaacaaatgtaataggaagattattatggagtgccctggatgatataagtagccaaagtctaatgctaagcgagaatgttaatagtcatttgacagtcattccagagtatttgttagagaggcaaatttataggcattttgacattttagatgacgatcttagttcaatttcacatgtttttgtaccacatttggttaatggaatttctcctcgaacattaaatttacgtgaaattgaagagatgaaacaactaccacaatactcgtcaatgtatattattgaaaatccgtctgtcatttcttatctggtagatgaaacaatccattttcttaatttaaacaaatttactttggagcaattaccatcgaattttccagctttactttgcactataggtcaggctagaaccgcttctaaagtatttatagaaaagtgtcttacagcaaacccaaactgtgttatttattattccggggatcttgatgtcccaggcattcagatgatgaataatatgaaagaacaattttcagcagagttttacgcttggcgcatggatgcttctatatatcgaaaatatgttgcatctaaaagtaaagctttatcagatgcagacttgaaaatcctccaagaaaaagatagtggtttagagaaagagatggtgcagattaaggcaaaagtttatcaggaattgtttggtaaagaattgagaggtgattggattaaagaagtatctgctgtgttttctgtgaatcagtttgataaataa

SEQ ID NO: 50913 - DNA, 1476 bp, Caloranaerobacter azorensis H53214
atggagataaatgagaaattattaaaacaagtaacagaaacaaaatatttaacggttgaaaatgcatggagatatagagcaataatcagatatttctacctgcaggctcaaaaaatgaaatattggatatataaagaagaagtatttgaagaactgaaaaaacacgatatattcaaggattatacgatagaacagtgcaggcaagatttagatgctttagttgagtggaaaaatttaaatgccgttcaagatacatcaaaagcttcaacaatagaagaattcaaaaataagcagtttagataccaaataacagattatacggttgaaattgaaagaatgatattgaaacttgaaaattggaaaattgaaggagcttcattggagccctcacttttagaacgttttaagaaagagatagaaaaatttaaagatatgaaaaatagagacatgaaagaggttggaagctggtggatgtcattaaatgaagattttaaaagattaaatcaaaattatcaagactatattagacatttaaatagtgttaaagcagaagaaatgatgaagacacaacaatttttgatttttaaagataaatttatagaatatttaaggaactttgtaaaagaacttcaacagaattcgtatgcaatagaatatataataagagatgttgacgaagatacagaaaaaatagtgcttgataaagtcgttgagtacagtaagtctattcctagattagatatggaaatatccgaaaaggatattaaagaaaatatattaggaagatggttaagtatcaaagagtggtttttaggaagcaattttcaagaaagcgaggcatcgaagttatttggaattactaatcaaattataagaaagataactaggtatgcatttcaaatagtagagagcagaaatacagctgcaaatagaaaagaagaatataaaaaactttgtagtattttcttgcaggctaaagatatggaggaggctcatatgatatcggcatatgcctttggaatacctcatatgaagcatataagaatagataagcatagagaaacagaaagtataaatagcggagtatacgatgaaaagccatacgaggtaataattaaacctagggttaggacttacagagaaaagagagataggacgccgataaaagataatacagagaaaaagaagaaaatacttaaagagactatagagaagcgaaatcaagaaagaaaaataatagaaggttacataattgataatcaaatagaaatatctaaacttcctaaaatagagccttatgttaggacaactcttttaaaatggatatctagggcaaacagttctccagatgggaaggcaaagactgaagatggacgagtatttaaattaataaaatctaaaaataatgaacgttgtactttagattgtgaagatggacagctagaaatgccgtcttatattttaaaatttgaatag

SEQ ID NO: 50914 - DNA, 1149 bp, Caloranaerobacter azorensis H53214
atgaatgaattaagggaattattagatgaatattggatattaaaggatagagataaagaaaagtactataaaataagagattctatttccaaatttagaagttttatatcagataaattgggttatcaagtaatattgacttcagatttaataaaactagaaaaacttccagggaaggcagaaacttggatgggaatatatgcatttgatgataaattagaatatgcttttctatgtttactattaatgtttttagaagataaggaaaaggaagagcaatttttactttcgcagcttacagaatttatacaaggaacttttcctggcgatgagaaaatagaatggacattatattctcatagaaggcatctaataaaggtattaaaatttgcaatagatattggatttattaaagtcaatgatggagaggaagaaagattttataccgatcaatcaacagaggtattatatgaaaataccggggcatctaaatattttatgagaaatttttctggcaatatattaaaatacagtacattagaagatttagaaagagacgaatggctggatatggataccgatagaggacgtataagaagaaatagggtatatagaaggataataatgtctccggctgtatatagacatggggaagacgatcaagattatttatatattaagaattacagaaatatgatacaggccgatttagaaaaatatctgaaagtagatttacatgttcacagaaatggtacttttttagtattagatgaggaaaagagatataaaaattcatttcctgaaaatagagctattagcgatatagttttacaggtaaataaaattatagttaataaagtcagaaataaagaactttcaagaaatgcggaagatattataattgtacataaaactgtatttgacaatattattgaagaggtaaaagagaaatatagtatcggctggagtaaggaatatagagagatgaagctagaaaagttatctaaagaggttataaactacatgaagaattttagtatgttgagggtagatgaggataacaatgagattattatattacctctagttggtaaaattgtgggagattatcctaaagattttaacaataaagagaaggagaatgattaa

SEQ ID NO: 50915 - DNA, 4104 bp, Caloranaerobacter azorensis H53214
atgattaaattggatatgaatagatggattatgaatagggctggattaataaatttctggtattatgacgatgaagaatttaacttttcagatggtaagcttcttttgagaggtgctaatggatcaggtaaatcggtaacaatgcagagttttataccgcttttgttagatgggaataaaagtccggatagactagatccatttggttcaagagctagaaaattagagaattatgttttaggagatgaagactcgggaaaagatgaaaatattagctatatatacatggaatttaaaaaggaaaagacagaaaattacttaactataggaatgggattaaaagctaaaaaggggaaaggactagatttttggggatttgccattactgatggcagaagaataggaaaagacttttttctatataaaaaaattgatcagaaagttccgcttagcagaaaagaattagaaaatagaataggagacggcggagaagtaaaaaccaaacaaaaagactatatggctatggttaataagtatttatttggatttgacgaactagaggagtatgatgagcttattaaattattagttcaacttagaacaccaaaactttctaaagaatttagacctacagtaatatatgaaatactcaataattcactgcaaccactttcagatgaagatttaagaccaatgtccgaagcaatagaaaacatggataacataaaaaataaattagaacaattagaagtatctaatagagaagcgaaaaaactcaagaaagtttatgaagcatataataattttgtgttatttgaaaaggcaagagattatgtcgattcttatgataaattaaaaagtctaataaaagaaaagagcaaactagaagacaaaaaaagtcattatgaagaagaaatttcaagtgctgttgaaaacatcaaggaacttgagatacaacaagataatttgaggttgaaagaacaagaattaagaaagcacgacagtttcggattaaaagaaaagataaattttttagaaagagaactaatcgattttaaaaaggaacgagctaaaaaggcagatgagcttgaaaggaagaaagatagagaaagagaactttatgcgaaaattaagaaattagaagaagacgaagaatatagtattagtaaaatacgtgaagatatcgaagaattagactcattagctgatgaaatgaagtttgatgaacaattttatatgaaacaggaattattaaaagatataagatgcgaatataaatttaattatgtaaaagatcaggttaaagcttatagagataaagtaataaaaataaaaagagaattagaaatggaaaaagttaagcgagatgcttatgagaaggctctagaagattttgagaggactaaaggtaataaaaatgtaatagaaaagagattagaaagtgcaaatttgttgttttcagaaataaaagaagaatttatagaacggatttacagctgggagaaaaataatagtatttttaaaatagataataatgcattaagtaatatttctcaagctgttaatacttacggtgataaaactagctttgatgacattttagctttagttagaaaagaatataatacagtcgaagatttattaaaagaagaaaaacaggatttaagtttaatcaaaagtaaatacgttaaagaatacgaagaaaagttaaaagaaataaaagagtgggaagaaaaaagagatccagagccaataagagaagaaaaggtactattaaatagagaaagattgagaaaaaataaaataccatttattcctttttatatggctgtagattttaaagaagagctgatggaagaagaaaaaggaagattagaagaaacgctattagaaatgggtatattagatgcattaataattccatctagatatagagataaggttcttgagatggatgaagatatggcagataaatatatcttcccatcaccgaagtatcttacttatgagttatctagtaaattgcgcattgaaaagattgatgttgatggaattacaacagaagatgtagataatgctgtaaagagtattttaatggattattctgatgaaggtacgtatataagagataacggagaatatggtataggaataataaaaggaaaagttacaaatagatacagggcaaaatatatcggttcaactgcgagaaagcgatttagaaaagagacattagaacgattgacagttgaaaaacaagaaattgaatataaaattaaagaagtaaacgaaaaaatagagacaataaatcataaactaaaaaaattagaagatgagtttaatgattttccaaataaaagagatttagaaactgcattgcaaactgtgagagaagagacattaaattatgacaacatattgagggagttagataacaaacaggaaatattagataatacttatcgggaattaaatatgataaagcaaaatatacacaatcttacactaaatattaatcttccagtaaatttagaggcatatgagaatgcagaagaatgcataagagagtatatggatttattgaatgaattagagagaaaacattcaaatcttttgaaagttttaatgataagaagtaatattgttgaaagtaaagaagaaatagagatagatatagataatctaagatacgacattaacaatatagatagaaagattaaagaaagtgaaggcagattaaaaaattataaaaaacaattggaacttactaattataaagaaatagaaagagaaataaatgaatgtatagaacttttaagaaagatacctaatatgattaatgaacttacagaaaaaagagcgaaggctgaaactaaattagaacagactattcaaaaattagatgagttaaataaagatatagaacttcaaaagaagataaacggcgttctagagacgggttttagagaagaatatctgcttgggttagttttttcagatgacatagaaggggatatttacaaattggcaaaaagtgtttacaatgaattaaaatattttgaagacaaaaataaaaatagagaagattatctaaacaatttgcacaataagttttatgaaataagacagtatttaaccgaatattcaccaaagattgaaattatttttgataaagaagtagacgatctagatatttcagaaattgtattaagacaaaaaagatatgtagttaaggctagagttagaggaaaatatattggattttatcaattattagattatatacaagagggaattgatgaaaataaaagattaatcagagaaagtgatagaaagatttttgaggatatattgacaaaagacatagctaaaaagattagaggtaagatttatcatagtagggcttgggttgataagatgaataagctaatggagggtatgaatacgtcaagcggattatcttttagccttaaatggaagagtaaagtagctgaaacagaggagcaattggatacaaacagattagttgagcttttaatgaaagacggagatttacttactgatagtgaaataaatgaattggctgctcattttagatctaaaattgaagaggctaggagagcagctttagaaacagggacaaggcagacattccatcaaataatgaaggaagttttagattatcgtaaatggtttgaatttagactgtattttaaaaagacgaatgaaagaaataaagagcttacaaacaatgcattttataaatttagtggtggagaaaaggctatggccatgtatgtaccgttattttcagcagtatatgccaaatatgaaggcgctagaaaggattgtcctaaaataatatcattagatgaggcctttgctggagtagatgaaaacaacataagagatatgtttaaattattaaatgaactagagttaaacttcataataaattcacagattctttggggagactatgatactgttaggtctctatctatatgcgagcttttaagacctaataatgcaaaagaaatagcagtccttaggtatatttggaatgggaaggttaaaactttggttgaggatgtaggtgtataa

SEQ ID NO: 50916 - DNA, 1287 bp, Caloranaerobacter azorensis H53214
atgaacagattagtcgtagaagcgagtgagtattttaaaagaaataaaggatttaagagagctttttcaaaaataagagataaatacagatcattagggaaaattggaggaacgataattttgaaaaatttaactaaagaagaaaaagatgctttatcaggttttttaggaataggattatatgataagaatgatgttaaaataaaggtagaaaagttccaaaattcattagacaattcgagatttaaagggacaaaattagaagatgtattagcagaatattttggcagtgttataataagtaaaaaagatgaaaaggaaaaatataaattagaaagagaaagatattttgaagaaatatttaaagaatttattggtactaaatcgtacgattggttaaaatatgtttttgagtttaaagataatgcgtatagagtgattacaaaaagatacgatgaagacagacaagccttaaaagaagatttaataataactatgagaggcttaaatagtttaccgtttttaaaatctaaaacaaaagaaagattagctatatttgcttcaagagttacaaaaaatcctcatgcttttgatgaaaaaacggaagcgggaaaacttttaatgtacggtattagttatttattaggtagagattttccgaaaagtgcagaagataaagccgagtactactatgaggtaggactaataaaggacgaaatatctaattttacagtatgtagtggattgctatcttatagagacggcgtaatttcggcagggtggaaagatttctatgaaatttctgaacctatgcatgtatcattatggaatttaagtaaaatagaaagaataattagtcctactggtaggatatttgtatttgaaaatccaactgttttcagtgaagttctctatagaatttctagatttaagccgccacttatgtgtagttatgggcaagtaaaactagcatcattagttttactagacatgttagtcaaagaaggggttaagatatactattcgggagattttgatccagaagggataatgattgcagataaactgaaaaagagatatggagacaatctaatattttggcgatatggtatagaagattattttaaatcgatgtcccgggaaataattgatgatactagattaaagaaactagacaatattaaaaataaagatttaattgaattgattgagattataaaagaaaatagatatgccggatatcaagagttgatagttgaggatttgattagagatataattgaatag

SEQ ID NO: 50917 - DNA, 1635 bp, Streptomyces glaucescens
gtggtgtcaccagaagaagagaagcccgccacagccgacagcgtgcccgacgcgcgtaaggccgtggaatatctggtgcggcaggagtccagcgaatacatcgcgatcatggatgtgttggaggggtcggtgaccgacctgacggttgccgaggtcgcggcagcgctggtggctgccggagtgcgcctggacgcacgcctggtagaaagacgcctggacgcgctgaaagacatgggtgcggtttcgttccggtcggacaccagccacgcccgccggtacgccgagattctgccccggaactggcgctacaccgccagcccggcgggcaggcacgtccagcgtttctaccgccaggtcctggcgggaacggtcaccgtgcgggaaatcccgatcgtgtcgctcagccgcatcgtgtcccaccttgagcagctcgctgcagccctgggcgtgggcgagcccgatgccagccttctcgacgctaccgtgctggatgccgtgagttctgtgttcaccagccacgacgacctcgacgctgccctggtgggtgccgaggatggcctgatcggtctcgccgaccggttcgacctggacgaggaacacaccaacgacctcaagggtcttctggtcgactacgccacccgcgtggcagtcgaactcgactccggctccgcacgggccgccgcagcactcgcggtgctgcggccgtggttcggcctgctggcccaggcggtcgtcgatgcctcccaggcccgtgacctcatcgccgcgggtgccctccgcgcctcccgcggcggacgcgcggaggactgggacggactgtgcgcgtggttcgatgcccgaaccggacgggccgcacggttttcgctgcgcctggtgagggcgctgccaggcatgcacgccaacctgcgtcggctgcactcctcggcaggcaccgcctccacccgtagccgtgccctggccctggcccgggcggtgctgactccggagatcggggtgcagatcttccaggccgcggtcggcgaccattcctggcgcaagctctacggccaggccgatgaggacgacatgggccgcaatccgtcctggcgtggcggaccgcaggtgccggtgccgacactgctgcgcaccgccggccggtcggggccgcgtggcagaggcgccgcaccacgcgacgacaccgtggccaaggcccaggtcgccgaggcccgggcacgccgccaggccggacaccaaagggcactcgccgaggtgctggccgcgcttcccggcgagcagctggacgaggcagccgcccgggccgcgctcgccgccctgatggccgccgcgcgcgccgccgcaaccgggccccgccgcaccggcacgagcgggggtcttgcctgcactctcgtgcacaccggctctggcaccggcatcctgaacgcccccacctggagggtgctcctgcccggacgcatcccgctcttccatcggcccggccagcgtccttcggccgcggccctcgccgccctcgcaggaacgacgacgacggacgacatctcggcgcacgcaacactgcgcatcaccccgcacaccggcccgagcacgtccgacaacgacacctcccgcatcatctcccggcaggagggcgcagcatga

SEQ ID NO: 50918 - DNA, 4239 bp, Streptomyces glaucescens
atgagtgacatcctcgacctcgacttcgccctgccgccgacgcccgcaccgtcaggcaacaccggtcgtttcggcgggcgctggcggctggtcggcgccgggctgtcgaacgtgtggcgctacggcgacctggaattgcctgccgcctcgggccggctgttgctgcgcggaccgaacgggaccggcaagaccaccgccctggaagccctgtggccctacctgctcgatctgaacggagccaaactggccgccggcaaggcacgccccaccaccctgaaactcctgatgagcgaaggcgcccctgccaagggccgccgctacggctatctttggctgacgttcgcagccccagccggcgaaccggcaccgaacacgccagacggggcggcagacggcgtcgtcagcttcggtgtccggctgcagtactcgcccagctccacccccgccgtcagggtcgtccccttcactgtgccgggccagccgctgaaggacctggcgctgcgcggcccccacaacagcgccttggagcacgaggagttctccgatcgcgtcgaggccgccggtggacgggtctttgccgagcccgaggactacatcgaagagctggccgcccgcatctggtctaccacctccggcgaactgaggcttctcgcttcacggctgcgggaagtgcgcaatcccaccctgctgggcgacgtctccccggccgcagccgccgacgcactgcgccagtccctgcccggcgtggctgaggacgttctcaccgccaccgccgaggccctcgccgaatccgatacgacccgtgaggcgttcgaacgcgacgagcacgccgccaccctcctcgaggagttcgcccgcgtatggaccgggcacgccgtcgacgtcacccgcaccgcccacaccgccgcacgccacgcccacgacgacgccagcatccgcaagcgccgcgtccagcagtgcaccggcctgctggagagcgcgaaggccgaagccgaccaggccgcaggcgacgtccaacggctcgacaatgcccaccagaaggctcaggccgccgttcgcgccatcgaaaccagcgatgcctaccgctcccacgggcacgtcatgggcctgcgtaaacggctccgcgccgaacagcgcgccgcatccagcagctacgacagcctgcacaccgccgcccagcaggctcgcacccagaccaagaccggccaagacgccctcgacgacgccatcggtgacatcgaggacaccctggccgacgcggaggcggccggttccccgccggtggccctggagaccctgctcgcccaccacccccgggcccgcgtcacccgtccggtcgccgaccgcatcgccgatccaggaccgggcatcaccctcatccacgaccgcgaaggcctcgaccagcttgccactacgttgaggacccgagcccaagaacaccgatccacggccgaccgggccacactggtcctacgcgaccacgaccccgtcgcggcggccgaaaagacagccgcgaccactcaccgcacagcagccggcgccgagagcgcctacgacgaagccagccaagcccatgaccgcgccaccgcggcggctcgctctgccgcccgccaggcactcgccgagttgacccggtgggcacccgaacaccccgctctgcggggcctgcacgacgaagcacccctggccggggatgaactgaccgtatgggacacggacgacgtcgaggccctcatccacgcagaacccgccgcggtccgcgaccagctcaacacatgggccgaccaagccctgcgcatcggtgaaaccctcgccgccggtcacgagagcgcagcccagcagcacctcgccaccgcagcaagcctcgactccaccgccgcccagcaccgcaccgaggctcaccacctgcgctcgggacggctcctaccactgccgcgccccgcctgggccgggccgggcgaggacgacactgcactcggcagcctgctcgaatggcaccccaccctcgacgacgcggacgactacaaggccctgctggagctggcccttgccagttccggaatcctcggcgctcacctgcacgagggcggcgccaccacccacgcctggcacatcagccccgcaggggccgtccaagagcacaacctgaccgcagtcctcgatatcgcccccagccaccctcacaccgacctcgcccgcgccctcctgcagcgcatcgccctggccgacaccgccaccacctccgaccgcccggacacgccggcgctcgtcgtcggacgcgacggcaccttcaccgccgggcccctcgccgcagaccccgccaccgccctgcgcgccgccagcaaccaaatcccggccgcctcacacatcggcgcccgcacccgcctcgcacgggcacgagccagggcagacgaactcgacgccacagcgcaggaactcgagaccagcgccgccaacgagcgccggctcgctggcgagcgtcgccagcaacgcgacgccctccgggccgaaggacgaggcttcccgccacgggacgagctgaccaccgccgaggccgagcgcgcccgcaccgcgaagacggcgcatgaacgccacggcgccgcacggaccctgcgcgggcgggccgatgacgccgcggccgaacacacccgcctgcgcaccgcctgggagacccgcgcccggagcctgggcctgccggccgaccccggcggcctggcccagctgatcgacacaagccaggcatccgcccagcagctgaacggctacgcaacccagctgaccacccggctgctgccccggatccagcgcatcgtgggcgctctgcctgacgaagccgccctcgccgagcgcctcgccgaactccagcacaccgcccaggacatgcacaccaccgtgctcgagacccaggcagaactcaccgaagcccagtcccacggcgacgccgatgacgcggcacgccgctacgagcaggcaaccgcacaggccaaggacctccaccagcagctcaaacaagccgcagcgcaggtcctcatcgccgaaaaacgcctcagcacctgcgaaagtgacctcaccgccgcccaagaacgcctcaacgaatccctgcccctgcagaaaaccacccgggcgcacctgaccgcactactcgcctgccctccccttacccaggccctcggcgccgatgcccgcctcacagccaaggacaccgacaccgccgacctcctcaccgccgtcgacgacctgctcgccggccgccccaccgcctccaagaagaccctcggcgagcactacgacgccgtccgtgccgaactcgcccagacctggaccatcgcccacgacgactcgcccgctggcatcgaagaactcgacaccttcgtcctcacccacgcagaaacccactacgaccccctcaccgccgcccaacgcgccaaggccctcgccggccgggccaaagccgcactcgacgccgcggaagcggctgcgctgcgcgacttcgtcatcggccgcctgccctccgccatcggcaccgcatgggccgccctgaccggctggaagaagaccgtcaaccgcaaaatgcgggcggcccaggcatcctccggcgtcggcgtacaagtccagaccgacctgcgcagcgacctcgacgccgccacccgcaccgtgtatgagctgtcctgcaccgtcggtgacgccctacgcaccgacgcgcagaaggaagaagtcggccaggcactgcagtccctgctggccgccgcggacggctccaccatgcaagaacgcctcgccgccgccgtcgacatccgcagctgggtcgaggttcgctacctcgtggaacgccccggccccgacgggaagcccgtcaccggtctgtggggctcgcgcaccggcctgtccggcggcgaacggcgtctggtcgtcctggcacccatgctcgccgccattgccgccagctacgaccgcttcaccagcaccggcctgcgcctggtcccgctcgacgaagttcccgcggaagtcgacgagcgcggccgcgaaggactggcccgctacctcgccgaactcgacctggacatcctgtgcacgtcctacctgtgggacggcgcacccggagcctgggacggcatcgacgcccacgacctcgaagcaggcgccgacagcaccgtcgttgccttccccatgctcatccgctcaggccaggacctgcccggagacacgggatccgcaccccaggccggaggagtggcatga

SEQ ID NO: 50919 - DNA, 1278 bp, Streptomyces glaucescens
atgagctgcgccctgtgcgagggagcatgcgacggtgcggatctggccccgctgctcagccccgaactcgcatggctgtggaaggccatggcagccgtggccgaccggcgcggagacgagtcccttaccagcggtcccgccgtgacagtgacggtgcccgcagaaccagtacagcgggccgccgcggccggtctcatcgacggacggcccctggaaccgggccaaagccgccgtgtcagcctggaacgactgaccaccgccctggccacccgcggtccccgccttacccccggggccgtcgcagcccacgcctgcaaccggcggctggcggcaagcgcccgccgccgtacccaacaggccgtcgcggccgaccgcatccgcgcccaactcgagagcgcggcagccgacttacctggccacgttcgcgatctcgtcggcccagaaaccgtcttcacccgcctgcgcaccctgggatgggtcacccgcctgctcaatgcgccggatcccgccgaactgctaagccaggcgctgcacgttgccgcgcgactgcctccgccggggcggcgtatcgaccgccgcctcctggtatccggcaatccccacgcacttgatacgggcgcactgcccgcactcgtgctggccctgaccggatcctccggtaccccagtgcgttcgggctgggcacgtctgggggtggactgcgacgatctgctcggcgggctcatcatcaccggcgtcacgccccgggggtggcgggtcccgcccggtgccacattcactctgccgccccgcgagctggcccatatcgactgggagcctgccgagaccaccggaacgtgggtcttcgttaccgagaacccctccgtgctggccgcagccagcacccaggccttgaaccgggacagcctcgtgagaccacgggtgatctgcaccgccggcacaccctcccaacgggaatgcgaagccattggcgctctggcggacaccggatggaacatcgccgtccgcgctgacttcgaccaggccggcctggcacacatgcgtgccctcctggctgcagcaccttccgcggttgcgtggcggatgggcgcagccgactacctcgcggccgtccccgagggcactgacgtcctgcatctgcagggctcagatgctccctgggacggccacctggtacccgtgatgcgcaaacactctgtgccggtctacgaggaggatctgcttcccgcgctgctagccgacatcacggccggtgcaccgggctcttgtgctctgtga

SEQ ID NO: 50920 - DNA, 1257 bp, Actinopolyspora erythraea
atgaggatacgggaaaccaccgtaccgggattcgaacagctcggggacatagacgcggccaacgtggtgcgctgcgccagaacgctgttgcgccgccccctgctgcacgccgcgagcccggacggcgacctgcttggcatgatctaccgccaccgcgcggtgctgcaggagctgttcgccaccctgctcggctaccgcctggtgatccgccggaggtacgcgcggctgtacaaatccgggccgggcgaggacgccacgagggcggttcccgcgctcaccccgcgcggatacgcccacgtggccctgaccctggccgcgctgaccggctgcggaaagcaggtgctgctgtcacggctgatcgaggagatccgcgcggcggcgagcgaggcgggcctcgtgatcggcgacgaaccgggggaccgcaggtcgatggccgccgcgttgcgccacctggtcaacctcggggtactcaccgagaccgaggggacggtggggccgttggccaacgacaccacggcggaagcgctgatcaccgtggacaccgacctgctcggccaactggtgaccggccccctctcggaggccgacggcccggaacggctggtcgagctggcggcgggcaacgagggcgcccacgccgtcacggtggagcagtccgtgcggcgcagactggtggaggacccggtggtgcactaccacgacctgcccgaggcccaggcgagctggttgcgcaggcaccgggccggtgagacgcggctgctggagcggtacttcggcctcgtggccgagtcccgttcggaggggatcgccaccaccgatccgcaggactacctcaacgacgccccgttccccggcaactcgactgtggcgcgcgtggcccagctggcgctgccgaagctgctggaggactccgaaccccgcgatggcgatcaccggcacccgctcgggtgggaggacttcgcgcgggtgtgcggtgagctgttggagaattaccctgcggcgtggtcgcgccgggcgatcgatgaccccgactcgctggtcacgatggtggtggacctgctgcgccgcgtgggcgtgctggcgccgcacgactccggggaggccgggcgctggctgctcagtcccagcgcgcaccgctggttgccgatcccggacggcgagcccggccccgccgagcgggagacggacaccccggccgaggagccggccccggatctcgcgttgttcgactatccggaaggagaatccgcgcgttga

SEQ ID NO: 50921 - DNA, 4212 bp, Actinopolyspora erythraea
ttgagcacggaagcggtggaacaccaggagggcaccgcgggacagcggtcttcgaccgcttccggcgggccccatctccccgatggcggggtcggtggccgttggcgcctgcggcgtggcggcgtggtcaacatctggcagtacgcgaaccaggagttcgacctcagcggtggacgcgcgatcttccagggaaccaacggttcggggaagtcgcgcaccctggaactgctgctgccgctgtgcctggacggcgatctgcggcagatcggttccaagggcttcgacacggtcagcatgaaacggctgatgctcgacgagcgcgagggcggcggcaaccgcgtcggctacgcctgggtcgagctggccagaacggcgggggacggctcggagcggttcctgacctgcgggatcggtgtgaaggcggcggcggcttccaaccagatcagcgattcgtggcggttcgtgaccgaacgccgggtcgaccacgacctgcggctgatcggcccgggtgatgtgccgttgggacagacccagttgcgggacgagctcggcgtcgagtgcctgttcgacgagcaggccttccgcgccaggatcgcgggcacggtctacggcatcaccccggagcgctacggcgacctgctgcacctgcagcgcaccctgcgcaacccggacgtggggctgaaggtgcaggagggccagctggagcagatcctgtccgacgcgctgcccccgctggactcgacgttggtacagcggttggcgagctccttcgaggacctggagtcgatccgcgagaacatcctgcggctgaccacggccgacagcgcactgggctccttcatgaccacctactcggactacgcactgggggtactgcgcgcccgggcgaaggagtcccgcgaggccgcgggccggtacgactcgctgcggaccaccatcgaggaactggccgagcagcaccgggccaagctcgacgagcggtccgagagcgacgagcgggtgaccgagctggaacagcgcgaccgcgagctggactcctcgctgcaggccctgcggcagagcccggcctacaccgagttgcagaacctgcacgaccgcagggcgctggtggacaacgcgcgctcgacggccgaggacgcgctgcgcaccgccgaacggcaccgggaccaggagcagcgctcggtctccacggtgctgggcatgctggaacgcctgggttcggacgtggccgccgcccggcagcaccgcgagcgggccgagtccctgctcaccgcgtcggggttggacggttcgctggtcccgggcgtgccgacgatgccgcccaccgaggccacggtccgttcggaggtcgtgcggggcacggccgacaccggttccgaatggctcaacgtggaacgccacgtcccgccgcaaccggacaccgaggagttcgcggccagactgcgcgaggtcgacgaacacgccgaacgcgcggtggaggccgcgcggcagcgcggggcgctgacgctgacgctgcaccagcgggccgtggacgccgaccggcagcgggccgaggtcgacgacgccgaacggcaggccgaagcggccaaggtgaccgccaccgaggccgccgcgcggcgcaaccaggtacggcaggacctgcacgacaccgcggtcgcgtggctcgaccggctgcgcggctggtggcgcggcggttcactcgccgacgaggcggtggacggtcccgcgccgccggacgccccgacgctggaacagctgatggccgaccgcttcgcggcgcgcggtggtcgggagcgaacccgcgagtgggcccagccggtgctgcaccgcgcacggatgcgcgtcaccgaactggaccggacgctggcggagacccgctcgaccgtggcggaacgcgacgcggaactggcggagctgcgttccggtggggagcccgttccggagcgcccctcctgggccaccgccgaacgggtcaccggctcgggtgaggcgttctaccggctggtggacttcgcggaatcgctgcccgaggccgagcgcgccgcgctggagggagcactgcaggcctgcggactgctcaacgcgtgggtggccgccgacggcaccgccgtcgacgccgacaccgccgacgtgctcgccacccccgatgaaccgctccccgagcactccctggccgagctgctggttcccgccgccgaaccggactgccccgtcccggtggagcggatcggggcgttgctccgctcggtggcggcgacctccggtggcgagctctcggtctccgtgacgggacactggcggagcggggtgctctcgggggcgtggcgcaagacgacggcggagtacgtgggcgcgggagcgcgccgggccgcgcggcagcagcgcatcgcccagttggaggccgagctggcccggctgcgttcggagctcggcgacgtggagcggcaacgggccgaggcgaaccgccacgcggacgcgctggagcgggagctggagtcctatccggacgacgacgagctgttcagcgcccacgccagactcgccagcgcggtcgacgacgccgacgaggcacaacgcaacgccaaccggttgcggcaggcccacgaacaggccgaggagcgctggcgagcggcgcgctcggagctggtgcgcacggcgggcggagccgggctgcgaccggagaccgaggcgctccgggaggccaaccgcgccgccacggacgcacgacaggagttggaaacattccgtgaggccatcgcgtcacgctgcctcggcaccctgcagcagctcggcgacaccctgctgcaccacgacgccacggtcgccgaccggatggcggccgagtcgctggccgaacagcactgcgcgaaccacgccgagcaggcggcggcgctggcggagctgacggcctcggtgggcgacgagggccgacgggtcgccgaacaggtcaccgagctggagaacgagcgggaagatctccgcgaacgactgcccgagacgcgggagcgggcttcggccgcccgggaggccgcgggcaagttcgaggagaagctgaacgcggctcgcgcgcggttgaccgaacgggagtcggagagccgggacgccgaggcggcgctgcgccggaccctggagctgccggggttgtgggcggcggcggtggaggccaccgacggggagttgcccccgcaaccgggggatcccgagggggccgtgagcgcgctgctctcaaccgcggtggcgcgttcctcccccggcagcaccacggccaaggcggtccacgacaagctgcaccccctgaagcagtcgctgagcggtcacttcgacgtcaccaccgccgagagcgagggggtgttgaccgtgacggtgatcggcgaggaggggccgttgccggtcgcggaggccgcgctgcggataagcggacggctggccgagcagcgggagtacctcaacgagcagtaccggtccatcttcgccgactacctgatccgcgacctcgccgaacggctgcgggaccagatcgcggtggcgcgggacctgtgcgaccggatgaaccgggtgctggacggggcgcgttccagccagggagtgcacgtgcagctggactggcaacccgccaccgcgctgagcgaggacatgcgccaggccatcgaggtggtccgcaaaccgttcgcgaaccgggaggagcaggaggacgcgctgctgcgccgggtgttcaccgacctgatcgagtcgcagcgggagagcgtctcgggcggatacggtgagatcctggccagggcgctggactaccgggactggtacgagttcaccgtgcgggtgcgcgacgcggggcccgacggtcagccgcgcgtgcggcggctgcggcagttgtcctcgggagagacccggctggtgtcctacgtgaccctgttcgccggggccgcgtcgttctacgacgcgatcgagtcctcgggcgagcagcacgatccgctgcggctggtgctgctggacgaggcgttcgaacggctggacgacccgacggtggcacgtatgctggggctgctggtggatctggacatggactggatgatcacctggccgagtggatggggagtctcccccaagatcccgaagatgcacatctacgacgtgctgcggccgcgcagcgggcacgggatcgcctgcacccacaccgtgtggaacggtcgcggtctggagcgagcggaacagtga

SEQ ID NO: 50922 - DNA, 1281 bp, Actinopolyspora erythraea
gtgaacgacgccgagaacatccgcgccgtctgggaccggcccgagctgcggggcctctgggaacgcgccaggcaggcactggaggcccccgagcgtccggcgaccttccggctggaactgccggacgagcggacccgtcgtgaggtgggcgagctctacggtcgcccgatgtggggccagggcaccaggatcaacgtgtccaaactggacgaagcggtgcgcgggagccgcttcggcaggagcctggaagaggtgctggagatcctgcacgagcggccggtcaccccacgggagtcggactcgcggcttcggcggcagcgaggtgaccggaccgtcgaagtgctgggcgcggcgctggccgagcacggtctcggggaccagccgtgggccaccgcgtggcagcactgggtacgacagtacggacgggtggccgaggccgacctggagtccacggcggcacgcgccgccgccgtgctggcacgtctggtgctcgacccctccgaacgaccgcggacctggcgcgcccgcaccgatctcgccgctcggttcgcgggcggcgcgcacgggctggacaacggcaccacgctgagccgggtggtgctgcgtgccgcggcgatggcgcacggggtggactcgcccggcaacgagcgcgagcgcaggaacctgtgggagcgctgcggagtcacgctggacggggtgtcggccacggtgccctgctgggcgctgccgctgacggggaccgacacgtggtcgggcaccgtgcgggaacgtaccgaagcgggggtgccgacccacctgacacagctcgacctgcgggcggcgccgccggctctggtcgaaccggacacggtgatcgcggtgtgcgagaacccccgggtgctggaagcggccgtggcggaaggggtgcggcatccgctggtctgcgtctccggtaaccccacgacggtggccctggagctgctcgaccggctgcgcgccgacggtgcggtcctgcgctaccacggtgacttcgactggtccgggctgtccatcaccgcctcgctgtacgaacagcagagggtggtgccgtggcggatgtcggcctcggactaccgcgaagcggtcaaccgggcctccgcgctgcgcaccgacctgcaaatcctcgacgagacccccacggaggcgccgtgggaccccgagctgcccgaggtgatgtccagcgccggtcgggtcgtggaggaggagatcgtcctcgaggagttgctggaagacctgcggaacgggctcggtcccacgccctga

SEQ ID NO: 50923 - DNA, 1488 bp, Thermoanaerobacter kivui
atggaagataaacttgatttgaatgtgataaaaccgattgaagaggtaaagtatttgtctgcggaaaatgcttcgcgatatcgcctcatcatgaggtatttttatgaacagtaccagaaatttaaatattggctgtacaaagaggatgtatatgaatatgtaagtcaatttgatgtgttttccgactatacaatggaaaaatgtgagcaggacttaaaagcacttactgaatggaaaaaccttattgcgacacaagataccagtaaagcttctacgattgacgaatttaaaaacaaaaaattcaggtatcagctgagtccatattctattgagatagaaagaatgaccataaggctggaaagcatcgttggttatggtgggtcactacagccgtctttatttgaaaggatttaccgcaatttaataaagataaatgaaatggctaaaaaagaggatttacaggaaataaacaggtggtgggaagacctcaataccgactttgaaaatatatatcacaatgcgacagattacattgcaagtcttcaaagctctaacgctgatgaacttatgaagtcagagcagtttataatttacaaagacaaacttatagaatatttaagagattttataaaagaccttcagaggttttctgttgccatagagagctttttgaaaaaggtgagtccgcagattgtcaattccgttgtagataagttatgccaatatgaaatgagtatcccaagaattgacagggttttaaatgaagaggaagtaaaagaagatttgatggataagtggaataacatatctttttggtttacaggtcataattttgaagacagcgaggcagtaaggcttcttaatatatcaaatgaaataatcagaaaaataacaatgtatgcggcgagaatagctgaaaacagaatgaaagctgccagcagaaagaatgaatatattgctctttctaaaatgtttgcaaaagcaggtagtataaaagaagcacaccttttgtctgcggcggttttcggttgcttttacacaaggcacataaaaggtgattttgaaagaaagacagaaagtgtaaaccagagcgtgtgggaagaaccgccctttaaagtgattataaagccaaaaacaaggagctacagtaattatgttaagacaaatgcgattattgataaaagtgctgacaagacggagatgctgatggactatctcaatcagaaaaatatagaagatgaaataatagcaagttgcattgttggcaatagaataaggataaaggatttacctgttgtaaaaccttttgtgagggcaacgatacttaaatggataggaaaagcgatggcaagaaatagttttacaggaaagacagaagatggaagaacatacaggcttcatatgccaaagaatggtgagagggcaatactaaaatgcacagatggtaatcttgatatgcctgatattgtaattgagtttgttgattga

SEQ ID NO: 50924 - DNA, 1152 bp, Thermoanaerobacter kivui
atggaagaacttcagatgcttcttgaaaatttttggatactgagagaggatagagaaaatttcaacaaaataagagatgcggagaataaaataaaaccttttgttgaagaaaaattaggatatagattgattataaacccatatattattaagttagaaaaagtgccgtcagatgttgaagagtggatgaggatagatgcatttcaaacgcctatggattatgcatttttgtgtttgctcttagcttttttggaggataaaggaccagaagaccagtttgtgttgtctaatataacggaatacatagaggcacagtatgatggacctgataaagtagattggacgctttttcagcacagaaagtcacttgtgcgggtgctcaattttgctgtagatattggcataattaaaatagatgatggtgaccatgagaggttttcagaaagtgaagatactgaagttctttacgaaaacacaggtatttcaaggtattttttgaggtcttttaacagagaaattacagaagacatgaagattgaggattttttgcaggaggatttaaatctttcaaaccccaaagatgcggttatacagagaagacacagggtgtaccgaaaacttattctttcaccttctgtgtatagtgaaggacctgatgaccaagacttcatgtatataaaaaattacagaaatactatagcgaaagatttagaggagtatcttgatgcaaaacttcacctccacaaaacttctgcttttgtcctctttaatgacaacaaatatttaaagtcctattttcccgacaaaaacaaaaacatatctgatataatgctgcaggtaaataaaattataagagaaatgattgaagatggaaaactcgcctataatcctgatgatactatagatataactgaagcagaatttataaatattattttgaaagtaaaggaaagatttagtgatggttggtataagtcttacagggagatgagtgaaaagcagcttatagaagaggtcattgaaaacatggaaagctttaaaatgataaaaagagttgaggaattgcattctattaaaatattgcctatggcggcaaagttaattggggaatatcctccagattttgaaaaaggagaaggtgcagatgagtga

SEQ ID NO: 50925 - DNA, 4167 bp, Thermoanaerobacter kivui
atgagtgaaaaattagctgaaagatggatgattaacaggattgggcttcttaatttttggtattatgatgatgaaatatttgagtttgcagatggaaggcttcttttaagaggtgctaatggttctggaaagtcagtgacaatgcagagtttcatacctttagtattagatggcaacaaaagtcctgaaagactcgatccctttggctcaaaggcgagaaagcttgaggactatcttcttggggaagaagaggtaagtgggcttgatgaaagaactggctatcttttcatggaatttaaaaaagagaaaaaagacagctacattacaataggcatgggactaaaggcgaaaaggcatcaaaatatggacttttggggctttgtaatacttgacggcaggcgtataggtatcgacttctttttatacaaaatggaaataggcgatgacggcaaaagagtaaaagtcccacttaccaaaaaagaacttaagaatagaataggtgaaggcggagaagtagttgaaagccaaaaagagtacatggaaatggtcaataaatacatttttggctttagttctattgaggaatacgacgagctcataaaactgctgatacagcttagaagtccaaagctttccaaagacttcaggcctactgtgatatatgaaattatgaaggcttcactgccttcactcacagatgatgatttgaggcccctttcagaaactatagaaaacatggaccagattaagatgcaccttgatgttctttacaggaatatggctgcagtaaaaaagcttaaaaacgagtacgacaactacaacaaatacattctttatgaaaaggctggggatttagtaaaggcatacagcgatttatacgcatcaaaaaaagaatacgataatttaactaaagatattgaaaattacagaagtacaatagcaaacttaggaaatgacatcatttctcttgaaagtgaaagagaagctttaaagaaaaaggaagaacagctttcaagtggtgatgctaaaagaacccaaaaggaattattagaagaagaggatcgatataagcagtatttggaggataagtctaaaaaagaagaagaactccggaataaacaagataaatattatggtttagaaagaaagataaaaaacactgaggaacaaaaatacaaactggataaagaactacaggataaattagaggatatatcttcaattgcccaggatatagatttcatggaacatgagttttctgtaagtgaacttaaaaaagtgtatggaaaagaatttgattttacttattggaaaaatgaattaaaaaagcataaagataaaataaagcgtgccatcaatgcattgagagaagaaatagaagcaaataaaaggtatgatgccgcacttaaagagcaggaaaggcttaaaaaagaaagagaagacagggctaaaaagcttaatgaggcagaaaggctttttgacgaacaaaaaagagaatacgttgaaagagtttatagttggtcacagggcaatgcagagcttaagcttttaagtagccaattggaaggcttaagccgtgtcatactggtgtatggagaggataaaggatttgacgatattttggcttttgtgagaaaaccctatgaggaaatactaaatggaattcagcaagaaattttaagattagaaaatcaaagagagataaaagaaaatcagcttcatgaggaagaaaagttattggaggaatggaaaaacaaaaaagaccctgagcctgaaagagatgaacaagtcataaacaacagaaaaaggcttaaagaagctggaattccttacattcctctttacatggcgattgattttaaagaggatgtggatgaagatacaagaggaaatatagaagctgcgatagaagacatggggcttttggacgctcttatcgtgccaaaggaatattttgaaaaagctcttcaaatggacagcaatatggcggataaatatgttatgcctggaagctttaatatgatgctaaatgtatctcaatattttaaagtagttgacaatgaagaaggagtttcaccagaagatatttcagatgctttaagcaatatatttgtatcagaagaaggcgggacaacctatatcgattcaaatggcgcatatggaataggagtaataaaagggaaagcacgggataaagttagatcaaagtacatcgggagtgagtctagaaagcgctacagagaagagcttattaaatctatacaagaagaaatacaggctataaaaactgaaatatctgcaatcgatgaggaaataaatgcaaaaaaattaaggatacagaggctggattacgaatattcggcatttcccgggaaagaagacattgaagaagcgtatagatatttaaaaacggcaaaggctgattacgaatacacctctcataaactggatgaacagcttttcacagttaaaaactgttttgaggaccttcagaaaaagaaagctgttgtaagagaattgacatctggcataaacatacatccagatattgatacctattcttctgcctatgagtatgcggaagaatacgcttcagggcttaatgaagtagaaatactatacaataaatatgttttgcaaatttcaaacgaagaaatgttattgcagcaaaaacaagatttagaatacgatattgataacttaaagtacgaaatagacgtactggaaaacaaaatacagagttctgttaagaaaattgagatgctaaaagagacattaaaagaacttggacttgaagaaattgaaaaagaactggagatttgcctaaaaaggctggaggaaatacctaaagagattacaaataaatcagccgaaaaagcaaaacttgaggagaggctacagagaagcttaaaagaccttttaaacattgaagaagagattaatcttaaagagaaaatttacaatattgttgaagagggtttaaaaaaggaattagcacttggctttgtcaagcaagacgttgaaatggaggatatgttaaaattaagtaaaagcattctttctgaatacaaaggcttttttgacaaagcgggctttgacagagaaaagtttacagagagacttcaaaatgtgtattttgaaactcgcaacgaacttttggaatatgggctttcaattggcaatatctttgacgaagcttgtgagggagacaatgaaagaataaaagaggcaaagaataagcagagaaggctcaatattacggcaaatataaatggtaaaattgtgtctttatatacgctttattctaatattgaagaagatataatggcgaatgaaagccttttaagagagactgataagattctttttgaagagattataatgcacaatgtgggaattaagataagagcaaagatttttaaagcagaagaatgggtaaagaaaatgaacaaactcatgtctgaaagggatacttccagcggacttaagttctctattgagtggagaagcattcctgcttctaatgaagaagaacttgatacaaaggaacttgtggatattttaaaatctgatgctgatatgctgaaaaaggaagtcttcgataaagttgtaaatcattttaggtcaaaagtagaaagagccaggagggcaatggaggaaaaaaacaatacagaaacttttcacaagattatgaaagaaatattagattacagagattggtttgagtttaagctttactacagaaaagaaggggaaagccgcaaggagcttactgataatgcttttaataaattgagcggcggagaaaaagcgatggccatgtatatacctttattttccgcggtttattcaagatatgagggagcattgccgactgcacctcgcatgatatctctagatgaagcatttgcaggagttgatgacacaaacataagggatatgtttaaactgattgaggatttaagatttaattatataatgaattcgcaggttttgtggggagattatgacactgtccccaagctttcaatttatgaacttataaggccaaaaaatgcaaaggctgtattggtcatgaagtatttgtgggatggaaaagtaaagcaccttatacttcctgagaaagaggaggttgctgctcttgaggtgggtgctataaatgaataa

SEQ ID NO: 50926 - DNA, 1296 bp, Thermoanaerobacter kivui
atgaataaagaagaacttagatattttaaagaaaaaaagggatacaagaggatttttgaaggtatacgggaaaagtatagaagtttaggacgtcttggaggcgttgtaaagcttgataatcttacggaagatgaaaaagaagtacttacaaaccattttaaaaaagactataggacaaaaaaatctgcatccattgatgtggcaaagcttgaagagtcgctaaaaaatacgcgatttgaggagtatacgctaaaagatatactggaatactattttggcgaaaaactcaccagcaaaaaagaggatatggaaatattggcaaaagaaagagaagagttctttaaagagctcttctctaaataccaggaatgtaagtgcattgattggctaaaaagtttgtatcaaggaaccgctgtaggggtaagggcagtaaatcagaggtatttaaatgataaggacggattaaaaaaagatataatgtgcgtatgcgatgccataaacaatttgcctgtttataaaggggaaaagaaaagactgccggtgttttcttcccagattgcacggaatcctcactattttgattcaaatacagaagctggaaatatgtttataaacgctttatgcactttaatggggcttaatgaagcaaaaggaagtgaagaaatatcagaactttattacaacgttggtattttgatagatgaaatatccaattatgtcacactctcaggacttttggcatatgagggcgatatggaaaatcaagtatttaaggctgcttatgaaagcaatcaagtcttgcaagttcctcttttaaatttgagcaaaattgaaagggtcataagcccttctaagaaagtgtatgttgtagagaatccttcagtttttacatctttaatagatgctacaagcaaagtatttcctcttgtatgcacatatggccagccaaaactttcttctctcctgcttttagatatgctttataaagaagggacagagatatattactcgggagattttgacccagaggggcttatgatagcagatagattgtacaaaaggtataaagataaatttcactttttaaggtacggcctagaggattatttaaaatctctttcaaatgaggtcataaatgatgtaaggcttagtaagctaaataagattgaatcacctttactttttgatgtggcaaatgagatgaaaataataaaaaaagcagggtatcaggagcttataatagatgatattataaatgatataaaattgattgaagaaggtaagggggagtggtaa

SEQ ID NO: 50927 - DNA, 1482 bp, Listeriaceae bacterium FSL A5-0209
atgaataatcaggacttttccaagttgagtgaagctacctatgtaacagcggaaaattacaagcgatatcggctaattatgaggtatttttatgaccaacatcgtagtatgaatgatttattgtatcgtggtgatattcttaaatttatgcaagaagatattaaattcccaaactaccaagaaaaagaattggatcaggatttaaatagtttgatttcgtgggggaatctcgagcaacgccaagaaatgagccaacctaaatccattgaggaatataaaaatcggcattttagatatcaaatttcggagacaagtgttgtgattgaagatatgctagaaaacatcgcaaacctacataaaggaactcgtggctcgctagataaaaatatatttgaacgattattagtttgccttacaagattagaaaaggaaacgccagaaggacaacaattgttggatatttgggaggatacggttacacattttagcagaattagcaagaatacgacagactatattggatatctaaatagtgaaaaatctgagcttcaaatgcagacggaagtttttttagtatatcgtgacaagtttattaattatttaagggattttattatcgccatgcaaaataaagcctatcaaatccaacatagctttgaaaacgtttcggaggcttgtttggagcgaatttttcaacagattttaaagaaggaaaaagaaatccctcgtttagaaatactgactatagatgaaaatcaagtcagaaaagaattttttgagaagtggaacaatatgaaatcatggtttattgatcaacctcataaggcgagtgaatatagtttattgctaaatcaaacgaaccatgctattcgaaaaatgacacacttgatgcagcggtttagtgatcaaatgcaacagtatcatagtcggaaaaaggattatatgctgttggcgaaatggtttttagattgtgaaaacttagatgaagcgaatgaattatcggcgtatttgtttgggtttgaaaagacgaagcattactatgtgaaaccgtgctcttctgataataaatatgaggatatgtgggaaatagatccgactattcatgaaacagtaccaagaataaggtcgtattcgaggaaaaccaagtctgattcatttgagagaaagcaagccgaaaaagacgagttgcgaaataagcatttgcgggagaataagcaactagaaaacgggatattaagttacattaaagataataaaattgatttgaaagatgtgggatttgtagaaaaagatgtgcgaaaaattctattaaagtggctaagtctatctttccaaaaagaggataatatcattcaaacggaatttaatatgtccattaaaataacggtggatacggctgaaataataacactttgctcggaagatggcgaactaacaatgcctagggtagtatacaatatcctgaaaaaggagataagttaa

SEQ ID NO: 50928 - DNA, 1185 bp, Listeriaceae bacterium FSL A5-0209
atggttgctagcaatgaggaaatagctgaggcagttggtgttttatttgaaaactattggattgttcgagaacggcaaaggtatgaatatcatttaataaaaagcaatgagcgtgaattgataagacatttgatggagaactatggtttaaaactcattgtacgtagtcattttatcaagttagaaaaaattccgattcaagcgaaaagctggatggggatggcggattttaatactttgatggaatatgctctcttttgttgcgctatggcctatacggaggaaaaaggagaaggcgagccatttctgttaaatgagttggtagaggagattgagcttttttatcctgaaaaagaagggctggattggactaattatagacatcgaaaaagcttggtcaaagtattaaataaaatggtggatttgcaactgattgaaataatagaaggaaatacgaatacttttgcggaatcgaaagagcaatatgaggtactttataggattagtaaatacagcagatattttattcgaacatacccagaggattttcaaatttataatagtggtagggactttatttcgaatgaaagaagagagaagctggcggattatgaaaatagagtgaaaattttccgaaccttattgatggagccagctattttaagaaatgcagataatgaatccgaattttattatttacgaaatcaggaggagaacatacgtcatttttttgaaaaattcacaccattttcttttgaattaacaaaaaatgtggcgatgttgactctccatgatcgaaaagcacaatatgatacatttccgtcgctaaaatcactagatgactgctttcttcaattggtagactacgttcgaggagatgggttggagtataatgcgtatggagaaatgatattgacttcaaatcagtggaaaacattagttggagatcatgctgctagaaacagaggtggatggtcaaaaaaggatcaggaattatcgttggataaacttgcggctgtgttattagaaatcggaaaaacgtggggaatgttgcgtgaaaataagttggggaatataactattatgcctaattttgctagaaatatagggcgttatccagcaggttttgactcgttgtatccagaggcatataaagaaaagatgaaaactcaaattgatgactaa

SEQ ID NO: 50929 - DNA, 4128 bp, Listeriaceae bacterium FSL A5-0209
atggcgattaatgattcgaaatgggaagtcaaccgagtaggcttgattaatttttggtattatgatgaggaatattttgaatttgctgatggaaagatgcttttaagaggatcaaatggttcggggaaatctgttacaatgcagagcctgtttcctgtattattggatgggaaaactatcgctaatagactggattcatttggtagtcgtgccagaaaaatggaagagtatttgctaggtgaggaaaatgttacgaaattaaatgatcggacaggttatttatttattgagtacaagaagaaggaccatgatatctacatgacgacaggtattggtttgaaggcaaagcgtggaggagtcttgactaaatggtatttcgctttgatagataatcgccgaattgggcatgattttagtctttttgacgaggtgagtggggataagctacagccactttctaaaaggcaacttatcaatcgagtggagagcggcggagttgtgctagacacacaaagagaatatcaagagctggtcaaccaaagaatttttggttttgctacaatcagtgattttgataattgtataaatttgcttattcaactgagaagtccaaaattgtcaaaagagtttaatcctactgttattttcgggatattatctaattcattgccgacattaaaagaagatgatttacaaacgatttctaatacattggatcagattgattcgagtagaatgagattagagcagtttgaacgggagaaacaggcattagaaggcttaaatagtgtatataccgatttttatgatgaaaaattgcgtattattgcaaaaaaatggctagacagtatagagtatactaagataaagcgaatagagcttgagcaacatcaagccgagcatttaattttgaaagaaaaactactggatttagagtcagaagatcatgatttggatatgaacttggccgtttggcgagatgaaaatgaggaattgagtcatcacaaggattttcagttagttgctcaggggcaaaaaacaaaggaacatttagaaaaacagtctgaggtagtgaaaaagcttcatagccaattgaaagcaaaggagagttacatcaaggaaattaaaggccgtttgcaagaactggaagtggagcatgataatctggagaaagagaagcatgattatttggacgagatggttgatcatgccgagtctggcggatatgctatcaaacacttgctacatttagatagtagtaagcggcaggatgagaagttggtattgaatttttggagtgcggatattaaggcatatgtaagccatttacaagaagggatcgagcgtttaaaagaaattcatcgtgagcagatatattattcaaaattagatagtgagcttggtgaatacttggaaaaccgtgatttgcatcagaaaaatcagcttcattggcaacagacttacagagaagagcgtgaaaaactagcaacgaaattgcatgaatggaaaaatcagttgccattctttctagatgtagatgtttttaaaggcgtattacgtgatttagagggactatatgatgaagtgactatatttgaatttgcaatagagcctttgtaccgggctgtaaaattagaaatagaaagactggatagatcgttattgccacttgaagctgaaatgaacagtttggaagttgagataaagcatcaagagtcagagcgacaagcatggcaggagcaacgcgagcctgagccactaaggagcattgctagtactaagtttcgagaacagttagttgcgaatgcctctccattttatgattgtgtggattttagggaggagctttcggaggagcaacggaatagaatagagggcgcattattagacagtggaatactggatgcattagtgacggaggattttttagctttggaaggagatcggcaactgatccctgtcccgttaacgcctgataagaaggctttaacagagtatttagtggcggattgtgatgggctaagtcgacatagtgattatataacgcagattttacgttctatcgaggtctcggatgattgtaataatgacgtaggaacttggaggattagtacggaaggtaattatcagatgaacttactacgaggtgtaacggcgagtgattacaaggcgatgtatattgggaaggctagtcgggagcgttatcgagcagagcagataaataagattaataacgagttagatttattgaatggggaatatatgaatttaaaagaaaataaaatgatattagtgaagaaagtggaagacgcagagcaaatggtgaataacttaccaagagatgatgagttgaaaaccacgtatgaggagagtaagaaggaagggagaaacgtgcaggaatggaatgagaaattatctaaaaaacaggaagagatgagagaaaaaaagaaacatatggatagcttaaagtggggattaacccaatttacaacggaggatgatcttgagttgaatctagagagttacgagggtgcgtacaaggagatgatagattatcaagacgctttttctgactggaaggatcggttgacaggattacaatatgtgatggcaaaacaaaaagatcagcaacagcaactaagcattcaaagcgaggaaatggatgagaagcagctggaatctgatgaggctcaggattctcaggatcttttagaaaaacagtatgattctataatggcacgacaaaagttgagcaagttagatgatattaaagcccagattgggcaagttaagttgaacattcaagaaggtgagaagcgcaaaaaaatgataagtaggagcacgcttgagtctcatggacgtaaggttcaagttgagtctaagatagaacagttagctgggaaactggattttgatgttatatttgaacaactgttagcgagtacttttactcaggagtttaagcgttatcgggtagtgaataatgaattggagatggaggatgaggcaaaagggatgattcagggttgggagtataatgatagccatttatatcaatttgaaaggaaattagataaagtattttctgtatctgaaagtaatcttctagagtatcggccatccgtgaagagagctgttatcttgtctgaaccggattatttggaaacttatacggatgagagcgatatgtctatgattgaaaattggcgaacattaaaccaacaaaaaattctggaagtgaactcggaaggcgcttggattcatccgcagttgctgatagatcgtttgaattctcagattgaacaggccaatttgatactgcgagagagtgatgaggaactttttgagcagattatttttcattctgtaggcaaaataattagacagctcattcaaaaggcgcaacgatgggtgatacagatgaacgcaattttaaaggatcaggataattcgtctggactaacgttatcgattaattgggttccgaatactggtgatagtgatgatgagctatcgacgaaggaattagtgcgactgttgaagaaagatacttctattttaaaagagagtgacacggagttaatgaaaaggcatttccaggcaaaaatagcacacgcgaaaaaagaacagaaagaggaagatagcggggatagcctgtaccagattttgcaacaagtattggattatcggaagtggtttcaatttgaaatgaagtatcacagggtgaatgaaggagtgtctaagctaaataataatgagttcaataaatttagtggcggtgagaaggctatttgtatgtatctccctcttttcacggcggtatattcgagatatgaggatgcgagcgctaatgcaccctatattatttcgttagatgaggcttttgcagggattgatgaattaaatatcgcggaattatttaaggcgacggaacaattgggcttcaactacatcatgaattcgcaatctttacaaggagaatttgctactgtttccagtttgaatacgtatgagttaattcgaccaagaaatgccgcagtggtagggacattgcagtatcattgggatggatatacaaagaaacttattttgcctaaaaatggtgacgaggaactagtgcatgaatag

SEQ ID NO: 50930 - DNA, 1284 bp, Listeriaceae bacterium FSL A5-0209
atgaataggaatgagttatatgaagatgctattcattattttaataatcgtgtagctttaaaaatcttttttgaggaaatggagcggaaatataaatcttatggtcgctttcaaggaaatgtttcgaaaaagggatttcataatgttgatgtggagccgttgttgcagtttatggggatagatccttgggaatgggatgaggtgaaacatattaaaattgctactttcattaaacattatgagagtagtaagtttgaggaaatccctttaaaggatgttgtggaggcagttttagggcggagattggtgtcgaacaaagagaagcaagagcgtgaagaagagttgttgcaaatttttgtgagtacggtagagaatatttcatctgtctatctggaaatccctttaaaacctttttataagtggtatttaatagatggaattgattgtttgaacggtttttctcaagttaaggaagctttgggaaacatgccaaaagaatacacgaaactcccggtattcgcatatcagcagacagggaatccgcacgcttttgatagtactacgtacagaggtcagctattattggcggtactaggagtgttatcattaaataaagaacagatttatacgtcgcgagtagagagagaaaatgaaatatatgctggatttcacttgattaaagatgatattatgaattttgcagcgataaatggtttggttgcttttaagaagagcgaaccaatggcgatgtggcggagtgcgtgcgagagtaatagtccgtggaatgttcctgtgaggcaactaatcgagattaccacaatcaggccgaataaggggaagaaaattatactgatagaaaattcaggtgttttttcagtgttactagataaatttccagatctacctattatttgcacaaatggtcaatttcgatatgcgatttggctattgttagataggttagtgaatcatgatgttcaactgtattattcgggtgatttcgatcctgagggtattgagatggcatccaaattaaaaagtcgataccaagataaggtcttttttttagcgatggatgcagtagcttatttggagagcaaaccaagtgtgccactggatggagaccgttgtaagaaattgcgaaacgttattgttgtgaatgaattaaatgatgttaaagagaagatattagagctcgaattggcaggctatcaagagggaataattgagcgtatagctacagaaattaggcagaaattttataatgataaggggttattatga

SEQ ID NO: 50931 - DNA, 1482 bp, Listeria newyorkensis
atgaataatcaggacttttccaagttgagtgaagctacctatgtaacagcggaaaattacaagcgatatcggctaattatgaggtatttttatgaccaacatcgtagtatgaatgatttattgtatcgtggtgatattcttaaatttatgcaagaagatattaaattcccaaactaccaagaaaaagaattggatcaggatttaaatagtttgatttcgtgggggaatctcgagcaacgccaagaaatgagccaacctaaatccattgaggaatataaaaatcggcattttagatatcaaatttcggagacaagtgttgtgattgaagatatgctagaaaacatcgcaaacctacataaaggaactcgtggctcgctagataaaaatatatttgaacgattattagtttgccttacaagattagaaaaggaaacgccagaaggacaacaattgttggatatttgggaggacacggttacacattttagcagaattagcaagaatacgacagactatattggatatctaaatagtgaaaaatctgagcttcaaatgcagacggaagtttttttagtatatcgtgacaagtttattaattatttgagggattttattatcgccatgcaaaataaagcctatcaaatccaacatagttttgaaaacgtttcggaggcttgtttggagcgaatttttcaacagattttaaagaaggaaaaagaaatacctcgtttagaaatattgactatagatgaaaatcaaatcagaaaagaattttttgagaagtggaacaatatgaaatcatggtttattgatcaacctcataaggcgagtgaatatagtttattgttaaatcaaacgaaccatgccattcgaaaaatgacacacttgatgcagcggtttagtgatcaaatgcaacagtatcatagtcggaaaaaggattatatgctgttggcgaaatggtttttagattgtgaaaacttagatgaagcgaatgaattatcggcgtatttgtttgggtttgaaaagacgaagcattactatgtgaaaccgtgctcttctgataataaatatgaggatatgtgggaaatagatccgactattcatgaaacagtaccaagaataaggtcgtattcgaggaaaaccaagtctgattcatttgagagaaagcaagccgaaaaagacgagttgcgaaataagcatttgcgggagaataagcaactagaaaacgggatattaagttacattaaagataataaaattgatttgaaagatgtgggatttgtagaaaaagatgtgcgaaaaattctattaaagtggctaagtctatctttccaaaaagaggataatatcattcaaacggaatttaatatgtccattaaaataacggtggatacggctgaaataataacactttgctcggaagatggcgaactaacaatgcctagggtagtatacaatatcctgaaaaaggagataagttaa

SEQ ID NO: 50932 - DNA, 1185 bp, Listeria newyorkensis; identical to SEQ ID NO: 50928

SEQ ID NO: 50933 - DNA, 4128 bp, Listeria newyorkensis; identical to SEQ ID NO: 50929

SEQ ID NO: 50934 - DNA, 1284 bp, Listeria newyorkensis; identical to SEQ ID NO: 50930

SEQ ID NO: 50935 - DNA, 1482 bp, Clostridium novyi A str. 4552
atgtttttagagagtaaattaaaaaaagaaataaaggaaactagatatttatctgtagataatacatggagatatagggcaataatacgaataatgtttagaaattatgaaaagatgaatttttggcttttaaaagaacagatttatgaaaagcttaaggaatatgaagactttaaagaatatgatatagaaagtttaagtcaagatttagaggcattagttaattggggaaatttacttacgatgtatgatgtaagaaagatgaaaacaatagatgaatttaaaaacaaacaatacaagtatcaagtttctccatatacagttgaaatagagaggatgttaattaaacttgaagcgctgaaggaagaaactggaggttcactagaatctaccttagttgaacgatttaaagaagaacttaataaaatagattttatagtttctgaagaaagtaacaagatttataattggtggaaaatgataaatagagattttaaaacacttaatgaaaattatcaagattatataggaaagttttattcaccaaagcatgaagaaattatgaagactacgcaatttttaatttttaaagaaagttttataggatatttaagagattttataaaagaattacaagtaaatgcaaattcaattagaaattttttaaatacgttggatatagatattgtaaaaacaataattgaaaaaagtttagagtatgaaaagtctcttccaagatttgaggataagataaatgaagaggattatatagaaaagaatatggggagattttatagcataaaggcgtggtttttaggtaatggagctgaaaagtctatggtagatcaattgttggatagtactagtgagataataagaaaaattactagatatgctgttcaacttgcagaaatgaaacacataagtggtaacaggaaagaagaatacaaaaaaattgcagaaattttttctaagtgtgaatctatagaagaggcacataaactttcatcaacggtttttggcgtgtttaagccaagacatattaagggaaatccaattagaaaaacagaaagtataaatagcagtatttatgatgaagaacctcatggtattacagtaaagccaagaataagagcgtatagggaaaaaacagctagcagaaccatagtaaaggataatagtgaaaaaaagaagataaaaagggaaagaataatcgctaagagagaagaagaaaaggtactagcagaaagtttaattaaagatggaaagattgattttaaaaacctgggaattatatctaaaaatcaaagaagtattattttaagatggttgtccaagggaagaaacaataagtttggaatgggaaaaacagagtatggaaaagagtatcaagttgtggtgactaagaaagatgaatatataacattagtatgtgatgatggtaaatttaaaatgccaaattacagcattatatttaaatag

SEQ ID NO: 50936 - DNA, 1131 bp, Clostridium novyi A str. 4552
ttgaaggaattgttagcattactagaaaattatattattttgagagaagaaaatagagaattatattatgcgataaaagataaacataaagaatttaaagattttttaagtgaaaagttaggatatagcattattattaaagaagattttataaaacttgaaaaggtatatggaaaggcagaaagctggatgggtatacctggttttactgaaatcagagaatatatattttttatattacttttaatgtacttagaagataaaaataaggaagaacaattcatactgtcttttataacagagtatatttcaaattattatccaaatgcaaaaatagattggactcaatatagaaataggaaagctttaattaaggttataaaaattgcactttcattgggaataatgaaaaataatgatggaaatgaagatgatttttcaagtaatgagagtgctgatgtattgtatgaaagcacaggtatttcaaaatatatagtgagaaatttccctaatgatattataaagtgtaacacctttaatgaacttatcaaatttaactgggatggaatagaagaagacagaggattattaagaagaaatagagtttatagaagattattattatcaccagtggtttataatgaaggaaattacgatagtgactacgagtatataaagaagtttagaagtagtatccaagataattttgaaaaaaatttaggatggagcatacatgtacataaaaatggtgcaatggtagttttagatgatgataataagataggagatatattcccaagtatgaagggtgaaagtgaagctatattgctacttggtacattaataagagaaaaattagatgaaggttcaattttgcttaattcaagtgatgaaattattttaaacagaaaagattttaataagctgttagtagagttgagagaaaaaaaaggaagtggatttaaaaaggaactaagggactgtaaagaggagtattttatagaaacattattaaattatatgaaatcttttttaatggcagaagaaaaagatggtgatatagtattgttatctgtaataggcaaggtagtaggaaattatcctaaagattatgtaattaaagatatgtaa

SEQ ID NO: 50937 - DNA, 4086 bp, Clostridium novyi A str. 4552
atgagtgaaagatggattgcaaataaatttggactttttaatttttggtattatgatgaagaggaatttcaacttttaaatgggaaaattcttttaaggggaagcaatggaagtggaaaatcggtaacaactcaaagttttattccgttattgctagatggaaacaagtcacctagtagattagatccatttggatcaacagctagaagaatggaaaattatcttcttcacgatgaacatgaagatagaatagggtatttatatatagaatttaaaaaacctaaaagtggattatatattactataggcataggaattagggctaaaaagtacaaacaaatggattcgtggtactttattttaaaggatggtagaagaataaataaagattttaagttgtataaaaagataggggaaaaatatccgttaactaagcagcaatttaaaaacattttaggggaaggaaatgtttttacagagtctcaaaaagaatatatgaataaggtaaatgaacatttatttggttttagtgatattgaaaattatgaagaacttttaaaacttttaattgaaataagaagtccgaaactttctaaggagtttaagccaactaagatatataatatattaaacaattctcaaaagactttatcagaagatgatttaagacctatggcagaagctatggataatatggatactttaaatatgagacttatgactttaggtaagagtttaaaggcagcagaaggacttagaaaaagttatgataattataataagtacatacttttttctaagtcaaaggattatttagaaagagaatcttatatacgggacttgagtaatcaaagaaaagagttgctacatgatattgatgaattaaaaaataaacaagaacttatgaaaacagaagtaggtttattagaagatagttataataaagcaaaagttcaatatgagaagcttatgcaaaatgatatatttagtacaaaaaatgaacttgaaaatttaaagatagagatagatgctggaacagaacaagttgctaaattaaaggagaatctacacaaaaaaaatcaagagattaaagaaagagagaacattttacaagacacaaaaaatgaacaagagtacttaaagcgaagtatattgtttgaattagataatcttaaaagttatggagaagaatttagttttgaagaagataaatttttaaaaagcgaacttcttagagatatagtagcatatgattttacgtttataaaaaatagtttagataaagaggaaaagagtttaagtttaggattaaaagctataaaggaatatgaaaaggtacaggaaaaaaaagaaaaatgtgagttacataaggataaaacatataaaattatagaagggttagagagtcagttaaaagaaagttatgagtattttactcagattaaagaggagtatatggaaaaaataaacatatacaataaaaataataatgaatttaagttaagtgaaaaagaacttcaagaattatttaaagtaattaacaaagtagaatgtatagatgatttaggagacataaagcctttaatagtggatatatattctaatttaagaggaacattgttattaaataagcaaaagctaaatgaggatataaaagttaaaaaagaagaaattaaagagcttgaagacaatataagagaattaaaagagcaaaagcaatctgaatttattttagatgaaatggtggagaagagtagaaaagttcttacagattataagataccatttatatctttttataaggcatttgactttaaacaagattcggaagatgaacaaaaaaggttcattgaaaatgcattaattgatatgggaattatagatgcattgatagtacctaaagagtatggaaataaggtaaatgatttaatattaaaggataagtatttatgtgttgataactattcacttaagaatgtaaaagatcaaagtaatttatcttcttttttaaagttagaaaaaggagaatttgttgaaacatataaaaatgaacttgaagagattttacaaagtatatcaataaaggatgacaaagatacatatataatcagtaatggtgaatatagtattggagttataaagggaaaaacttcgtccaaagatgaggtaaagtatataggggaagaaagtagaagaaaatatagggaatatttaatagaaaagaagtttgaggaagttaataaaataaaaatagagattacctcaatagaagaaagtttaaactatttacaggataaattaggaaatttacaaagagaatacgaagcatttccatccaaagaagatttaaaagtaaatttagagataatagaggaaaaagaatatcaattaaaaagatttaacaatgacctagttgatattaaggaacaagaatttcaaataaataaagaaatagtaaaacttaaaaagaatgtttttgaaagaactagtaatatagatatacaaaaagattcaaagtcttttgaagatgcattagatgcattacgtgactatgaaaaaacgttaattagcttagaaattattatagaaaaatttaaaaattataattacacaattcaggcgatgtgtgagcaaatagaatatattagagagtatgcagataatatattgcaaagtttagctgatttaaatatcaaattacatgaaaaaatcaataagtcaaatggactaagagaggttcttgtgaaaagtaatttgaaagagatagaaaaggctatagaagaatcaaaaagcatagtagatacttatcctaagagaattacagatggatcaaatgaagtaactcgtataacaagtaatatacaagttaaccttgagaaggaagaaaaattaaagaataaaattcaaagaggaaaagagttatttgaaatagtagagcaaagtcttataggtgagttacaacttaattatgtagatgtatctatagaagatgatttaagtaaaaaagctaaatatgtgattaataattataagttggataaaaataaggacaaaaatacttatgcaagagaattgtttgagagtgtacaaagatatgaaggagatttaaggggatataacttaaagaatatagagatatttgtaccaaaggaaacaatagaagacgaagaaaaaagaattctttatatgaatgcaaaacgatttgaaatagtatttaaattcaatggaacggtgtcactttataatttaatacagctattaaaggaagcaattgaagaacaaaagctatttattagtgaaaaggaaagacagatatttgaggaaactttaataaatacaataagtacaaaaataacagcaaagatttatcaaacaaaggtttgggtagagcaaatggataatctaatgaagtccatgaatacatcaagtggattaaaatttagtttaaagtgggtgcctagaaaatctaatagtgagaatgaacttgacattgtaagtcttgttaatatattacaacgaggtgctatagtaggtgacgaagatattcaaaagttatcaaaacatttcaaggaaaagcttatagtacaaaaaagggaaattgaggctagtgatgaagttgtaaattatcaaagtataataaaaaatattttggattatagacagtggtatgagtttagactttacttttcaaagccattagaaggaaaaaaagaacttacagataatgaattttttaagttttctggtggagagaaggcaatggctatgtatgttccattgtttgcagctataaatgcaaagtataatggtgcagataaaaaagattgtcctagaataatagcgttagatgaggcttttgcaggtgtagatgaaaataatataagtgatatgttcaaactattagaaaaaatgaacctagactatgtattaaattctcaagttttatggggagattatgatacagtaaaggaacttgctatttgtgaattaacaagagatagtgaagacgatataattgtagtagaaagatttcagtggaatggaaaggaaaaagttgtagtttttgaaggtgaggatattgagtaa

SEQ ID NO: 50938 - DNA, 1302 bp, Clostridium novyi A str. 4552
ttgagtaaggaaatagaggcattaaaattttttagagacaaaaaggaatatcatagaatacttattgagatatttaaaaagtataagagtttaggaaaacttagtggtacatttaaattgaaaaatctaacaaaagaggagcaaatgatacttgctcctcttaaccataaatattttgtggctagagaagcgaatgtatctataaaaaagtttattgaatatttttgtagtggaaagtttgagcaaatagattttacaaaggttttatcaatgtattttaaagatgatttaataacctataaagaagaaaaaatgcaaaatagaacgaaaaaagaagacttctttcatgagcttatatataacaataggggtacaaatgcagagaactggattagagaaatgatatcaaaaaaaaattatggatacaacattataaatactaattatggagtttacgaaaagaatgataaaatttgtgatttaaaagttattttagataatgtttttagaggatttaatttgttaaaattccaaactaattatattgaaagcttacctatattttcttcaaaagttactagaaaccctcattattttgatataaatactatgccatcaaagattttaatacatggaatttgctatgagttaaaaagagagtatcctaaaaatgcagaagaaattgcagaaatcttgtataatgctggtatattaagagatgaagtatctaattttgtagtaacttttggacttaaagcttataaagaagatatggagttagactttataaagagtttcacagagtttcaacaaccactaattttgacattaggaaatttaaataagattgataaatttacttgtaataaagataaattatttatttttgaaaatccatcattatttagtgaagttataaaaaagacaattgatttaaaaccgtctattatatgtacaagtggtcagctaaaacttgcatcattagtattgttagataaaataattaaaaatgtagaagaaatctattactcaggtgattttgatccagaaggaatatttatagctaacaagttaaggatgagatataaaaataagctaaagttttggagatttagagtggaagattacattaagagtgtttcgcataaagagataccatatagcagaatgactatattagataatattaaagatagagatattaaagaattgatagaaaaaattaaagaaaaggggttggcaggatatcaagaacttttaattaaagattatgtaaaggatattagaaatataataggatag

SEQ ID NO: 50939 - DNA, 1599 bp, Knoellia aerolata DSM 18566
atggccgtcatgtcccagccgtccggaaccgcgcccgtcgatcgcgtcaggctcgaggcgctgcggtatgccgtcaacgacgaggccgttcagtacgttgccatcatgcggcagttcacctcgggtctgtccggtctgctctccgaccagtcggcagccgaggtgacgacccggctgtccgaggacggcatcgagctcgacgacgacaccgtcgaggcccgcctgtcctacctcgtcgagcacggcaacctggcgcgcagcccccgcgagaccgaggcccggagcctggccgactacctgcgcaaccgggcccgctaccagctcacccagcgtggtgagctcgtccaccgacaggtggaggagctgctcggtcactcggagtcggcgcgagaggtgagcagcgagatgctcggcggcatcctggcgggtctgacgactctcagccgccacgaccgtgactcgatcgggcgcgcagaccccgaggcgctcgcccgcgacatcggcaccgtcttcgcccagttcgaccggctcgtccacagcacccgcgagttctacgcctacctcacgcaggtgctcacccgctacgacctcgaccgcgacgagttccaggcgttcaagaccgccctcgtcgactacctccagcgattcgtcgacgaggtgcagcggcacatgccccagatcgccgacacgtatgcgtcggttgcgccgctcatccccgccctgtgcgagcgagccaactccggccagaggctcctcgacctcgacggcaccaccgcccgccgcgcgaccggcctgtcacccgaggactggccgagcctgcacgcgtggttcgccggtggtggtggacgcagcagtgacgccgacgtcgtgcgccagctcgcgacgcaggccatgcggtcgctgctcgccaacctgcgccggatcgccagcagcgccgatcgcgagcacggccgctacgccgacctcgtgcgactggcggggtggttcgacacctccgccgacgacgctgcgcacgccctgtgggcgacggccttcggtctccacccctgccggcacctgtccttcgtcgccgacgaccccgagcgccccgtgtcgccgacaacgtcgtggtgggtggctccttctgccgaggtgccactcatgctgcgacgctcgggcctgcgcagcgtccacggccgaccgtcacgcaccgtggactactcggcggcgaaggcagcacgggtgtccgagcgcgcggagtccgagcgtggtcgcgccgctgctctggccgagctcgcgagcctgcggggccgcatcgacggcgtgcgactcagcgaggcggcacgcaccgagctgctcgaggtgtatgccgcgtgcctggcccaggggggcggctcgccgagcgctcaggggccgttgaccgcgccgatcccgcactccgaccacgagctcgtcatcgaggacgcaccgggggagcggtcggtgctgcacgggccgagtggtcgcctcgagttcgtcgaccgggccctctccgtgcgtcgcgtcggggaggcatcgggcgaagcatctggcgcgcccactgctgcacgcgaggtcagtcgcgtcgggggcgcttcgtga

SEQ ID NO: 50940 - DNA, 1224 bp, Knoellia aerolata DSM 18566
gtgacacccacgaccgtcgagcgtccgcgtctcgccgacgaccccatcgaggtggctcagcgggtcgaagccgccagacagctgctcctccatcccttgatggccgccaccgaggcgaaccgctcgaccctgcgactcatccggcgtcaccaggccgagctcacccgccttttcgccgacggcgccggctaccggctgcacgtcgaccccaacggcgcccgactcttcaaggccgggctcggccgcgactccacgcgaccgctgcggcggcgctcgggtaccccgttcacccctcgggcctatgcgctcctcgcccttgtcctcgccgcgctgacccgttccaagtcccagctgctcgtcgacgagctcgtggcccaagttcgctcaacggcggtcgacgccgggatcgacctcgacctcgacggcatcaccgaccgccgggccctcaacgccgccctgctcgcgctcgtcgacctcgggatcctcgtcgagcgcgacggcgacctcgaccactgggccgagaagcgcacccagtcgctcctcgacgtccggcgtgagctgctcagcctcatggtggcggcacccctgtcgtcagcgacgagcgcaggagacctactcgaccgagcagcccttccctcggccgtcggcggtgcccggatcgccgtgcgcagacgactgctggagtcgcccatcctcaccgtcgacgacctcaccgaggatcagtcggagtggtggcgacgcaaccgcaaccgtgagagcgaatggttccgcgaccacttcggactggaggtcgagctgcgtgccgagggtgccctggccgtcgaccccgacgacgagctgaccgacgtgtccttcccggggcgtggctcgaccaggcatctggccctgctcgtcctcgaggcgctcaccgagcaggcacccgcggtgacgtcacccggcaaggcctggcacggcatacccatcgacagtgcacgcgtgatggcgcgcgggatcgtgagccggtgggccgaggtcctgcgacgcgaccagcgcgaggcgccggacgccgcggtcgacgaggccttcgcactgctcgagtcgatgggcctcctgcgccgcagcgacgatccgagatcgatggaggtgcacgcggcggcgtcccgctacgcgcccgcgcccgtcatcgtcgagaagtccagcacgggagagctctccctcttcgacacccaggacgaggacgactga

SEQ ID NO: 50941 - DNA, 4110 bp, Knoellia aerolata DSM 18566
atgactgatccgaaccggttccggttggcccgcggcggcgtcgtcaacgtgtggcagtacgaccggcaggtcttcgacttcgccgacggtcggctgctgctgcgcggtgccaacggcgcgggcaagtccaaaacgatggagatgctgctcccgttcgccatcgacggcgacaagacccggctcaccgcctcgggtcgccaccacacgagccttctctggctgctcctcgacggctacgacgggcaggcgcgcaccggctacgtgtgggtggagttctcgcggatccgtgaggatgggaaacccgagtccgtgacctgcggagtgggtctgcgggcgacgcagtcggcgcgcgccgcaacggcgtggttcttcatctcgcccctgagggtcggcgacggactcgagctcgaaggtgagagcgggcccctcagcaaggcgcagctcgaggccgccgtcacggccgacggccgcgggcacgtcttcgactcggcggtgcgctaccgcgagcacgtcggccaggccctgttcggtctggccagtgaccagtacgacgacctcctgcgcctcatctactggctgcgccagccccaggtcggcgaggacatcgaccccaagcggctggccgagcagctcgtcaacgcgctgccgcagctcgacgacaccgcgctgcgggcggcgggtgacaccttcgacgagctcgaggcgttcggagaggagatcgagcgccgctcccgtgccgcgtcggcgctgacgggcttcgtcgacacgtatgccggctacgcacgtgccgctgtcgccgaccgggccgcgcgagtcgtggacgctgccgaccaggtccgaagggtgaacactttgctgcgtaatgcgcggcgagagggcagcgaggtcagtgacgcgcttaccgtcgcggaggccgagctgacccgggctgagcaggccggcgctgctgcccgcaacgagatcggtgcgctcgagagcgggccggaagcacgctcccgtctgcgcctgctcgagatgggcaagcgcgtcgaggaacgcgcggccgccgcggaggtcgccgtgcggcgccgcgacgatgcgcagcacagggcccggcgctccgcggactccgcggccgaggacggcaacgccgtggcgcgcgggtcgggggagatggcggcggcggtgatcgagcacgtcggcaccctcggaacggccggggtggccgtcgacaccacgatccactcggtcgctgcgacgttggcggacgggcgcggctcgctgacgtgggaggactccgcggcaggggcgcccctcgccgccgggctggagcgggtgctgggctggctccgcgagacgcagaccgcggtcggccaacgtcaggctgcggttcgggtcgtgcgcgagggactgcgagaagccgacgaggcgcggcaggacgccgagcggagcaccacgatcgaggagctggcccagtcgcgtgccgatgccgcgagggagtcggtcgaggaggcggtcggcgagcgggacggcgtcgaggaggcactgctccatgccctgtccacgtggcagcaggcccccgtcgcggaggccttcaccctccccctgctcgacctcgaggggcttggccgactcgagggtctggctcgggcggcggtggcggggcgcgtggatgcgctctccctgactcgcggccgggccgtgactcgggcggcagaagccacccagctcatcgcgactctcgagcgtcagcgtgccgaggtcgaggcgcagaccgacccccagccggctgcgccgggcttcgtgcgcgagcgaagcggcgaggagtcgggggcgcccttctggcagctcgtggacttccgcgccgacgtgtcggctggggatcgggccggtgtcgaagcggcgctggagggcgcgggccttctcgacgcctgggtcacgcccgacggtgtcgtcgacggggatcggctcgacgttcacgcgttcgccggtgcggaggacgggcaggctaggccgtgggcgcaggactcagtgaccctggcctcagtgctccagccggaccgtggcgggaacgacgcgctggcggtggcgtccgacgtcgtcgagcgggtcctgacggcggtgcgggtctccgagccgggtgacggtgcggtacacgtggctggcctcgcggtcggacgcgacggccagtggcgatcggggccggtgcacggccgcaccaccaaggacaccgcccagttcatcggcgcgacggcacgcgctgccgagcgcgcccgtcggctcgccgttctcggcgaggagatccgggccaccgtcgccgtcgtcgacgcggcggaggccgagtccgccgcggctgctgcagccctcggtgaggtcgaacgctggctgggtgcccgcccaccccacgacgaggtggtgcgggcctgggcgaccgtcgatcatcggcgcgaggtgctgcaccgcgcagaggtcgagcaggtcgaggcgacccgccacgcacatgacgcgcgtgcgctcgcggcgaaacggcatacccagctggtcgccctgagcgagaggcatgatgtccccgccacgtgggaggggctcgatgcactcaccgagcgtctggaccgcgcggcgcgcgacctcgaaggccgcggccgcgacgttcgcgccgtcagggacggcctcgggcgttggctcagggcagctgcgctcgcgcgcgaggacgcagcggcggtgacgcacgagagcgacgtggccacggcagcggagggcgaggcccgggacctggccggtcagcacctggcgcttctggacgccgagggcgcgtcggtgcgcgagctcgagagcaagctcgaggcggcgcggcaggcggagaaggacgccctggcccgggcgaaggagaaccggaacgatcgtgacggcctcatcggtcgtcaggccaccctggtcgagcgggcggagtcgctgcaacaccgactggacgaggtggagccggcactcgaccgggcccgggcggcgctggggcagctcgacgggctgcccggcgtcgtggcagccacggccgagcccggcgatgtcgacgatgctgaccacgccgacgatgcagagtccgcggggctggtgctgggcgcactcgacgacgttcggctgcgcgagctggcggggcgatggtcctccggtggcgccgtggaggcacgcaccaacgcggtgctgcaggcggtcagtgcactgcaggcaggggacgcggcgatccacgaaccgcgcgtcgtcgaccacgagggtgtgctcgtggccctcgggcgagacgaagccggcgagcactcagtggcggccctggcgcggcgcctcaccgctgccgtcactcgcgaccgtgacctgctcagcgagcgggaacgcaaggtcttcgaggaccatgtgctcgggcagctcggcgacgccctgcgccacgtgcggatgcgtgccgacgagctggtccagagcatgaacgagcagctgcgtgacgtcacgacgtcgcaggggatcaaggtgcggctgcgctggaagcagcgcgacgacctcccagccgaggccggacgcacactgacgctgctcgggtctcccctcggtgccctgctcccgggggagagggcccagctccaggagagcctgcaccgtctcatctccgtgtcccgcgcggagtcgccggaggagccgtacgccgtgcaccttgctcgagccttggactaccggcagtggaaccggttctccgtccagtaccaccggccggaggccggtgactggcgcaacctcgagcgccgcacggcgctgtcccagggcgagcagaaggtgctctgctacctgccgctcttcgccgcggccgccgcacacttcacgtccgttgcgggtgctgcgccgcacgcaccacgcttcatcctgctcgacgacgccttccccaagatcgacgtgcggacccatccgctgctgttcgggttgctcgtcgacctcgacctcgacttcgtcatcacgagtgaacgcctgtgggggacgcactcgacagtgccgcagctggccatctatgaggccctgcggagtcccggcgatcgggggatcgcgcagtaccagcatcgctgggacgggcgtcagctcactgccgtgggtgcgtga

SEQ ID NO: 50942 - DNA, 1170 bp, Knoellia aerolata DSM 18566
gtgacggacctcgaccgacgcgaacggcacgcggtgggcgacctgctggggcgaacggtggccgcgtcgcaggtgacggtggacctcgccgagctcgacgagcggatgcgcctgcgcgccggggtggggatcgtcgaggccgccgagaccgtcgtggggcgggcactcgtcgaccggcgggcccgggcggcgcggctggcagagcgacgggccgaaccggcggaggccgcgcgatgctgggtcgaggaccaccgggacgtcgactggccgtggctcgagaagtggttggtggcgatgcgctcggacggggtgctcggccgggagccgcaccccgcggctctcgtgaccgcggccctcgaggtgttggaccaccgtcgggccttcctcccacagggagaggcggggtcctcgggtgctcgggaggtggccgctccggtggcccgttcggcgctcgcggctgccgtctgccatgacgcccatgccctcgacgacgatcgccgcctggccagcgccgtccttcgagcggtcgcatcagcaactggatccgtgccacccaccgatgcgcgcgaccggcgcgagctctgggaccgcctcggcgtcgtgaccgatctcgtgtcgtcgacctgcttggtctgggggctggccgtggaggtcggcgggaaacggggcggtcctcggcctctcgacacagcgaagcccacgcacgtgacgtggtgggacgtgaagtccgggatgcgggtctcgccggcgggcagagtcctggtctgcgagaacccgagcgttctcgaggcgatcgccacggccgagctggacgttgccgtcatctgcacgagcgggcgaccgaacctcgtgactgcgcaggtgctcgcgcacgtcgccgagtcgacggcaccgatgatctaccacggcgacttcgactggccggggctcgcgatggccaccgacgccctgcgtcggtacggcgcgcagccctggctgatgggggccgaggactaccagggcgtgcccggatccctgtcgctcaagggttcgccggtcgagtcaccatgggaccccgagctggccgctgcgatgcggcggcgggacgtggccgttcacgaggaggccgtcctggatcgcatcctcgccgagctgcgcaccggctggcggacggcatacggaaaggcctga

SEQ ID NO: 50943 - DNA, 1491 bp, Bacillus coagulans P38
atggatcagatcatgaagaaagttgtcgaagcgagttatctgacggcggattcggccgcccaataccgtgtgattttgcgcttcttttatcgacaacatgaaaggatgcgcgactttattgcaccggaggaagtgctcgaatatctgcgttcgctcccggccttccaggattatgcggaagaacagctgcaccagcagttggcccagcttgtgaaatggaataatctggttgctcgccaggatatgaccaatgccaaaacaatcgaagaatataagaaaaaaagattccgctaccagtgcacaccttacacggtagaaatcgagcggatgctgatccagcttgaaaaattgggagaccagttccaaggatcgctcgaacgttcgcaatttgaccgcctactcgcctctttggaaaaactggaagaggaactggaacatccattgaataaacctgcagccgattacatgcatatttgggatgacatttttcactttttcgggaccatccggacgaatacggcggattacatcgcttatatcaacagcgaaaagacgtcacaacggatgcagacggaagcctttctcgtatataaaaaccaatttacggcttatttgcgtgattttatcgtatcgttgcaaaaaacttccctgcaaatcaggggaagactgcgtgaactggatgggcaaagattggcaccgttttttgaaaaactcgtggaacacaggcgccaaattccgcgattggaagatacggcagcttccgaacaagaatggctggaagagttccacgaatactgggggtctttgcggcggtggtttcttgggggcagctcttcccaaagtgaattggaaatgttgcagatgcaaacaaatgagatgatccggagaatggcccgttatgtacaacggatcagtgaacgccagcaacatttccggagccggaaaaaagattatttgcatctggccaaatggtttgccgaatgccgcaatcttgaagaggcccatcaattgtcatcgatcgtgttcggggcgatgacagtaaggcatttgcatctggaggaagcgacaacggacaatcttcatgccgagacatgggaagaacagccggagatgcggcaaatcaagccgcgaacgaaccggtaccgcgagaaaacaaagccgggcgctttccgatctaatcatgaacagaaagaaaaacagcggctcgcctatttaaaagagcgcgaacaggaaaaacagctgattgaaaaatacatgaaaaacggagagattcgccttgcagaaattggaaccgtagaaccgtttgtccggaaagtgctgctcggctggattggaaaatcaatggcagcgaaaaaccatgaggtaaaaacggattacgggatgaccgtaaaagttgcgatgaatccggatcatctcatcacactcgatgcagaagacgggaaactgatcatgccggatgtcgtatttgaacgatcaggaggagagcgctga

SEQ ID NO: 50944 - DNA, 1164 bp, Bacillus coagulans P38
atggatccgttacaaatttttgatgaaaaagcggtgcagggaatggacttgttattccatcattattggattttgcggtccgagcacccggactggtaccagctcatccgcgaacgcgaaaaagtgctgcgccgttacatcagcgagaaatttggccttaggctgatcatccatcagcattttatcaagctcgaaaaaatcccagtggaaccggaaagctggatgggcatcctgcattttcaggagccgatggattatgcaattttttgctgtgcgctctcctttttggaaggaaaagcggtggatgaacagtttctcttgtcggaaatgtgccaggaaatccaaaacaattatcctgtagaagatgagctggactggacgctttatcttcatcggaagtcgctcatccgggcagtccaagctctgatggaattcagtctgattcgcacaatagacggcgatatttctaggttcgacacttacgaagaccaggaagtcctatatgaagcgaccgtttacagccgctattttctaagaagctttccggatgattttacaagttatccggactggaccgggctccttgaagaagactggaaacaaaatcaggaagatgaacggcgtaagcgggtgtatcggaaattgtttttctcacctggcctgcaccggaaagatatgcaggaccctgattttctttatatccgcaatttccgcaaccggcttttggaggacattgaagaacacagccattataaactccatgttttcaaaaacactgcatttttatctgccgcagaaccgcggagttaccatcatgtttacccgaatgcaaaaggttccacggatctgatgctgcagttgtctaagacgctacacgaccatccggaaaaatatgtccccaatgaagcgggggaaattttgcttacggcaggcgagttggaagcggtgatagacgatatgcgcacccgccttgaacgcgggtggtcgaaacattttcgagatgccggtacaaaagcggtatgtgcggaattgctcgaaatgatgaaagaatggatgatggcggaaacggatgaagcagcgggactgatccggataaaaccgctgttgggcgtgcttgcaggcgagtatccggctgattttgagaaaggggatgaggaaccgtga

SEQ ID NO: 50945 - DNA, 4095 bp, Bacillus coagulans P38
atgaaccgcgccggcttgttaaatttttggtattatgacgatgaagtttttgaatttgcagacggaaagctgttgttgcgcggcacaaacggttcagggaaatcggtgacgatgcaaagcattttgccggttttgctggatgggaaaaagacgcctgatcggcttgatccattcggctcaaaagcaaggaaaatggaagattatctgcttggggaaaaagaagtgtccggccatgacgagcggaccggctacttgtttctggaatatcgaaagcaagggacaaagcagtatatcacaacggggatcggcatgcaggcaaagcggcacaaaactttaaaatcatggtattttgtcctgactgacaaccgcaggatcggctacaattttgaattgacacacacccgccaatcggaacggattccgttgtctgcaaaagagcttgaaaaccgaatcgggtctggggggcatcttgtccattcgcagaaagaatatatggaactggtgaacaaatatatttttggtttccagtcgatggaagcttttgaagatttgatcaagcttttgattcagctcagaagcccgaaattgtcaaaagatttcaagccgacggtcatctatgaaattctcgagtctgcgttaccacctttgacagatgacgagcttcgccatttgtccgacacgattgaaagcatggacgaaacggagcagcagcttgaacagcttgaaagagagcacgaatcggcaaaaaaactggtgcgccaatacgatctttacaatcaatatattttggcagaacgcgcccaaaaatggcaggaggccgaaagcaggctgcaggaagcaaagcaggaggccggtacgttagcagttcgctgtgaatccctgcgcggagtgattgaaaacctgacagaagatcaaaaacagaacgaacagaaacgcgacgttttaaaagcggaacaggaacggctgcagcaccatgaggtatggcgccttgaaaaagaaaaaggagagcaacaggccaggtctgaaaagctaaaaagtgaagcagcagatctggagaaaaagtgggaattaaagaaaagccagcttttaaacatccgcttggaacaggaccggttggaaacagaaaacagcaaggatgaagccagcatgcaggagacgctggatgaacttgcactggatgccggagaagcggctttcccccagcacgagatcaatgccggagacttttctcggcatgaaggggaagcttttgatttttctgtttggaaacaggaaatcaaacagcacagcggacttttgcaaaagttgcagcaactggccggagaagcggagcggcttcacgagatgcatatgaaattgcagcgccagtcatctgccaaaaagcaggaaattgacgaactccgtaaacaacttgaccatttggagaactggtttaccgaacaaaaacaagaactggaagatgccgtgtttttatggattgaacagcatccggccctcccctttacagacgaacgactccggcgcattgccggcgcgctggacgggctctatgaagaaaaccgttatgaagcggtcagggaagaaattgtgaaggcggcaaacgattatattttgcaagtgcagaaggaaatttcccgcgcggagcaggcgcaaaaggcaaaagaacaggaattggctgaagccgaagaaacacttatgtattggaaaaacttgaaacttgccaatccggagcgccctcaggatacggaagctttccgcgccggtctcgatggagcagggaaacgctatctccccttttatgccgcggtggaattccaggatcatgtgaccgaagcccaaaaagccagaattgaagcggcactccggcagacgggaattttggacagcctgattacggaagaaccggttacacctgtgcacgaccgggttatccgtccaaatccgcacattctcggctacacacttgccgattacttaaagccggatccggataatgacagcccggtatcagccgcacgcattgacgaagtgttgcgcagcattccgcttgaaccgtcggacagcggctttcacattgatgcggatggctctttttcagtcggctgccttgttggccatgctccggatgaaggaccttccaaattcatcggcagaacatcccggaaacggtaccagcaggaaaaaataaaagaaacagagcaaacgattgctgaaatccgcctagcccttttgcaaatcgaaaaccgcctttcggaatgggctaggaaagtacaagaagcagaagattggaaagcgggcattccagatgacaaagatttacgcgaccttgaagaacagattgaaaaaacagcgcgcagcctgaaacaggaacaggaatttctgacagaaattgaccgcgattggaaacaagtataccagcatttgcaaaacatccggctacagctgcatgagcaaggagccggcttgaaccttgtccttcaaagtggtccgctcgatgaagcactagcagctgcgaaaagttatgaagaacatcttcacagcctggagctcatttttcaacgtttgttttccgggcgcaaaatgcttgcgcgtcttgctgcggatatccttgaaaaagagcaggaactcgatgaaattcgcggtgaagagaacatccgccggtcagaatgggagaaaacggtggcaaatattgaagcgattgagcagcagctgaaattgcaggggattgatgaggttcgcgcccggattcaggcagtccaacacgaatataccagtacggaggaaaaaatcagggagatctacgaagaaaagccgaaaaaagaagcagaactagaaaaatgcaccaccaatttgtctcttgccaaaacgcgtaccacgttttggacaaatatggcggcggaatgggagaaactcgtaaaagcagaactttccctcggcttcgtggagagcgagcacacagaaccggaaagcattttgacggcgttttctggtgtgctggaaaagtatgaccgcgcaaaattaaatgaaaacttgacaaaagtttttttcaacgaacagtcaaatttaacagaataccgcatgtctgagtttacaaaagaagcggacccgccggattggttcgctgaaaaactcgatgactattacgaaacgttcaaaaaggaatgggaaggcttgcggggccgccgcctcatccagatggaataccgcggccgcagggtgagcccgtatacggtactcgagtctcttgaaaaagaacttttaaacttgcaaagttatttggatgagcaggacagaaggctgtacgaagatattatcgtcaatacggttggcgtcattttgcggaaccggatccagcgggcagccaagtgggtaaaagaaatggatgcgatcatgagaaaccgggataattcgtccggacttactttttcgattgcctggaaggaaaaaacggcggagtccgaggatgagctcgatacaaaagatcttgtcgcgttgctgcagcgcaacagcaagtttttaaacgaggacgatttgaaccggattacgaaacatttccgctcacggattgcggctgccaaagaactgattgaaatccgcaatgaagggtcgacgctccatcaagttttaaaagaagtgctcgattaccggaaatggttccaattcgtgctgtcatacaaacgtgccggcgagccgaaacgcgaactgagcaataccgcgtttttcaaattcagtggcggagaaaaggcaatggccatgtacattccgctctttacagcagcctattcgcgctatttggaggcaggcagtatggcgccgtacatcatttcgctggacgaagcgtttgccggggtagatgaaaacaatatccgtgacatgttcgaagtcgtcgagcagcttggattcaattacatcatgaattcgcaggcgctctggggtgattatgacaccatatccagtcttgccatctgtgaccttgtccgcccgaaaaacgccaattatgtgacagtgatccgttaccggtgggatgggcataaacggtcgattgtagagaagccgaaagaatcattggcaggcgccaccccggatctgctttga

SEQ ID NO: 50946 - DNA, 1296 bp, Bacillus coagulans P38
atgaaggatgcgatcgatctgttaaggaacgaaccggggatgctgaaactgttccacctttttaaagaaaaataccgttcgctcggccatattgggggaacagtcagcctttccggttttacgcgcaccgaactggaggcgattgccgggctggccggcacgtcccctgatttgctcagagagaaaaacaaaatttcgctgcgggcatttgaaaaagcgctggcaccgactgttttcggaaaatacacccttgtcgaactgcttgaagcggttttgaaggaaagaattttttccaaagcggaagaggaagaaattgagaaaaagaaagaggaacaatttttggcacggctgacggaaacgatgccggacggaaatgggtggtggcgccggattgccagtaaaacggctgacacgcgttttatctggcatgcatacaagcaggacccggatacgttgtccgcacagctcaaaatggtttggaaagctttcacgatgcttccagaagaagggaagtacgaacggattccgttttattcccaacgtattaccgggaacccgcatttttttgatcaaacccgtttcgcgggcaagctctttatccactgtttgttcaccgaccaatggttaaaagggctgatcgaagaagtgccgaaaacaacggaagaattgaacgaactgtacgcaaatgctgggctgatgcgggatgacttatggagtttcgtgacatgccgcgcatttttggcggaaaccgaaaacggcctgcacccggtctggcgtgaagccgcagctactgggacggtcatgaacgtcccagtgaaagaattattgcagctaacgaatatttggccacgagcgggaaaaaaggtttggatcattgagaattccggtgtcgcttcggctgtgcttgatgcagtgtccgatgcgcctgtgatttgcacgcatggccagttccgcactgctgcctggatcatgctgcaacatcttgcaaaaaacggctgtactttttattattcgggtgatctcgatccggaaggcgttgtcatggcagagcgcctcagcagccgtttcccggggcaaacggtattttggcggatggatccggatgcatactttttgaccctgtcggaagaggatatatccacccggctttccaagctggatgcggttcaatcccctgaactgcttttggtggcaaatgaaatgcggttaaagaaaaaagcaggataccaggaaggccttgccgatttgttgatagaagatttgaagaaaagatggttgagtggaaaagaagcatga

SEQ ID NO: 50947 - DNA, 1503 bp, Paenibacillus polymyxa; identical to SEQ ID NO: 50762

SEQ ID NO: 50948 - DNA, 1152 bp, Paenibacillus polymyxa; identical to SEQ ID NO: 50763

SEQ ID NO: 50949 - DNA, 1404 bp, Paenibacillus polymyxa; identical to SEQ ID NO: 50765

SEQ ID NO: 50950 - DNA, 1503 bp, Actinoplanes utahensis
gtgggtgagccggacgaggacctcgacaggctcgaggcgttcacctacctgatcgttcccgagcggtcctcctacctcgcgatcatgcggctgttcgccgcgtccctgatgaccgacctgtccgcgcagcaggtggtggaggagctcgccgcccagggccacgacatcgcgctcgatgtggcggtgagccgcctgaacaggctcgtcacctggggtaacctgctgccgagctcgcacaccgtccgggtgcggagcatcgaggagtaccagcgcgcccgctcgaggtaccagctgtcggcgctgggcgaacgggtgcaacggcaggccgacgaggtgctgtccagcgcggaagccgcccgggaggtcagccgggaactgctcggcctgatcagccagggtctcgccgagctggcggaccgtgtggaacggccgggaggcatcgacggcggagccgcccgggagacggtcgccacggtgttcgcccagttctgggtgttccgggattcggtgcgcgacttctacgcgttcctcggtcaggtcctcgcccgctacgatctggacagcgccgagtacaccggtttcaaagagctcctgctggactatgtggagtcgatcaccgaggagatcgtgctgctggccccgcgtatcgaacggcacctggaacggttgtggccgtacctgccggatctggtgacgatgttgcgcgagggcgggctcgccggggccgccgcggacctcggtgtcacggtggcgcacagccggggccacgacctcacggactgggccggcctacgggcctggttcagtgacctcgacggccggcgcagcgaggtgacccagctgcgagacgccaccctgcgggccctgcagtcgctgctcgcgaacgcgaaacggatgatccgctccggtggtcagggcacctcgcggcggcgcgagctgctgcggctggcggcatggctggacgcggcggacgaggatctcgccgccgacctgttcacctcggcgtacggcctgtacccggcccggcacctcgggatcgccgccgacgcgcagatggtggtcccggcgacgacgagctggtggccggagcccgccgtcgaggtcccggtgtcgttgcgggagcgtggcgcccgggcggcgcggggccgggtgtccggcgtcgccgaccgttccgcccagcagcgggcgctgatcgagcaggcggctgccgagcagctggcgcgtgcggccgctgcggccgagttgctgtccgctgccgcgagcctcggcacggtacgactgtcggagccggcgatccggctgctgctggagttgatggcgcaggcgctcggcgccggcgatccggcccagggcagcgcggtcacctcgaacctcgacctcggtgtgcgctgtgagctgatcagcaagccacgccaggagacgacgatccactcggcgaccggtgacctcaccgtccgggacatcgacatctcgatcacccggcgggaaccggcggatggctga

SEQ ID NO: 50951 - DNA, 4047 bp, Actinoplanes utahensis
atgaacccgtaccgttaccgcctgcaccgggccggtatctgcaacgtctggcagtacgacgaccaggtcttcgacttcgaggacggccggctgctgctgcgcggcaagaacggcgccggcaagtcgaaggctctggagctccttctgccgttcctgctcgacggcgacaccaaacgcctggacgcgaccggcggcgggcgcaccaccttccgctggctgatgagcgaaggagcctcgggcgtcaaccggcagggcttcgtctggctggagctgcggcgcgtcgacgagcgggaggtggagcgcttcgtgacgctcggagcggtcgtccgctggtcgtcgtcgacggcggaggcccggctgacctacttcgtcaccgccgcccggatcggcgccgaggtgacgctggtcgagggccgccagccggtgccgatcgaccgtctccgcgagacgctgggcgagggcgcgctgatcaactccgcccgcgactaccgggcccgggtcggccgcgaggtgttcggcatcgccgatccgggccgctaccgcaatctcgtccatctgctctaccggctgcggcggcccaccatcggtgaccggatcgaggccggccagctcaccgccgaactcggtgaggcgctgcccccggtcgacgacgacgtgctcgactcggtcgcccacaacctcgacgacctggagaccgtacgcgccgacctgggccgcctggaggccacccacagcgcgctgtccgacctgatgaccacctaccgcgggtatctgcggggcgagttgcggcggcgggtgcacgcggtcgacgaggccctcacccggctgcgcgctcagcggcggcaggccgggcaggccgaacgcgaggtcgaccgggcccgcaccgcggaggaggaggccctcgccgcggtgggccactgggaccgggcgtaccgcgaggcgtcggctgagctacgggcgctgcgggagagcgccggctaccgggcggtgcaggagctcgcccagcgccgactcgcggtgcaggcgctgctggctgccgcccggtccgcgcagaccgcggccgccgcggaccggcagactctcgccgcgctggccgaccgcctgcgggacgagaccggacggctggcatccgccgtcacccagatccgcgacgggcaccacgggctgcgggaactcgccaccgagtccggcctcgacgtcggtcatctgggttcgatgccggagttgcgtcaccgcgatgctccgtccttgaaggtcgtcgaccatgagctggccggacacgagttcggacgtcagcgggaccgcctgaccgccgcggaggaggcggtccggggccggcgcaccgcggtcgccgacgtcgacgggcggctcgccgaggcggagaaggccacccgcgcagcgacccgggcggaggacgaacgagacctcctcgacggccagcagggcgaggcccggaaccggttcgaccagctcaaggacgcactcgccgcggcgggccaagagtatgcgtccgacgtacaccgatggtctgctctgccggtgtgggacggcacggacctgacctcggtgaaggaggccctgctcgccgatgatccgctgccggccgagacgccggaggcggtgcgtgccgcggccgaggccgcggcggagccgctgcgtgatgccgcggaaacacggcgggacagcttgcggaccgctcagcgcaaggcggaggaagacctttcggcggtacgggcggagcaccgtcgatggagttcccggatcgatccggaaccacctcgatcccggttccgggagaccggcacgccgtctccggcaggaaccccgctgtaccggctgatcgacttcgccgggtcactcgatccggcggaccgggcgggcgtggaggccgcgctggagtcgagcgggctcctcgacgccctgtgcaccggcgacggcaccgtgctgcacccgggaaacggcgaggtcgtactgcggccgggtcccccggtgcccggccccagcctgcgcgacgccctggtggccgtgccgggcgcccaggcagtcaccgcactgctggcttcgatcggctggggggcggacagcgacgcgacgagctggatcgccgccgacggcggatggcgtctcggtgtcgcgcacggtacgtggaccaaaccggaggccgaatatgtcggcgccaccaaccgggcggccctgcgccgacggcggctcgccgaactgaacgttcgcatcgaggagctgaccggcctgctcaccgctctcggcgaacagatcgccgacgtggagaccgaacgccgcgatctggcagccaccctccgtgcgctgccggacggcgtcgcgctgcgcaccggctggatccgctacgacgaggccaaaagccacctcgagcggctggcccggcagttcgccggggcccggcgccgggcgcgggagctgcgcgtgatcgccgacgaccggcgtgcccacgccgcgtccgcggccgcctcccacctgctgcccgccgaccgtgcccagctggccctcatcgaccagcggctgcggcaactggcggcggatgtgccccggcaggcccgcgacatcgaacgcttcaccgccggcctgcgcccctatgcggatctgatcgcccggcacggcgccgctgtcgggcaggccgcccacaccgccgacgaggcgcagatcgcggcgaccgaacatctcaccgccgagcaggagctggccgtcctcgaacgctccctgggcgtcgaaccggccgagatcctgcgacaggagaccgccgccgaagaacgggcccgtaccgccgagcaacgactgcccgccgctcgccgcgactacgaggaacgccgtgacgagcgggtacgcgccggcgaggcccgcgaccaggcgcggctgcggctcaccgaattcgaacaagcggccctggatgcgggcaccgcgctcccccgggttctgaccctcccgggtgtccggcccgccctcgaactgcccgccgacctgcccgccgaagcccccaccggcaccccgcccgaacggatccggcacctcgacgacctcgccggccggctgcgggacgccctcggccggcccgcatcggatctcggcgagaacgcgctgcaccagcgctacaccgatgtgcgcagtcggcttcccggcggcttcgacctgatctgggaggaccgcgacggcgtcaaggtcgtcgagatcagcgacgacatcggccggcatccggtagccgccgccacggcccggctcggagccgagctcgaccagaaacgctccgcggtcgccgaccgggaacgccacgccttcgaacggttcctgctcggggaactcggcgacgccctgtcccggcagatccggtccgccgaagccctcgtcgccgccatgaaccgcaccctcggggaggtgcggacctcacacggcctcggcgcccggctggtgtgggcgctgcgtgacgacgccgaccccgacacccgccgcgccgtggcgctgctgcgtaccccgctggaactgcggacccgcgacgacaacgaccggctccgggaggcgctggcccgccgggtcgaggacgcccgccgttccgacccctccgccgggtacgccgtacatctgcgcgccgccctcgactaccggaactggttcacgttcaccgtcaaggtcaccgaccaggcccgtcccgaccgggaacggaccctgtccgcccgtaccgcgatgtcccagggcgaacagcgcgtcgtctcctacctggtgctgttcgcggcggccgccgctcatttcacctcggtgggcgagctgcatccggccgcaccccggctgatcctgctcgacgacgccttcgccaaagtggacgagccgacccacgggcggctgctgggtctgctcgtcgacctggatctggacgcggtgctgaccagcgagcggctctggggctgtttccccgaggtgccgtcactcggcatctacgaatgcctgcgcgaccccacccgaccgggcgtcgccaccctgcacttccgttgggacggccagcgccgtacggttctcccctcatga

SEQ ID NO: 50952 - DNA, 1245 bp, Actinoplanes utahensis
atgatccccccggccacactcgcctatctcagctcgcccgtcctgcggccgctgtgggcggccgcccacagcaggctggcccgcaacgggcgcaccgcccgcggtcgcctcaccctgaccagcctcgacccacctcagcgcgaggctctcggccacctgctcgaccgcatcgtgaccgcgacccacaccgtcgacctgtcacagctcgacgagcggttacggacgaccgccgccggaaccggtctgctggacgtggtcgaggcggtggtcggcccggtcccggatcgccgggccctcgcctccgcgtcccggtcgcaacgagccgcactgcgcgaccacgccaccgcggccctcaccaccgccggactgtccgggcacgcatgggcccacgagtggatggaccagctgtggcgtcagggcctgccggcccggctgcccgccgacgacgtgcaccgcgtcatcgagcaggccgtcgccaccctcgcccggaccgtcggcgaacaagcccgcacctggtcccgcggcgaactcgcccaggccgtcaccggaagcgcccacggtctcgacgacgacaccaccctcgcccgcctggtcctgcgcggcctcgccctcgccctcaccggctccccgacgctaccgaccggcgccgccgaacgccgcgccctgtgggatgccgccggcgtcgccggcgacaccatcgccaccacggttctggcgtgcggactccgtccgcacggcatcgcgtggttgcaggagcgcgccgacatcggcgccgaaagtcacctcacactgcgggagatccgccgcctggcgccgtggtcgatgccgccgcagaccgtgtacgtgtgcgagaacccgcgagtcctggaagcggcactggacaacggcgtccgagcgccgatcgtgtgcaccatgggcaacccgaccaccgtgacgctggccctgctcgacgcgatcaccgccgccggccacgtcaccctcgcctaccacggcgacttcgactggccgggcatcgccatcgccgcccgcatcatgcgccgctatcccgccgcaccctggcagttcaccgcggtccactatcgggaggccgtcgcccaggccacgcgccgcggcacaccgcgccaacccctgaccggcagtcccgtgcagagtccatgggatccggccctcgtcgtggcgatggcggaacagaacgtcgccattcatgaggaggcgctgatcgaaaccctcctcgccgatctctga

SEQ ID NO: 50953 - DNA, 1491 bp, Rhodococcus sp. Chr-9
atggaggacgcgttggtgcgggacgaccgcctgcgcctgttctcgttcgcgacggccgagaaaagggtgcactacctgtgggttctgcgcgcattcgatcacgcgcgcggcaactactcggtgctgttgcacgccggcgacgtcgagaacgtcctcacccgactgcccggcgcgagcggcgacgacgtgcccgattcctccgagatcccggcgctgctcgagcagctgcacgcgtggggtgtgctcgaacgcagctacgacggatcccgggcagcgacgctcgccgagtaccgcaaccggcactacgtctaccagttcgggcaggcgggctaccgggtgttccgcgccgtggaggacgtgttgtcctcccgcggggaggacgtctcgctgtcacgtctggcccttcccgatctgcttgccgatctcaacgatctcgccgacgcgaacgccgccggcgacggcgagctggtctaccggaagttgagccgcctcgacgcgacgttgtcggacatggccgagcgcgccgcccgtttctatctcgtcctcggcgagctggtgcgcaccaccgaggtcaccccggagaccttcctcgcccacaaggacgcgctgctcacccatatgcgcgagttcagcaccgacctggcccgctacgccccgaagctctccacggcgctcgaccgggtacagaccaccggggttcagaagctcaccgcggccgcggcccggcacgacgagcgggtgctgctctcgttcgaggaacgcgaagcggactgggcgcagcgctggtggggcgtcgaacactggttcgtcggtgtgggctccgaaccgagcgaatccgaacgcctgcgcggcgcgaccatcaacgcgatctccgcggtgctcgggctgctgcgccggctcaccgaacagcgtcgtgggggtgtcagccgcgagtcgcagctgcggcatctcgcgggctggttcgctgccgcgccgtccgaggaggccgcgcacgcactgttcgatgcggtgttcgacctgggccggccccgacacttttccgtcgcccatcccgatgccgacatcgtgccggtcacccgctcgtggtgggaagcgcctcccgtggagatcgcccgcaccctcgccgagaccggccggcgccccgcagcgggagcgccggggcggatccagcgcaacgacgccggagtacggcggctgcgcgaggcgcaactcgagaagcagcgtcgccgggccgaagcggcgcgttccctcgccgccggaggggtgcgcgaacggaagctgagcgaaccggaagcagaggtgctgttgagcctgctcgacgccgcactgtcggcccgcgtgcccgtgagcgggcgggtgcgcagcgacgatgcgtcctctggtacgcagaacggcgtcaagctcaccctccgaccgagcggcgagtcgacggtggtgcacaccgcgcgcgggcgcctgtatctcgacggtctgtcggtggaggtgcgatga

SEQ ID NO: 50954 - DNA, 1395 bp, Rhodococcus sp. Chr-9
atgagggcgcgttcgattccgtccgtcgagctggattcgtatcagcgcgccgcgcggctggtgctcacccaccacctcgtcaccgcgacctttcccgaccggtcggcgctggcgacggtgcgccgctgggccaccgagctgcgggaggatctgctcgccaccttcggataccggctcgaggtcaccgagaccaccgcgcggctgttcaccgtcgccgatcgcctcgacgcgggggcgggcacgtcgacgcacaccggccggccgttcgaccggcgccgctatgcctatctcgcgttggcgatcgcggcgctcggtcgcggcgccgggcagatcacgctgtccgaactcgccgagcacgtcgcgtccgaggcgagccgggtggacggtgtcgagctcgacaccgaacgtgccgccgatcgcgatgccttcgtcgatgccgtgacctggctcggcgtgcgcggggcgatcaccctcgccgacggtgatgcgggcaggtgggcgagcgatcccgacagtggtgaggcgctctacgacgtcgaccgcgcggtcgtgcatgccctgttccggccaccgcgggcgttgcagcacctcgaatcggtgcgcggtctgctcggcaatgccggtgccccgcaatcggatacggcggaggtccggaggcgggtgcgacgcgcactggtgcagcgtcccgtggtgtacgccgacgatctcgacgacgacgaagcgctgcagttggcgttgccgcgcaccaccgacgaagtaaagttgctcaccggcctggtgtgtgagcgtcgcgccgaaggtgttgcgctggtggatacctcgggacgactgtcagatgtacggtttccgaacacggggacggtcgcgcaggtcgcgctgttgctggccggggagatgtgcgatcgcgtcctcgatcccgacgcccctgccccaccccggatacccgtacctgcacagacacaggacgctctcctcgcggccgtcgattccgcgatcccgaggtcgacggtgttcaccccgctcgcggcgtccgacaccccgatccccgacgagctggagcaggacgacgccgctcgtgccccgctcgagcatcccttgctcgaggattcgtggctggcgggcacggtcgggcgcctcgtcgacatctacggccgaaccttcgccgcgcagtggcaggccgaccccgcgggactcgccgaggccgcggtggacatgctcgaccggctgcggctggtggcccgggtacccggcggggtgctcgtcctgcccgcgatcgcgcgcttccgcggcgtgacggtcagtgtgcgcgaacgtgatccggaaatcgacctgttccccgagaccaccccaccgacagtccccgcacccgatacgaacccgacggagatctcatga

SEQ ID NO: 50955 - DNA, 4155 bp, Rhodococcus sp. Chr-9
atgagcagcgcccgattccgccccacgcgtgccgggatcatcaacctgtgggactaccgcgaccaggagttctcgttcgccgacggacgactggtgctgcgcggaccgaacgggtcgggcaagacgaaggcgctcgaggtgctgttcccgttcgtgctcgacggccggatcgaaccgcgacgtctgaacccgttcgccggcgaggagcgcaccatgcgctcgaacctgctgtaccgcggccaggacagcgcccactcgtacgtgtggatggagttctgccgcggccgcgccgacgacccggaggccgtcaccgtcggcatcgggatgcgcgccacccgcggcaacgacaaggtcacccgctggcatttcgtcgtcgacggccgtgtgggagtcgacttctcgctgctcgacgacgaggaccgaccgctcacccgcaaacaactggtcgatcagatcggagccgacgcgatcgccgatcgtcccgtcgactaccgggccgcgatcgacgcgcgcatgttcggtctgggcgcgcaacgctacgaccagctgatcaacctgatcctcacgctgcgccgcccccagctcgccaagaacctcgacccgaagggcctgtcgcaggcgctgaccgacggccttcgccccctcgacgaggatctcatcgtcgaggccgcccgctcgttctccgcgatcgaggaggtcgagcgcaccctcgaatccctcgccgccgccgacgatgcggcgcaacagttcgtcaaggtgtattcgaagtacatccgtcagcaggcgcgcaccgccgtcgacaaggtcgccacccgtctcggagtggtggacaccgccgtccggtcgctgcgcgaggcgaccgaagcccgcaccgaggccgccgccgcccgcgcggcctccgaggaacagctcctggtggccgaacgcgaccacgaacaggcacgcaccaccctcgaggcactgcaccgctccagcgcctacgagggcaaacagcagctcgacgacctcgcgtccgcggtgaagaacctcgagcgcaccaccgccgcacaggccgagcaggcgaaccgcgcccaggccgtcgtagccgaccggctccgcgaccacgacagcgcccgcgacgcgctcgagacggcgacggcggcgcgtcgtcgcgccgaggacgggctgagtgcggcggccgaggacgccggcatcacatggaccggtctcgacggcatcgaacggaccgagcagctcaacaccgcgatcgacgcactcgccgaggaacgcgacgccgacgtgcgcgtggtgcgcagcgcactgtcccagctcgacggtgcgaccgccgcgcggtcacgggccgaggccgccgcggtgcgtgcccgcgcgcaacgcgacaccgcctcggccgcggtggaggccgccgagaccatggtcgagctgtcccgcagcgaggtcgccgccgagctgggccggtggtggtccgatcgcgccgagaccttcgcggccgtgggcctgtccaccccggtcttcgaggcgctcgacaccgccttcggcaccgtcggtcaggacgatgccccgtcccccgcggcggtgttcgccgagcacaccgggcccgtgctcgacgacctgcggttccggcgtcgcgtgtgcggctctgagatcgagtcgctcggcacccgcatcgccgaactcgagaccgaacgcaccgccgtcgcggccgaacgcgacgacgctcccccggcgttcccttcccgcaccggcagccgcgacgatctcgtcggcgccccgctgtggcagctcgtccggttccgcgacgatgtgtcgacgcaggacgctgccggtatcgaagcggcgctgcaggccgcgaacctgctcgacgggtggatcaccgacggcgacctgccggacatcgagtcggagcagttactggtgccgttggcgcccgagcaccgccccagcggtctcaccctcgccgacgtactcgttcccgaacccgacacggccgtccccgaggaacggatcgccgcggtgctgtcgtcgatcgcgtggaccaccgatcccggtccggacgcgcgagtgtcggtcgatgcgcacggcgggttccggcagggagtgcagctcggtcgccacgtcaaggagcaggccgagttcatcggagccaccgcccgcgcccggcgtcggcagcgtcgcatcgtcgaactcgagaccaccatcgccgaatgccgcgccgacgtggaggcgcagcgcgagcaggatcgcgagatcggccaccggctcaccgcactcgacgaggccgtgaagtcgttgccgcgcaccggatccgtgctcgcggcgctgcgcaaggtcaccgaatgcgccggcgcgttgcggaccgcatccgaatccgcagccgccgccgatcgcgacctggaccaggcgatcgccgcggtcgccaccaaggaacagcacttgcggtcgacggccggccggcaccgagcgccgctcaccgcgacggaactcgacagtctcgacgcagccgtgcggcacttccgttcccagggccaggccctgcagcgcgccctgcgtgagcaggtcacctgcggtgatcgactccgcgacaccgaagttcagctcgacgaggcgcgggtctccgccgagaacgcggccgagctcgcggcggagaacgccgagacgctggccaacgagcagcagaagctcgagacgctgcgcgagtcgatcggggcgagcgccgaccggatcgatgcccagctcgacgaggcccgacgccggatcgagactgcgaagaccgccgagcgaaccgcgcgtaaggcccacgagtcggcgctcgagcggatcggcaaggcagaggccgcccacacgggcgccgagcagacactgcggtcggcgctcaccgaggcccgcgccgacgccgacgccctggcacccttcgcccggcgcgacctgctgaccctgctcggcgtggagagcgagcacgtgtggccgtccagcgccgccgcgtggctcgatgccgatcagctggcctaccggatccggcagtcccccgacgacacggtcgatgtgctgcccaccgaggtcctctcgttgttccgggcactcgacgccgccaccgaatcggtcacggcctccgagtcgacccgcaagtccaccgcgtctgcactgacctccgcgctgcaggagttcgacgccgaactcgcccggggtcgcgactaccgcctgcattgggacgctgccgacggcatcaccgtcgtgcaggtacaggacgaacagggctacacgtccgtcgcggcgttcgcgcagcgcatcgcgcgggcgcggcaggaacaggagaccctgctcaccgactccgaacggcgcatcctcgaggacgcgctgctcaccggtctcgcgcagcagatccacgagcgcaccgtcgacgcccgcgacctcatcgcccggatgggtaccgagatgcggcaacggcacatgtcctcgggcaacaccatcggggtgcactgggtgctcgccgaccatctcgacgagccggcccgggcggtgtgcaaactcctcgaccgcgacgcgtcgatgctggcaccggacgatctcgcggggatccgcgcgcatttcgcctcgcggatccgcgcggagcgggccgcgcatccggaacggtcgtacccggagatcctcgccgcgacgctggattaccgccggtggcgggtgttctcgttcagtctcgtcggtgcggacggcagcgaggaccgcctcaccccggcccggcactcggcgttgtccggtggcgaacagtccgtctccctgcacctgccgttgttcgcggcggcgcacgtgatgctcgattccgccgacccgcatgcgccgcgcctgctcgccctcgacgaggccttcgccggcgtcgacgacaccggtcgcagcgaactgctcggcctgtccgtgcaattcgacctcgacctgttcatgaccggtttcgacctgtggatcacctatgccggtgtgcctggctgtgcgcactacgacctgtcgcattcggtggccgagcacaccgtcgccaccacgctgctggtgtggtccggtggcgaactgctcgccgagcacgacgggtcggatctggagagcgcgctcggatcgccgcgcacccgacggatcacacgcccggtggaaggagccctcgagttcgcatga

SEQ ID NO: 50956 - DNA, 1554 bp, Streptomyces pluripotens
gtgcgcagggttccaccggagatgttccggttcacgacggtggagaggtccgatctgtacggggcggtgctggacgccttcggtgcggcgggcgagcacttggagacggcgctgggactcgacgcggtccgcgagcggctgcgcggagtgggctgggcggcggccgtcgaggacgaggacctgcaggagacgctcaggaagctggtgcagtgggaactgctggacgtggtgcacaaccacgccgagaactaccgcacggccgaggagtacgagcggcgcaacctgcagtactcgctgacccgccggggtgaggccgcgctcgccggggtgcggcaggcgcttgaggtgctcgcctcgacgggggcgctgcagacggcggtgctggaagcgatcgcggaccggctggacgagctgtgcctgctgtcgggcgagcccgccccggccgaccggcggatcttcagcacgctgcgggagctggaggggcatctggacgccctggtggagaacaccaaggcgttcaacggagaactgcagcgtctcgtgcgcgcagagggcgcggacatggaggtgttccgcgaggtcaagtccgccaccgtggcgtatctgcaggagttcctggtcaacctcgaccggcgtgggcaggcggtcgccgccgccgtggaccgggtggaggagcggggggtcgccgtgctgcgggagcgagccctgcgcggggccgagctcccgccggtggccggcgaggatcctgcggccggctggctggagagcagacgagcgcgttgggcgggactgcgggcgtggttcctaccggacgacggggcgcggccccggatcgagcacctgcatgacatcgcccggcgggccatcgtctcgctcctgcaggtcttggagcggatcaacgagtcacggcgccgctcctccagcgcggtgcaggacttcagagagctggcacgctggttctcggcggcccccgaggaggcggacctgcaccggttgtggtcggcggccttcggcctcggcccggcgcgccacgcccacctcgcccactctgacccggagctgatcccgtcgtcccgttcctggtccgaagccccgcccgtggcggtgtccgcactgctgcgaaccagcggacggacggagcgcttcacccgcacggccagggtgcgggacgtcacggcggtcagggcggagcgcgccgcacgagcccgcgccgagcgcgcggaactcgcccgtgcctggcaggtgctggagggcgatggtcccgtgcgcctgtcctccttcggcgtgctggaccccgccgtgttcgaccggctgctcgacctgctcggccgggccctgtccgcccgaccggacgcgggtgggctgcggcgcgcgacgacaggggacggcagggtggagatcgccctgtcgccgccgcccgacgaacgcaccgccgtactgcgcaccgcgaagggctcactggccggaccggactacctcgtccacatcacggcggcgggcggaacagccgcgttcccggcccgccacaccgcgcagcaggaggcggccggatga

SEQ ID NO: 50957 - DNA, 1383 bp, Streptomyces pluripotens
atgagcaccctggccaaccaactcgcggctgcggaaagggaagaggtcgcgcgtgccatccgtctcctgctggcccgcccgctactgaccgcggccgccgacccggccggcttcgaactggtgcggcgccggcgcgagccgctggcccgctggttcgactacacgtgcggctggaacctggtggtggagccccgtcgcggttacgcccgtctcaccaaggtccgcgcggacccggacggctcccggccggcccgccgcacgcgttccggccgggccccgttcgaccgccggcgctacgtgctgctgtgcgtgaccgcggccgagttgctgtcgctgccgatgacgaccatcggcatgctcgccgatcgcgtcgttcaggccacgtcggccgaccgggcgctggtcgcgttcgacccggtccaccagccggagcggagggcgttcgtcgacgtcctgaaactgctggagtcgtacgacgtgctgcgctcagtggacgggacgaccgaggcgtacgtcgcctccgcggacgcgaaggtcctctaccgcgtggaatccacgctgctgatgcggctgcccgccgcgcccgtcggtgcctcccggctcacggtacccccggccgaggtgcccgtgcggttcgaggaactcctcaccggtctcgtgcgggagcgccgctacggcggcgcggccaccgacgggacggcggacgagacggacggcgacaccgctgccacggacgcacaacgcaatttgaggctgcgccactcggtgctgcgtcgcctcttcgacgaccccgtgctctaccgggcggacctcgccgaggacgagctggcgtacgtcacctccctgagcggacggcagatcctgcgccgctcggtcgagcaggccggcttcctcctggaggaacgagccgagggattcctgctcgtggatccggacgggatcgcgaccgacgtccgcttcccggacgacacgtccaccgcacgggtcgccgccctgcttctcctggagccgcttcgcgccgctccggccggaatgctctccgaacaactcaccgaagccggagcggaactgctgcgccgattcccgcgctgggccaaggcgtaccagtccgaggacggtgcggcccggctgtccgacgacgccgtacgcgtcctgtgcgacgcgggcctcgcccgcggagtcggggaccgagtcgtcgtgtgcccggccgcccaccgctaccgcctgacggagacgacgagcgccggctcgccagaccagttcggtccggaaagccagtccggtgccgaagaccagcgcagaccggaacggaaggcgcctcgccgcactacggcaggcgccacggcaaccggaggcgtcacagcagaaggagagcagcagtga

SEQ ID NO: 50958 - DNA, 4158 bp, Streptomyces pluripotens
gtgagcgtgacggacctccccctcccgcggcggcccgagcccaccgagtcggccgggacaccgacggcggctgcgggcgccgtccgcagccgctggcagccgcaccgcgccggcatcctcaacgtctggcgctactacgacgagaccttcaccttccaccagggccggctgctgctgcgcggccagaacggatcgggcaagtccaaggccctcgaactcctgctgcccttcctcttcgacgccagcctgcgccccaaccgcctctccaccttcggcggttcggaacgcaccatgcactggaacctgttgggcgaaggcgccaccggcaagacccgcgtcgggtacgtgtggatggagttccaccgcgccggcgacgacggcaccgagcggtggttcggctgcggggtgcgcctgcaggcgagcgtacacaccaccggggtgcacgccgactacttcaccactggctccaggatctcccgccccggcggagtgctcctcgtcaatgaagcgggacagccgctgacccgagccgccctcgccgacgccctccgcgactgcggcgacgtgcacccctcggccaccgactaccgcacggccgtacgacgtgaactcttcgccggcatgggggagcagcgctacgagtcgctgctgtccgccctgcttcagctgcgccagcccaaactctccgaacgtctcgacccgtccttgctctccactctgctgtcccgcgccctgcccccgttgggcgaggccgagatcgccgaactcgcggagggcttcgagcggctggaccaccagcgtgagcacctcaggcggctcgacgacgaggtgacggcggccgggaccgtcgcatcccggcagtccgcctacgcgcgacgcgtcctgcgcgccggtgccgccgcgctcatctcggcaaccaccgagatggacaacctcacgcgggtcgcccggcagagcgccaaggagctggaacaggcactggcgcaacgcgagtcggcccgggccagccgccaggaacaggagtcgcgcgcgcacgccctggaggcgaccgtcgagggcctgcgggagagcgacgcgtacaagcagggggaggaactcgaccggctccggcgtcgcacggacgacgccgcagccgtcgccgggcggcagcgggccaccgccgaggccgctcagaccggcgcggaggaggaccagggccatgccgagcaggccgcgaggcgagcccgcatcctcgacgagcacgcgcgcgaagccgccggggaagcacaccggtcggcccgggcagcggggatggagtccatccaccacgaggtccgggccgttctggacacggaccttgtggtggccgtccccgacggcccggggggtgaggcgggcgggcgccgtccggagggccccagcgccacacgcaccacgggcgaggacggggccccacaggcccgtagactgctgcgcggcgcggtcaccgcccgacggcagcagctctccctggtcaccgaggcgatcgaccagcacgctcgtgccgtacgcgaccggggtgccgccgaggacctgctggacgaggcccgtacccgccttgcggaggcgatcgcccggcgggacgagacgtccggcgcctgggacgacgccctggccgcacaggcagagcggctcatcacgtgggccgagggctgtgcggaactgcgcctgaccgatccgggcgacctggtggccgcagccgcgaccgaggccgaggtgatggccctggtcgaagccgccgcgcgcccgctggagcaagagatctccacggccgaggccaccgtgcgggccacacgcgagagcctgcgggacgagcgcactcgactcggggaggacgtacgaaggctcagcagcgagaccgacctcccgcctccacccccgctcacccgcaccaccgcccgcacggcgacggcgggagcaccgctgtggcgactggtcgccttccgcgaaggcgtcccgcttcccgttcaggccgcggtggaggcggctctggaggcctccggactcctggacgcctgggtcagcccctacgacgggatcacgctgccgggccacgacacccgcgccgaggcggccctggccacagccgccccggggcccagtctgctggaggtgctgcggcccgaggaacacatccccgtcccggccgacacggtgacccgcatcctcgccggtatcgcgtacggcagcacactgcccggcggtcacccggcggccgtctccgccgacggcgcctggcgtctcgcactcgccaccggcacctggaacaaaccggaaccggcgcacatcggcgtccccgcgcgacagcggaaccgccggcgcaggatcggtgaactcaccgagcgcatccgcgagacgaacgcctccctcgccgcgctcgacgaccaactgcgcggtctcgtcgctcgccggacccggctggacgccgaccgcgatgcccgccccgaccaccgggaactcgacgcccgtcggcgcgaccgggagcgcgccgaggaccaggtggccgctcgggacgacgccgtgcgcgacgccgccgggcaactggcgtcccgcgagagcgaagtggggggtgcgctgcgcacgctcagccggcgggccgcggaacacgcactgcccaccgaccgtgacctggtgcgtgaaatctccctcggcatcgacaggttccgggacaccgccgacacttgggtggacgcccgcctcaccgcgaacgccgctgccgaccgggcccggcagacggccgcacaggcggaccgttcgcgccgcaccgccgaggaacagaccgagaacgcggccgccgcagcagtggaggcggcgggcctgcaagcgcgcctgcaagcggtggaggccaccgtcggcgaggactaccggcaggtcgtcgcacgcgtggctgaggcgcgcgccggactgcggcgctgccgtgaggaggccgaccgggcagccggactcctgctgcgcctggaaggccgcatcggaggactgcgggccactagtggtcaggacgccgaacgacgggagcaggccgtcgcgacccgggacggtgcggggcaccggttccggcacctgtgcctggtcggactggccgaggacgctggcatcgcaccggaagccgatgtgggggacggcaccaaggccaccctggaggcggctcgcgccaccgcggcgaagtggcccggcatcccgcacgcgccacgcaacctgggggacgccgcgacccgcctctcggaagcggtccacgaggcccgccggcacctcggcgcccgcgccgacctggacctggagcccgatgacgacatccaggtcttcaccgccaccctggacggcgtacgggtgggggcgacgggcctgctcaccgcgctcacccaggaacgcgaccgcagccgcgaggacatcaccaccgccgagcggcgcctcttcgaccagatcctcaccggcgacatccgccgccacctcgcggcccgcatccgccaggccggcgaactcgtcgaccgcatgaacggtcacttggagcgggtccgtaccgcctcccacgtcaccgtccgactcgtctgggacgtgcgcccggaccttccggacagcacccgcaccgcccgccagctgctgctcaaggatcccggccgggtcaccgagaccgaccgggaggccctgcacgcgttcttccgcgcccggatcgatgaggccaagggcaacgacacggccgcgagctgggaggaacaactcggcgaagtgctcgactacaccgcctggcaccgcttcaccgtccgcctcgatcgtgcgggcgggaccggctggcagccgctgaccaagaagctgcacggcgcgctctccggcggagagaaggccatcgcgctgcaccttcccttgttcgcagccgtcgcagcccactacgaggccgtgcccctggcgccccgccccatcctgctggacgaggtcttcgtcggcgtcgacaccgtcaaccgcggacaggtcttcgccctgctcaccgccctggatctggacctcatggtcacctcggaccacgagtggtgcacctacggcgagctgcctggcatcgccgtccaccagcttctcaccgacggggacgacgacgcggtcaccagcgcccgcttcgtctggaacggcaccgggctggaggcgggatga

SEQ ID NO: 50959 - DNA, 1251 bp, Streptomyces pluripotens
atgacccacgcggaaacggacctgggcgaacacaccctgcgccgccccgaactccgcccgctctggcacacggtccacgaccgtctctcctccggccgccccgttacccggatccgcctcggaccgctggacgaggccgagcgcgaggccctcgccgacctcctcggcctggaccggctgccggccccacgcccgtccttccccctggcccaactggaagaagccgtcaccgaactgaccggccgtacggtccgcgaaaccgtcaccgagctcgtcggtcccctcggcgaccgtgcgggcgaacgacgccgtcaagaaagggaacgcgcaggggtgtgggcctggctggccggccacgacaccgtgcgggctcagcccgcgctcgccgcatgggcctcctcctgtcgggccgtcggcctggtcggcggttcaccggaccgcacccgggcccagctcaccgacgcgctcacggtgctcgcggagctgcccgcccaggccgaacccctgcccgtcttcgccgcccgcgtactcaacggtcatgcccacgcactcgacgacggcacagctctgtccaccctcgtcctgcgcgctctggcgaccctctacgacaccgccccgccgcagtccgcggcggaccggcgggccctgtggacgcgcgcgggtgtcgccgacgacgacctgtccgccaccgttgtcgtcggtggcctgcacccagccggcgacggcacgctcgcccgagtggcccgcgtctgcgcccaggccggacaggccgccagcctgaccctcgcccaggtgcgggccccgggtgagttcgtcctcgccaccgagcccgcacccgtcgtacacgccgtggagaaccccagcatcctggctctcgccctacgccgtttcggccgggactgtccaccgctcgtgtgcacgtccggttggcccaacagcgcgtccatccgcctcctgcgcctcctcgcggaccggggggccactctccgctaccacggcgacttcgatggtgaaggcattcgcatcgctgcgtacctgctggacaagacgcaggcccggccctggcgcatgacggcggcggactaccgggccgcagtcgcgcgggcaccgcatggcccagggcccggccgtctcaccgacgcgccctgggatctcgaactgacgcgcgccatgacggaccacggcatcgccgtggtcgaggagttggtggccgacatcctcctggccgacctggctgacaccatgcggtag

SEQ ID NO: 50960 - DNA, 1488 bp, Thermoanaerobacter sp. YS13
atggaagataaacttgatttgaatgtgataaaaccgattgaagaggtaaagtatttgtctgcggaaaatgcttcgcgatatcgccttatcatgaggtatttttatgagcagtaccagaaatttaaatattggctgtacaaagaggatatatatgaatatgtaagtcaatttgatatgtttgctgactatacaatggaaaaatgtgagcaggacttaaaagcacttactgaatggaaaaaccttattgcgacacaagataccactaaagcttctacgattgacgaatttaaaaacaaaaaattcaggtatcagctgagtccatattctattgagatagagagaatgaccataaagttggaaagtatcgtcggttatggtgggtcactacagccgtctttatttgaaaggatttaccgcaatttaataaagataaatgaaatggcgaaaaaagaggatttacaggaaataaacagatggtgggaagacctcaataccgactttgaaaatatatatcacaatgcgacagattacattgcaagtcttcaaagctctaacgctgatgaacttatgaagtcagagcagtttataatttacaaagacaaacttatagaatatttaagagattttataaaagaccttcagaggttttctgttgccatagagagctttttgaaaaaggtgagtccggaggttgtcaattccgttgtagataagttatgccaatatgaaatgagtatcccaagaattgacagggttttaaatgaagaggaagtaaaagaagatttgatggataagtggaataacatatctttttggtttacaggtcataattttgaagacagcgaggcagtaaggcttcttaatatatcaaacgaaataatcagaaaaataacaatgtatgcggcgagaatagcagaaaacaggatgaaagctgccagcagaaagaatgaatatattgctctttctaaaatgtttgcaaaagcaaccaatataaaagaagcacaccttttgtctgcggcggttttcggttgcttttacacaaggcacattaaaggtgattttgaaagaaagacagaaagtgtaaaccagagtgtatgggaagaaccgccctttaaagtgattataaagctaaaaacaaggagctacagtaattctgttaagacaaatgcgattattgataaaagtgctgacaagacggagatgctgatggactatctcaatcagaaaaatatagaagatgaaataatagcaagttgcattgttggcaatagaataaggataaaggatttacctgttgtaaaaccttttgtgagggcaacaatacttaaatggataggaaaagcgatagcaagaaatggctttacaggaaaaacagaagatggaagaacatacagacttcacatgccaaagaatggtgaaagagcggttttgaaatgcacagatggtaatcttgatatgcctgatattgtaattgagtttgtggattga

SEQ ID NO: 50961 - DNA, 1152 bp, Thermoanaerobacter sp. YS13
atggaagaacttcagatgcttcttgaaaatttttggatactgagagaggatagagaaaattttaacaaaataagagatgctgagaataaaataaaaccttttgttgaagagaagttaggatatagattgattataaacccatatattattaagttagaaaaagtgccgtcagatgttgaagagtggatggggatagatgcatttcaaatgcctatggattatgcatttttgtgtttgctcttagcttttttggaggataaaggaccagaagaccagtttgtgttgtctaatataacggaatacatagaggcgcagtatgatggacctgataaagtagattggacgctttttcagcacagaaagtcacttgtgcgggtgctcaattttgctgtagatattggcataattaaaatagatgatggtgaccatgagaggttttcagaaagtgaagatactgaggttctttacgaaaacacaggtatttcaaggtattttttgaggtcttttaacagagaaattacagaagacatgaagattgaggattttttgcaggaggacttaaatctttcaaactccaaagatgcggttatacagagaaggcacagggcgtaccgaaaacttattctttcaccttctgtgtatagtgaaggacctgatgaccaagacttcatgtatataaaaaattacagaaatactatagcgaaagatttagagaagtatcttgatgcaaaacttcacctccacaaaacttctgcttttgtcctatttaatgacaacaaatatttaaggtcttattttcccgacaaaaacaaaaacatatctgatataatgctgcaggtaagtaaaattataagacaaatgattgaagatggaaaactcgcctataatcctgacgatactatagatataactgaagcagaatttataaatattattttgaaagtaaaggaaagatttagtgatggttggtataagtcttacagggagatgagtgaaaagcagcttatagaagaggtcattgaaaacatggaaagctttaagatgataaaaagagttgaggaattgcattctattaaaatactgcctatggcggcaaagctaattggggaatatcctccagattttgaaaaaggagaaggtgcagatgagtga

SEQ ID NO: 50962 - DNA, 4167 bp, Thermoanaerobacter sp. YS13
atgagtgaaaaattagccgaaagatggatgattaacaggattgggcttcttaatttttggtattatgatgatgaaatatttgagtttgcagatggaaggcttcttttaagaggtgctaatggttctggaaagtcagtgacaatgcagagtttcatacctttagtattagatggcaacaaaagtcctgaaagacttgatccctttggctcaaaggcgagaaagcttgaggactatcttcttggggaagaagaggtaagtgggcttgatgaaagaactggctatcttttcatggaatttaaaaaagagaaaaaagacagctacattacaataggcatgggactaaaggcgaaaaggcatcaaaatatggacttttggggctttgtaatacttgacggcaggcgtataggtatcgacttctttttatacaaaatggaaataggcgatgacggcaaaagagtaaaagtcccacttaccaaaaaagaacttaagaatagaataggtgaaggcggagaagtagttgaaagccaaaaagagtacatggaaatggtcaataaatacatttttggctttagttctatcgaggaatacgacgagctcataaaactgctgatacagcttagaagtccaaagctttccaaagacttcaggcctactgtgatatatgaaattatgaaagcttcactgccttctctcacagatgatgatttgaggcctctttcagaaaccatagaaaatatggaccagattaagatgcaccttgatgttctttacaggaatatggctgcagtaaaaaagcttaaaaatgagtacgacaattataacaaatacattctttatgaaaaggctggggatttagtaaaggcatacagcgatttatacgcatcaaaaaaagaatacgataatttaactaaagatattgaaaattacagaagtacaatagcaaacttagggaatgacatcatttctcttgaaagtgaaagagaagctttaaagaaaaaggaagaacagctttcaagtggtgatgctaaaagaacccaaaaggagttattagaagaagaggatcgatataagcagtatttggaggataagtctaaaaaagaagaagaactccggaataaacaagataaatattatggtttagaaagaaagataaaaaacactgaggaacaaaaatacaaactggataaagaactacaggataaattaaaggatatatcttcaattgcacaggatgtagatttcatggaacatgagttttctgtaagtgaacttaaaaaagtgtatggaaaagaatttgattttacttattggaaaaatgaattaaaaaagcataaagataaaataaagcgtgcaatgaatgcattgagagaagaaatagaagcaaataaaaggtatgatgccgcactttgtgagcaggaaaggcttaaaaaagaaagagaagacagggctaaaaagcttaatgaggcagaaaggctttttgacgaacaaaaaagagaatacgttgaaagagtttatagttggtcacagggcaatgcagaacttaagcttttaagtagccaattggaaggtttaagccgtgtcatactggcgtatggagaggataaaggatttgacgatattttggcttttgtgagaaaaccctatgaggaaatactaaatggaattcagcaagaaattttaagattagaaaatcaaagagaggtaaaagaaaatcagcttcatgagaaagaaaagttattggaggaatggaaaaacaaaaaagatcctgagcctgacagagatgaacaagtcataaacaacagaaaaaggcttaaagaagctggaattccttacattcctctttacatggcgattgattttaaagaggatgtggatgataagacaagaggcaatatagaagctgcgatagaagacatggggcttttggatgctcttatcgtgccaaaagaatattttgaaaaagctcttcaaatggacagcaatatggcggataaatatgttatgcccggaagctttaatatgatgttaaatgtatctcaatattttagagtagttgacaatgaagaaggggtttcaccagaatatatttcagatgctttaagcaatatatttgtatcagaagaaggtgggacaacctatatcgattcaaatggcgcatatggaataggagtaataaaagggaaagcacggaataaagttaaatcgaagtacatcgggagtgagtctagaaagcgctacagagaagagcttattaagtctatacaagaagaaatacaggctataaaagctgaaatatctgcaatcgatgaggaaataaatgcaaaaaaattaaggatacagaggctggattacgaatattcggcatttcccgggaaagaagacattgaagaagcatatagatatttaaaaacggcgaaggctgattacgaatacacctctcataaactggatgaacagctttttacagttaaaaactgttttgaggaccttcagaaaaagaaagctgttgtaagagaattgacatctggcataaacatacatccagatattgatacctattcttctgcgtatgaatatgtggaagaatacgcttcagggcttaatgaagtagaaatactatacaacaaatatgttttgcacatttcaaacgaagaaatgttattgcagcaaaaacaagatttagaatacgatattgataacttaaagtacgaaatagacgtactggaaaacaaaatacagagttctgttaagaaaattgagatgctaaaagagacattaaaagaacttggacttgaagaaattgaaaaagaactggagatttgcctaaaaaggctggaggaaatacctaaagagattacaaataaatcagcagaaaaagcaaaacttgaggagcggctacagagaagcttaaaagaccttttaaacattgaagaagagattcatcttaaagagaaaatttacaatattgttgaagagggtttaaaaaaggaattagcacttggctttatcaagcaagaggttgaaatggaggatatgttaaaattaagtaaaagcattctttctgaatacaaagtcttttttgacaaagcgggctttgacagagaaaagtttacagagagacttcaaaatgtgtattttgaaactcgcaatgaacttttggaatatgggctttcaattggcactatctttgatgaagtttatgagggagacaatgaaagaataaaagaggcaaagaataagcagagaaggctcaatatcacggcaaatataaatggtaaaattgtgtctttatatacgctttattctaatattgaagaagatataatggcgaatgaaagccttttaagagagactgataagattctttttgaagagattataatgcacaatgtgggaattaagataagagcaaagatttttaaagcagaagaatgggtaaagaaaatgaataaactcatgtctgaaagggatacttccagcggacttaagttctctattgagtggagaagcattcctgcttctaatgaagaagaacttgatacaaaagagcttgtggatattttaaaatccgatgctgatatgctgaaaaaggaagtcttcgataaagttgtaaatcattttaggtcaaaagtagaaagagccaggagggcaatggaggaaaaaaacaatacagaaacttttcacaagattatgaaagaaatattagattacagagattggtttgagtttaagctttactacaaaaaagaaggggaaagccgcaaggagcttactgataatgcttttaataagttgagcggcggagaaaaagcgatggctatgtatatacctttgttttccgcggtttactcaagatatgagggagcatcgccgactgcacctcgcataatatctctagatgaagcatttgcaggagttgatgatacaaacataagggatatgtttaaactgattgaagatctaagatttaattatataatgaattcgcaggttttgtggggagattatgacactgttcccaagctttcaatttatgaacttgtaaggccaaaaaatgcaaaggctgtattggtcatgaagtatttgtgggatggaaaggtaaagcaccttatacttcctgaaaaagaggaggttgccgctcttgaggtgggtgctgtaaatgaataa

SEQ ID NO: 50963 - DNA, 1296 bp, Thermoanaerobacter sp. YS13
atgaataaagaagaacttaaatattttaaagaaaaaaagggatacaagaggatttttgaaggtataagggaaaagtacagaagtttaggacgtcttggaggcgttgtaaagcttgataatcttacggaagatgaaaaagaagtacttacaaaccattttaaaaaagactataggacaaaaaaatctgcatccattgatgtggcaaagtttgaagaatcgctaaaaaatacgcgatttgaggagtatacgctaaaagacatactggaatactattttggcggaaaactcaccagcaaaaaagaggatatggaaatattggccaaagaaagagaagagttctttaaagagctcttctctaaataccaggaatgtaagtgcattgattggctaaaaagtttgtatgagggaaccgctgtaggggtaaggacagtaaaccagaggtatttaaatgatagaaatgggctaaaaaaagatataatgtatgtatgtgatgctataaataatttgcctgtttataaaggggaaaagaaaagactgccggtgttttcttcccagattgcacgtaatcctcactattttgattcaaatacagaagctggaagtatgtttataaacgctttatgcactttgttggggctgaatgaagtaaaaggaagtgaagaaatatcagaactttattacaacgttggtattttgatagatgaaatatccaattatgtcacactctcaggacttttggcatatgagggcgatacggaaaatcaagtatttaaggctgcttatgaaagcaatcaagtcttgcaagttcctcttttaaatttgagtaaaattgagagggtcataagcccttctaagaaagtgtatgctgtagagaatccttcagtttttacatctttaatagatgccacaagcaacgtatttcctcttgtatgtacatatggccagccaaaactttcttctctcctgcttttagatatgctttataaagaagggacagagatatattactcgggagattttgacccagaggggcttatgatagcagatagattgtacaaaaggtataaagacaagtttcactttttgaagtacggtgtagaagattatttaaaatctatttcaaatgaagtcataaatgaggtaaggcttagtaagctaaataagattgaatcacctttactctttgatgtggcaaaggagatgaaaataataaaaaaagcagggtatcaggagcttataatagatgatattataaatggtataaaaatgattgaagaaggtaagggggagtggtaa

SEQ ID NO: 50964 - DNA, 1533 bp, Streptomyces sp. 769
atgttccggttcaccacgggtgagaggtccgatctgtacggggcggtgctggacgccttcggtgcggccggcgagcgcctggaaacggcgctggggctcgacgccgtacgggaggggctgcgcgcggtggggtggctggcggcggtcgaggacgaggacctgcacgaggcgttgaagcagctggggcgctgggggctgctggaagtggtccagaaccacgcggagaactaccgcaccgccgaggagtacgaacgccgcaatctgcagtattcactgacccgtcgaggtgaggccgcgctcgccggggtgcggcacgcgctggaggtcctcgcctcgacgggggcactgcagacggccgtgctggaggcgatcgcggatcgtctcgacgagctgtgcctcctggccggtgagcccgcctcggccgatcgccggatcttcagcacgctgcgggagcttgaggggcacctggaggcgctggtggagaacaccaaggcgttcaacggtgagttgcagcggctgctgcgcgccgagggcgcggacctggaggtgttccgcgaggtgaaggccgccaccgtcgcgtatctgcaggagttcctggtcaacctcgaccggcgcggtcaggccgtggccactgccgtggcccgggtggaggcccgagggatagccacgctgcgggagcgggccttgcggggagccgagctgccaccggtggcaggtgaggatcccgcggccggctggctggagagccggcgggcacgttgggcgggcctgcgggcctggttcctgctggacgagggggtgcggccgcggatcgagcagctgcacgacatcgcccggcgggccatcgtctccctcttgcaggtcctggagcggatcaacgaatcgcggcgccgctcctccagtgccgtgcaggacttccgggagctggcgcactggttcgcggcggctccgggagaggaggatctgcaccggctgtggtcggcggcgttcggcctgggttcggcgcgccacgcccacctcgcccaccccgacccggagttgatcccgtcgtcgctgccgtggtcccaggctccgcccgtggaggtgtcggcactgctgcgtaccagcggcaggaccgagcggttcacccgtacggccaaggtgcgggatgtcgcggcggtcaaggcggagcgcgccgagcaggcccgcagggaacgcgccgaactcgcccgcgcatgggcggatttggcgaccgacggaccggtgcggctgtcctcctttcaggagctggacaccgccgtcttcgcccggctgctcgacctcctgggtcgagccatgtccaccctgccggatgccatgggagtgcggcgcgcgaccaccggcgacggccgggtggagatcgccctgtcctctcctcccgacagccgcaccgccgtgctgcggacggagagaggcgtgctggccggaccggactacgtcgtgtgcatcacggcggcgggtggagcgggtgcgttcccggcgccgcgcgccgcacgacaggaggtggcgggatga

SEQ ID NO: 50965 - DNA, 1365 bp, Streptomyces sp. 769
atgagcacgctcgccaatcagctggccgccgccgagcgggaagaggtggcccgcggcatccgcctgctgctggctcgccccctgctcaccgaggccgccgacccgcccggtttcgatctggtgcggcgccgccgcgagccgctggccaagtggttcgactacacctgtggctggagcctggtcgtggagccccgccgcgggtacgcgcggctggccaaggtccgcgccggtgtcgatgcctcccgcccggcccgcagggcgcgttccggccgggcgccgttcgaccgccggcgctatgtgctgctgtgcgtgaccgcggccgagctgctgtcgatgccgatgacgaccatcggcctgctcgccgaccgcgtcgtgcaggccacggcgacagatcaggcgctgcccgccttcgacccggtccaccggccggaacggatggcgttcgtcgacgtcctgaagttgctggaggcgtacggcgtgctgcgggccgtggacggcgcgaccgaggcgtacgtggcctcaccggaagccaaggtgctctaccgagtggacaccaccttgctgatgaggcttcccacggctcctgtcggagcctcccggctggccgtgccgccggacgaggtgccgctgcggttcgaggagctgctggccgggctggtgcgggagcggcgttacggcggcgcccccgaagcggccggtagcggcgagcgggaggaagtacgaaacgagcccgcagccgcctcggacacgcagcgcaacctgtggctgcgccactcggtcctgcgccgcctcttcgacgaccccgtcctctaccgcgtggacctcaccgacgaggagctggcctacgtcacctccctgaccggacgtcagatcctgcgccgctcggtcgagcaggccggcttcgtcctggaggaacgggccgaggggttcctgctcgtcgatccggacgcgctcgccaccgacctccgcttccccgacgacgcgtccaccgccagggttgccgcgctcctgcttctggagtcggtctgctcctcgcccgggggaatgctgcccgaacagttcgccgaggccggcgccgatctcctccgtcgctttccccgttgggcgaaggcgtaccagtccgcggacggtgcggtgcggctggtcgaggacgccgtgcgggtgttgtgcgacgtcgggctggtccggcgggccgggggccgcgtcgtcgcgcgcccggcggcgtaccgctaccgcctcgccgagacgacgagcaccgatgcggacgaccggcgcagacacagacacggaacggccgcgaacccgcctgcgacgccgagtacgacgcccgcgttcgacacaccggacgaaggagacgagcagtga

SEQ ID NO: 50966 - DNA, 4251 bp, Streptomyces sp. 769
gtgacggaacttccgctgccccggacaccggaggcgcccgccggtccgccccagtcgcccggggacgcggtggacgtggcccggggccgctggcagccgtaccgcgcgggcattctcaacgtctggcgctactacgacgagaccttcaccttccaccagggtcgcctgctgctccgcggccagaacggctccggcaagtccaaggccctggagctgctgctgccctacctcctcgacgccagcctgcgccccaaccggctgtccaccttcggtggttcggagcgcaccatgcactggaacctgctcggcgagggcgcctccggcaagacccgcgtcgggtacgtgtggatggagttccgccgcatcggcgaggacggcacggagcagtggttcggctgtggagcgcggctgcaggcgagcgtgcacaccagcggggtgcacgccgactacttcaccaccacgggccggatcgcccaccccgacggtctgtccctcaccaacgagtccggccagccgctgacccgagccgccctcgccgaggccgtgcgcgaccacggcgcggtgcacgcctcgtccgccgactaccgcaccgcggtacggcgagggctcttcgtgggcatgggcgagcagcgctacgagtcactgctgaccgccctgctccaactgcgccaacccaaactgtccgagcggctcgacccgtcactgctctccaccctgctgtcccgcgccctgcccccgctgggcgaggccgaggtcgccgaactcgccgagggcttcgaacggctggaccgccagcgcgaacacctcaggcagctcgacgaggaggtggcggcggccgagaccgtcgcggcccgccagcgcagctacgcccgacgggtgctgcgtgccggttccgccgcactgatctcggcgaccaccgagatggacaacctcacccgtgtcgcccgccacagtgcccaggaacacgaacgggccctggaagggcgggagtcggcccaggtgcaacgggaggaacaggagcggcgcgggcacgccctggaggagaccatcgagggcctgcgggagagcgacgcgtaccggcagggcgaggaactggaccggctgcgccgccgtacggaggaagcggccgccaccgccgggcggctgtgtaccgccgcacggaccgcgcgcgaccgggcggaagacgaccagcggcgcgccgacgaggcggtgcgccgtgcccgcacactcgacgagcacgcccaccaggccgccgaggaggcccaccggtccgctcggacggcgggcctggagtccgtccaccacgaggcgaaggcactcctcgacgaggtacgcgcgcccgccgacggcacggtgtcggcgaggggcgccggcacgaccgagatcgcaccgcccgacagaacgacggccgaggaccgggcccggtgggtccggcagctgctccggggcgcggtcaccgcccggcgagcgcagatcacactcgtcgccgaggccatggaggcgtacgagcgggcggtgcgcgaccgcggcaccgccgaggagacactggaacagacccgcacccggctggccgaagccgccggtcggcgagacgaagcagctcgcgcctgggacgacgcactcgccgcactggcagggcggctgcgcgtctgggccgcgggctgtacggaactccggatcgccgaccctgaggagctggtggccaaggcggcctccgagacccaggtgacggcccaagtggaggccgccgcgcgcacggtggagcgagagatcaccgagggcgaggccgcagcccggggcgtgcgccgggccctgctggacgagcgcaacggcctggtggaggaggtggagcggttgcgcggagagaccgacctgccgccctcgcccccgcccacccgcaccgcggacagatcgacgatggccggcgcgccgctgtggcggctgatcgccttccgcgaggacgtccccgtcgccgtccaggccggagtggaggccgcattggaggcgtcgggcctgctggacgcctgggtcggttctgacgagagcgtcacgctacccggccacgacacccgggccgaggcggccctggccctgtccgccccgggcaccagcctgctggaggtgctgcgcccggaggaggacctcccggtcccggccgaaaccgtcacccgcctcctcgcaggcatcgcgtacggcacgcgtctgcccgacggccatccggcggccgtctccgcggagggcgcctggcgcctcgcacccgcgacgggcacctgggacaaaccggagcccgcccacatcggcgccctcgcccgtcagcgggccaggcagcgccggatcggcgaactgaccgaccgcgtcagccggaccaacgcctcactggccctgctcgacgatgagctgcgcgccctgaccacccgccgcgcccggctggacgccgacctgtcgacccgccccgaccaccgggagctcgacgcccggcgccgtgaccgggaccgcgccgaggaacgagtggccgcccgggacgactccgtccacgacgccgccgcacacctggaggagcgcgagaacgacgtggcagccacgctgcgcgcgctcagccggcagtcggcggaacacggcctgcccaccgaccgcggccgactgcgcgaactgtccaccgccgtcgacgcgttccgggacaccgccgacacctgggcggacgcctgtctgaacgccgtcgcggcggccggcggcgccgggcagctggccacgcaggcggcccgatcggatcagaccgcccgcgaacgatccgaggaagcggcggccgcacaggccgaggccgaggggttgcgggcgcgtctgacggcggtggagtccaccgtcggcgaggactatcggcaggtcgtcgcgcgcgtcgccgaagcacggaacgcgctgcgccgctgccgtgaggaagcacggcacgcgagcgaacacctgctccgtctggagcggcgcatcggggaactgcgagccaccagcgaacgggacgccgagcgccgggaacaggccgtcgcaacccgggacggcgcggcacaccgcttccgccacctgtgcctggccggcctggccgaggacgccggcagcacgctgggactccacgccgaggacggggccaaggccaccctggaggccgcccgtgcgacagcggcgaagtggccggacatcccacacgccccacgcaacctcggcgacgccgccacccgcctgtccgaggcggtccaccaggcccgtcagcacctcggcgcccgcaccgacctggacctggaggccgacgaggacgtccagctcttcactgccagcctggacggcgtacgcgtcggggcggcgggcctgctcggcacgctgacgcaggagcgcgaccgcagccgcgacgacatcaccgccgcggaacgccgcctgttcgaccagatcctcaccggcgacatccgccgccatctcgcggcccgcatccgccaggccggcgaactcgtcgaccggatgaacggccacctggaacacgtccgcaccgcctccaacgtcgccgtccagctcgtgtggcagatccgtccggacctccccgacggcacccgcaccgcccgcgagctgctgctcaaggacccggggcgggtcaccgagggcgaccgggaggcactgcacacgttcttccgctcccgcatcgaggaggccaaaggaagtgacacggcggcgagttgggaggagcagctcggcgaggtactcgactacaccgcctggcaccagttcaccgtccgcctcgaccgcgcgaacggggcgggctggcaaccgctcaccaagaaactgcacggcgcactctccggcggggagaaggccatcgccctccacctgccgctgttcgccgccgtctccgcccactacgaggccgtgcccgaggcaccgcggctgatcctgctggacgaggtcttcgtcggcgtcgacaccgtcaaccgcggacaggtcttcgccctgctcaccgcgctcgacctggacctcatgctgacctccgaccatgagtggtgcacctatggggagttgcccggcatcgccgtccaccagctcctcaccggcgccgacgacgacgcggtcaccagcgcccgcttcgtgtggaacgggacggacctggagacgccccaggacgcaccggcgtcgcgggaaccgtcgcgggaacaacagcccaccgccatggccgacgagcggtacacgccgtcaagcgtgacgacggagccggcgccatga

SEQ ID NO: 50967 - DNA, 1269 bp, Streptomyces sp. 769
atgacgcacagcggaacaccccggggcgaacgggccctggcccgcaccgaactgcgcccactgtggcaggcggtccacgaccgcctgtcctccggccggcccgtcacccgcgtgcgcctcggccccctcgacgacacccaacgcgaagccctcgccgacctcctcggcctggaccgcctgccggacgcgcgcccttccgtccttctgtcccgcctggaagaagcggtggccgagagctgcggccacacggtacgcgacgtcgtcaccgaactgatcggcccgctcagggaccgagcgtccgaacggcgccgcgaggaggacgaacgggccgccctctggacgtggttggacggccacagcaccgtacgggcgcagcccgcactcgccgactggaccgcctcctgccgagccgccggcctggtcggcggctcaccggagcgaacccgcaccctgctcaccgacgcgctcgcagtgctcgcggcgctccccgcccgaggagagccactgcccgccttcgccgcccgggtcctgaacggcgactcccacgccctcgacgacggcacccgcgtcacctccctggtgctgcgtgccctggcggccctctactgcgccgacccaccacagtccgcagaggatcggcgcgccctgtggggccgtgccggcatcgcggacgacgagctgtccgccaccgtcctcgccgccgggctgcgacccgtcggcgacgggccgctcgcccgcgtgacacgggcgtgcgccgaggccgggcaggcggccagcctcaccctcgcccagctgcgcgccccaggcaccttcgccctccccacgggggccgcgccggtcgtccacatcgtggagaaccccagcgtgctggccctcgccctacgccgtttcgggccgggctgcccgccactcgtctgcacgtcgggatggcccaacagcgcggccgtcaacctccttcgcctgctcgcggaccacgatgcggccctgcgctaccacggcgacttcgacggcgaaggcatccgcatcgccgcgtacgtcctggacaagacgcccgcccggccctggcgcatgacggcagcggactaccgcgccgcagccgcccgcacaccgcacggccctcctcccggccgtttgaccccggccccctgggacctggagctgaccacggcgatggcacagcacggaatcgccgtagtcgaggaactgatcgccgacgtgctcctggaggacctggccgatgccactcggccggcacgagcacagcaatga

SEQ ID NO: 50968 - DNA, 1554 bp, Streptomyces pluripotens; identical to SEQ ID NO: 50956

SEQ ID NO: 50969 - DNA, 1383 bp, Streptomyces pluripotens; identical to SEQ ID NO: 50957

SEQ ID NO: 50970 - DNA, 4158 bp, Streptomyces pluripotens
gtgagcgtgacggacctccccctcccgcggcggcccgagcccaccgagtcggccgggacaccgacggcggctgcgggcgccgtccgcagccgctggcagccgcaccgcgccggcatcctcaacgtctggcgctactacgacgagaccttcaccttccaccagggccggctgctgctgcgcggccagaacggatcgggcaagtccaaggccctcgaactcctgctgcccttcctcttcgacgccagcctgcgccccaaccgcctctccaccttcggcggttcggaacgcaccatgcactggaacctgttgggcgaaggcgccaccggcaagacccgcgtcgggtacgtgtggatggagttccaccgcgccggcgacgacggcaccgagcggtggttcggctgcggggtgcgcctgcaggcgagcgtacacaccaccggggtgcacgccgactacttcaccactggctccaggatctcccgccccggcggagtgctcctcgtcaatgaagcgggacagccgctgacccgagccgccctcgccgacgccctccgcgactgcggcgacgtgcacccctcggccaccgactaccgcacggccgtacgacgtgaactcttcgccggcatgggggagcagcgctacgagtcgctgctgtccgccctgcttcagctgcgccagcccaaactctccgaacgtctcgacccgtccttgctctccactctgctgtcccgcgccctgcccccgttgggcgaggccgagatcgccgaactcgcggagggcttcgagcggctggaccaccagcgtgagcacctcaggcggctcgacgacgaggtgacggcggccgggaccgtcgcatcccggcagtccgcctacgcgcgacgcgtcctgcgcgccggtgccgccgcgctcatctcggcaaccaccgagatggacaacctcacgcgggtcgcccggcagagcgccaaggagctggaacaggcactggcgcaacgcgagtcggcccgggccagccgccaggaacaggagtcgcgcgcgcacgccctggaggcgaccgtcgagggcctgcgggagagcgacgcgtacaagcagggggaggaactcgaccggctccggcgtcgcacggacgacgccgcagccgtcgccgggcggcagcgggccaccgccgaggccgctcagaccggcgcggaggaggaccagggccatgccgagcaggccgcgaggcgagcccgcatcctcgacgagcacgcgcgcgaagccgccggggaagcacaccggtcggcccgggcagcggggatggagtccatccaccacgaggtccgggccgttctggacacggacctcgtggtggccgtccccgacggcccggggggtgaggcgggcgggcgccgtccggagggccccagcgccacacgcaccacgggcgaggacggggccccacaggcccgtagactgctgcgcggcgcggtcaccgcccgacggcagcagctctccctggtcaccgaggcgatcgaccagcacgctcgtgccgtacgcgaccggggtgccgccgaggacctgctggacgaggcccgtacccgccttgcggaggcgatcgcccggcgggacgagacgtccggcgcctgggacgacgccctggccgcacaggcagagcggctcatcacgtgggccgagggctgtgcggaactgcgcctgaccgatccgggcgacctggtggccgcagccgcgaccgaggccgaggtgatggccctggtcgaagccgccgcgcgcccgctggagcaagagatctccacggccgaggccaccgtgcgggccacacgcgagagcctgcgggacgagcgcactcgactcggggaggacgtacgaaggctcagcagcgagaccgacctcccgcctccacccccgctcacccgcaccaccgcccgcacggcgacggcgggagcaccgctgtggcgactggtcgccttccgcgaaggcgtcccgcttcccgttcaggccgcggtggaggcggctctggaggcctccggactcctggacgcctgggtcagcccctacgacgggatcacgctgccgggccacgacacccgcgccgaggcggccctggccacagccgccccggggcccagtctgctggaggtgctgcggcccgaggaacacatccccgtcccggccgacacggtgacccgcatcctcgccggtatcgcgtacggcagcacactgcccggcggtcacccggcggccgtctccgccgacggcgcctggcgtctcgcactcgccaccggcacctggaacaaaccggaaccggcgcacatcggcgtccccgcgcgacagcggaaccgccggcgcaggatcggtgaactcaccgagcgcatccgcgagacgaacgcctccctcgccgcgctcgacgaccaactgcgcggtctcgtcgctcgccggacccggctggacgccgaccgcgatgcccgccccgaccaccgggaactcgacgcccgtcggcgcgaccgggagcgcgccgaggaccaggtggccgctcgggacgacgccgtgcgcgacgccgccgggcaactggcgtcccgcgagagcgaagtggggggtgcgctgcgcacgctcagccggcgggccgcggaacacgcactgcccaccgaccgtgacctggtgcgtgaaatctccctcggcatcgacaggttccgggacaccgccgacacttgggtggacgcccgcctcaccgcgaacgccgctgccgaccgggcccggcagacggccgcacaggcggaccgttcgcgccgcaccgccgaggaacagaccgagaacgcggccgccgcagcagtggaggcggcgggcctgcaagcgcgcctgcaagcggtggaggccaccgtcggcgaggactaccggcaggtcgtcgcacgcgtggctgaggcgcgcgccggactgcggcgctgccgtgaggaggccgaccgggcagccggactcctgctgcgcctggaaggccgcatcggaggactgcgggccactagtggtcaggacgccgaacgacgggagcaggccgtcgcgacccgggacggtgcggggcaccggttccggcacctgtgcctggtcggactggccgaggacgctggcatcgcaccggaagccgatgtgggggacggcaccaaggccaccctggaggcggctcgcgccaccgcggcgaagtggcccggcatcccgcacgcgccacgcaacctgggggacgccgcgacccgcctctcggaagcggtccacgaggcccgccggcacctcggcgcccgcgccgacctggacctggagcccgatgacgacatccaggtcttcaccgccaccctggacggcgtacgggtgggggcgacgggcctgctcaccgcgctcacccaggaacgcgaccgcagccgcgaggacatcaccaccgccgagcggcgcctcttcgaccagatcctcaccggcgacatccgccgccacctcgcggcccgcatccgccaggccggcgaactcgtcgaccgcatgaacggtcacttggagcgggtccgtaccgcctcccacgtcaccgtccgactcgtctgggacgtgcgcccggaccttccggacagcacccgcaccgcccgccagctgctgctcaaggatcccggccgggtcaccgagaccgaccgggaggccctgcacgcgttcttccgcgcccggatcgatgaggccaagggcaacgacacggccgcgagctgggaggaacaactcggcgaagtgctcgactacaccgcctggcaccgcttcaccgtccgcctcgatcgtgcgggcgggaccggctggcagccgctgaccaagaagctgcacggcgcgctctccggcggagagaaggccatcgcgctgcaccttcccttgttcgcagccgtcgcagcccactacgaggccgtgcccctggcgccccgccccatcctgctggacgaggtcttcgtcggcgtcgacaccgtcaaccgcggacaggtcttcgccctgctcaccgccctggatctggacctcatggtcacctcggaccacgagtggtgcacctacggcgagctgcctggcatcgccgtccaccagcttctcaccgacggggacgacgacgcggtcaccagcgcccgcttcgtctggaacggcaccgggctggaggcgggatga

SEQ ID NO: 50971 - DNA, 1251 bp, Streptomyces pluripotens; identical to SEQ ID NO: 50959

SEQ ID NO: 50972 - DNA, 1554 bp, Streptomyces sp. MUSC 125; identical to SEQ ID NO: 50956

SEQ ID NO: 50973 - DNA, 1383 bp, Streptomyces sp. MUSC 125; identical to SEQ ID NO: 50957

SEQ ID NO: 50974 - DNA, 4158 bp, Streptomyces sp. MUSC 125
gtgagcgtgacggacctccccctcccgcggcggcccgagcccaccgagtcggccgggacaccgacggcggctgcgggcgccgtccgcagccgctggcagccgcaccgcgccggcatcctcaacgtctggcgctactacgacgagaccttcaccttccaccagggccggctgctgctgcgcggccagaacggatcgggcaagtccaaggccctcgaactcctgctgcccttcctcttcgacgccagcctgcgccccaaccgcctctccaccttcggcggttcggaacgcaccatgcactggaacctgttgggcgaaggcgccaccggcaagacccgcgtcgggtacgtgtggatggagttccaccgcgccggcgacgacggcaccgagcggtggttcggctgcggggtgcgcctgcaggcgagcgtacacaccaccggggtgcacgccgactacttcaccactggctccaggatctcccgccccggcggagtgctcctcgtcaatgaagcgggacagccgctgacccgagccgccctcgccgacgccctccgcgactgcggcgacgtgcacccctcggccaccgactaccgcacggccgtacgacgtgaactcttcgccggcatgggggagcagcgctacgagtcgctgctgtccgccctgcttcagctgcgccagcccaaactctccgaacgtctcgacccgtccttgctctccactctgctgtcccgcgccctgcccccgttgggcgaggccgagatcgccgaactcgcggagggcttcgagcggctggaccaccagcgtgagcacctcaggcggctcgacgacgaggtgacggcggccgggaccgtcgcatcccggcagtccgcctacgcgcgacgcgtcctgcgcgccggtgccgccgcgctcatctcggcaaccaccgagatggacaacctcacgcgggtcgcccggcagagcgccaaggagctggaacaggcactggcgcaacgcgagtcggcccgggccagccgccaggaacaggagtcgcgcgcgcacgccctggaggcgaccgtcgagggcctgcgggagagcgacgcgtacaagcagggggaggaactcgaccggctccggcgtcgcacggacgacgccgcagccgtcgccgggcggcagcgggccaccgccgaggccgctcagaccggcgcggaggaggaccagggccatgccgagcaggccgcgaggcgagcccgcatcctcgacgagcacgcgcgcgaagccgccggggaagcacaccggtcggcccgggcagcggggatggagtccatccaccacgaggtccgggccgttctggacacggacctcgtggtggccgtccccgacggcccggggggtgaggcgggcgggcgccgtccggagggccccagcgccacacgcaccacgggcgaggacggggccccacaggcccgtagactgctgcgcggcgcggtcaccgcccgacggcagcagctcttcctggtcaccgaggcgatcgaccagcacgctcgtgccgtacgcgaccggggtgccgccgaggacctgctggacgaggcccgtacccgccttgcggaggcgatcgcccggcgggacgagacgtccggcgcctgggacgacgccctggccgcacaggcagagcggctcatcacgtgggccgagggctgtgcggaactgcgcctgaccgatccgggcgacctggtggccgcagccgcgaccgaggccgaggtgatggccctggccgaagccgccgcgcgcccgctggagcaagagatctccacggccgaggccaccgtgcgggccacacgcgagagcctgcgggacgagcgcactcgactcggggaggacgtacgaaggctcagcagcgagaccgacctcccgcctccacccccgctcacccgcaccaccgcccgcacggcgacggcgggagcaccgctgtggcgactggtcgccttccgcgaaggcgtcccgcttcccgttcaggccgcggtggaggcggctctggaggcctccggactcctggacgcctgggtcagcccctacgacgggatcacgctgccgggccacgacacccgcgccgaggcggccctggccacagccgccccggggcccagtctgctggaggtgctgcggcccgaggaacacatccccgtcccggccgacacggtgacccgcatcctcgccggtatcgcgtacggcagcacactgcccggcggtcacccggcggccgtctccgccgacggcgcctggcgtctcgcactcgccaccggcacctggaacaaaccggaaccggcgcacatcggcgtccccgcgcgacagcggaaccgccggcgcaggatcggtgaactcaccgagcgcatccgcgagacgaacgcctccctcgccgcgctcgacgaccaactgcgcggtctcgtcgctcgccggacccggctggacgccgaccgcgatgcccgccccgaccaccgggaactcgacgcccgtcggcgcgaccgggagcgcgccgaggaccaggtggccgctcgggacgacgccgtgcgcgacgccgccgggcaactggcgtcccgcgagagcgaagtggggggtgcgctgcgcacgctcagccggcgggccgcggaacacgcactgcccaccgaccgtgacctggtgcgtgaaatctccctcggcatcgacaggttccgggacaccgccgacacttgggtggacgcccgcctcaccgcgaacgccgctgccgaccgggcccggcagacggccgcacaggcggaccgttcgcgccgcaccgccgaggaacagaccgagaacgcggccgccgcagcagtggaggcggcgggcctgcaagcgcgcctgcaagcggtggaggccaccgtcggcgaggactaccggcaggtcgtcgcacgcgtggctgaggcgcgcgccggactgcggcgctgccgtgaggaggccgaccgggcagccggactcctgctgcgcctggaaggccgcatcggaggactgcgggccactagtggtcaggacgccgaacgacgggagcaggccgtcgcgacccgggacggtgcggggcaccggttccggcacctgtgcctggtcggactggccgaggacgctggcatcgcaccggaagccgatgtgggggacggcaccaaggccaccctggaggcggctcgcgccaccgcggcgaagtggcccggcatcccgcacgcgccacgcaacctgggggacgccgcgacccgcctctcggaagcggtccacgaggcccgccggcacctcggcgcccgcgccgacctggacctggagcccgatgacgacatccaggtcttcaccgccaccctggacggcgtacgggtgggggcgacgggcctgctcaccgcgctcacccaggaacgcgaccgcagccgcgaggacatcaccaccgccgagcggcgcctcttcgaccagatcctcaccggcgacatccgccgccacctcgcggcccgcatccgccaggccggcgaactcgtcgaccgcatgaacggtcacttggagcgggtccgtaccgcctcccacgtcaccgtccgactcgtctgggacgtgcgcccggaccttccggacagcacccgcaccgcccgccagctgctgctcaaggatcccggccgggtcaccgagaccgaccgggaggccctgcacgcgttcttccgcgcccggatcgatgaggccaagggcaacgacacggccgcgagctgggaggaacaactcggcgaagtgctcgactacaccgcctggcaccgcttcaccgtccgcctcgatcgtgcgggcgggaccggctggcagccgctgaccaagaagctgcacggcgcgctctccggcggagagaaggccatcgcgctgcaccttcccttgttcgcagccgtcgcagcccactacgaggccgtgcccctggcgccccgccccatcctgctggacgaggtcttcgtcggcgtcgacaccgtcaaccgcggacaggtcttcgccctgctcaccgccctggatctggacctcatggtcacctcggaccacgagtggtgcacctacggcgagctgcctggcatcgccgtccaccagcttctcaccgacggggacgacgacgcggtcaccagcgcccgcttcgtctggaacggcaccgggctggaggcgggatga

SEQ ID NO: 50975 - DNA, 1251 bp, Streptomyces sp. MUSC 125
atgacccacgcggaaacggacctgggcgaacacaccctgcgccgccccgaactccgcccgctctggcacacggtccacgaccgtctctcctccggccgccccgttacccggatccgcctcggaccgctggacgaggccgagcgcgaggccctcgccgacctcctcggcctggaccggctgccggccccacgcccgtccttccccctggcccaactggaagaagccgtcaccgaactgaccggccgtacggtccgcgaaaccgtcaccgagctcgtcggtcccctcggcgaccgtgcgggcgaacgacgccgtcaagaaagggaacgcgcaggggtgtgggcctggctggccggccacgacaccgtgcgggctcagcccgcgctcgccgcatgggcctcctcctgtcgggccgtcggcctggtcggcggttcaccggaccgcacccgggcccagctcaccgacgcgctcacggtgctcgcggagctgcccgcccaggccgaacccctgcccgtcttcgccgcccgcgtactcaacggtcatgcccacgcactcgacgacggcacagctctgtccaccctcgtcctgcgcgctctggcgaccctctacgacaccgccccgccgcagtccgcggcggaccggcgggccctgtggacgcgcgcgggtgtcgccgacgacgacctgtccgccaccgttgtcgtcggtggcctgcacccagccggcgacggcacgctcgcccgagtggcccgcgtctgcacccaggccggacaggccgccagcctgaccctcgcccaggtgcgggccccgggtgagttcgtcctcgccaccgagcccgcacccgtcgtacacgccgtggagaaccccagcatcctggctctcgccctacgccgtttcggccgggactgtccaccgctcgtgtgcacgtccggttggcccaacagcgcgtccatccgcctcctgcgcctcctcgcggaccggggggccactctccgctaccacggcgacttcgatggtgaaggcattcgcatcgctgcgtacctgctggacaagacgcaggcccggccctggcgcatgacggcggcggactaccgggccgcagtcgcgcgggcaccgcatggcccagggcccggccgtctcaccgacgcgccctgggatctcgaactgacgcgcgccatgacggaccacggcatcgccgtggtcgaggagttggtggccgacatcctcctggccgacctggctgacaccatgcggtag

SEQ ID NO: 50976 - DNA, 1512 bp, Bacillus sp. B-jedd
atgaagctagaacaaagattactccgaccctttacaaaagctaaatacctaagtgaagagaactacaaacgttatacggcgattattcactatctgtatcatcagcatgaggtatattatgctcctccatctttaccgaattctatactgaattttatcaaggaaaacgataccttagacttctttatcgactatgatcttactaaattagaagcggatttaaatatgttagaaggttgggggaatgtcatttctcatcaagattctgggaatgttagtaggatagaagattttaatcgtaggaaattacggtatcaatgtacgcctgaaaccattgagattgaaaggttgttcgaaaaactaaatagtcaaattaatcgggtgaaaggttcactggattctaatttggtgaattccctctccagtttaatgatagagatagaaacgtataaaacaaagtctattatgagcaaagaagaaaggaaagaacttagccagctttggaatcaaattttcgctcaatttgataacctacgaaaagagtcatccgactatctagggattattcatagtaggaacatcgatgatgcgatgcaaaacaaagaaataagcgcatttcggctgaaatttacagagtatttaacaagttttattattacactccaaaggaatgttcacattatagagtattccattggtgaaattgaaaaggatctcatccatcgcgtcataatagcacttatcacggagcataaagagaagccttccttggatgagcctctttcagaagaagaatatcaagaaatctatatgaatcaatggaatggcttaaagaaatggttcaaatacgatgaatacaatgaacggtttgtggactatctattgaaacaaaccaatgaaactattagtcgtttcacgaaatatttgcagcaaatcagcgaacgagaccaacaaatcaaaagtcgtaaaaaggattttgaacatattgcccgcttattcaaaaacgaagaaaacttaggtttgtgtcaaaaaagttttgctgccatgaccaacgttgaaaaacttcaccactttgtctcacaagctaatcgggaagtcgattcagataaatttttatatgaccatgaacctgaagtagtagcgattaaaagtgcaaaagacattaatgtaagaaaggaaaggaaaagagcctccatagaacccacaccagaggatttaatggagattgaacggttacgaaggcaaaaagaatacgaggaaaatgaaatacaaaggttagtcgaaagaggaacagtcaaattgtccgaactagaaaatgttccacctttcatgagaaaaatgttattgcaatggattagttactccaatggaagagaaaaaatgaaaggaaaaactgaccaaggcataccgtatgtgctgcaaatacaatcggaagacgacatttcattaaaatgtacagatggaatacttacaatgccggattatgtctttgaatttggggtgcaaagatga

SEQ ID NO: 50977 - DNA, 1197 bp, Bacillus sp. B-jedd
atgaaaatagatattttccatgatgaagaactagaatatgacaagaaaaatcatgtaaaacctgttgtaagggaatgtatctatgaattaatggaacgcttctgggtattaaaggataaaaacgaacagctgttttatcaaattaaagacaatgaagtagagattaaaaagttctttcgagatacctttcgttaccggttaatatccaatcatgatatggtcaaagtagaaaaaataccagtggtcccacattcttggatgggggagaaggaagttaaaagcacacccgtttttaaaagccaaatggattacgcttttttcttttggattcttgcctttctggaagggaaaaacgtcaatgaacaattttctttaaaaaatatgtgtgactacattcaaattcaagaagaaggcaaattggtttggaaagaaggagctggatatcaaaaccggttatccttagttcgaaccatgaaatacgcagtaaaaatggatttaatagaagtacgagataaagatgtagaggattttgccgggaaccacaatcatgatgtgttatttcagcgaacactttatagttcttactttatgagacgctttaatgaggatgtcaccaattgggaatcgttatctgactttatagcctatctccaaaaagaaaacacagaaatgatagataggaaacatcgttattatcgtcgcctgtttcttgagccaattgtctatcatgacgaattaacccaagatgaaatcgagtatatccgaaactattatgcgggggtagacaacaacttataccgttttaccgactacaccttcgaacgatataaccgtacatccatgatagtgaagaatgaagttaatatgggtgagaatgtcttcccaacggaaaacatgaataccaaactgattatgttgtttgcgaattatattcaccagaggtcatttgcgtatccgttggataaaaggaacaaaattgaattaaccaaaaccgaatgtgatagtattctctcggatttaaaaaaggagtaccgtcagttctggacgaaaaaaatgcgacaacaagatgtagaagaaatacgggggacattattaaaggaaatgaagaattggagttttgttgatgaacaggaagatggcaccctgttattaaaagaggggctatttcgatttgtcggtgattacttctatcaatag

SEQ ID NO: 50978 - DNA, 4161 bp, Bacillus sp. B-jedd
gtggaagaaatgaatgaaattgaccgttggataatgaatcgagctgttttctataattattggtattacccgaaccaagaactaatctttaaggatggatgtgctgttttaagaggacacaatggtagtggtaagtcggtcaccacgcaaagtcttatcactatattgttggacggagatgtaagaagccataaattagacccatttggcggaagagaacgaaaaatttccgataccgtactaggtgaaaaagaattattgggattaaaccatcggatagggtatattgcattggagtttaaaaaagggaaatcaggagtgaccaaaactatcggaatgggtattgaagcagatagagagaagaaacaacctaaggtctggtactttattattaatggaaaacgaattggtaatagagaaagggatttacgactttatacaaccgaaacgattgatggagaagtaagatccatcccccgaaatgaaaaggatttgcgaatgacgattgaggggaaacttcaatgtgggaaggtctataacaatcgtgatgaatatgcgtcaatggttaacaaacagctatttggatttgaaaatcttgaaagttataaagggttaattgatttattgcttcaggcgagaagcccaaaattaagtgaccaaaacaaaccagaaggggcagcctatgtattaaatgattcattgcctcagctgactgaagaagaacttcgaccgttaacctcttccattgaatcaatcaatcggttagaaaatgacctcattacatataaagaagatttaaaggaaatccggaaattacatgaagtctaccaggaatacaatgaagtggcttttacagagaaggctgactcatttttaagggcatacaaacaatatgaatgcacaaaaaagaggttagcagaaaagaggaaaaagctagaagatagtaataccaaactcggatccataaccaaagaaattagacaagccaatgattctttagaagtctataaaacagaaaaagccgatttaggtgtggaagagatagagtcagttctaagtaaaaaagactcacaattgaatcaattaaagaaacaaaaagaacgatacgaatcccttttgaaaaaaaaagaagctgcaaaacaagcgcatgatgtctataaaaagaaatatgaagaatccgaagcgaaaatgctacaaacagaaagagaattgcttggatacatggatgaacttaaagaaacttcgacagaactgagctttccatttcattcccaatattttgaacacttctctctgaatcacaaggaggataaggactacgatttccgtacatgggagcagttactccgaaattatagggcgaccatcaataaggctaaaagagaaatagagaaatatgaacaactgagaagagatgtaacgacattggaaaacacgcttggggaaattcgaatgaaaatcgatgaagcccaaaggagaattgatgagacggatgaagaatatcaagatgaattacggcatattggagaaaaaatagcctactgggcaaaagaggcgacatcacttgctgttccaagggagatagtagacgggttgttatctaatttggacgatatctttgatgtaatcgataaagagaaatacttgggtgagttacaaaaacatgtttctgacataggagagaaggctcaatccgaagtactacgcttgaagatggaaatatcaaatgaaacacaaactattctgtccattcagaatgaaataatagagtgggaaaatgaaaaagaggtggagccggattttgtccttaccaaaaagcaagattgggataaattaaagcaggacaagataccattccaaccgttttatgaagcatttgaattccataaaggcattgagaacgaagaacaaagaattatccagaacgtattatatgaatcgggcattcttttgtcggttattgtaggtaaagaggatagtgaacgcgctgcttcctttgcttctgttttgaaatacaaccaagtaaaaaacaaaaatttataccaggttctacatgctgttgaaaatccagagtggaacgacgtgttaaaaggtatctcgtttgagaaacatggtgatgcctatgttcttggcgatggtacatttcaaaccagctttgtaaagggaaaggcttctctctacagtggtgacgtctatatcggtaaaactgcaagagaaaactttcggatgaaaaaaatagaagagttgcaaactctaaagggaatccatgaagacgccaaaaatggattagagcaaaatgttaatgattttcaaaagttaaaagaaaatatccaatcggaattgggtgcttttccaattcttgactcattaaaagaattgctaaaagacattgaatcggagaatgaccggattaagaatgtgtatgagccggaagctaaagaaaaaaaagaaaaaattaacttgttaactgacgaatcaaaggatattatgacagcagttaagcgaatggatttgccaatcatgaggttggaagtggattatcttgcagatgaggtcattcgaatagacggatatgcggagtgtttgcaggacattcaaaatagttataaagatagagttacagcttccgataatattgagaatttcatggaacaagcaaaaatacagtctcaattagagcaagatcaccattctgatatggtggatgtcgagcttgatatccaaaagattaataagtccatcaagggactgaatagacgattagaagaattaggggaacagaaaattctacaacgagtggaggaactttcgaaattaatcaacgataccattccaaatctcttgcgccaactatacggggatgagacggaaactaagcgtgatattactgatttcacaaatcaaatcgaagcaatagagcaaaatgaaattccgtttgataaaacggtattcgaagcttgggaaaatttgtttcatgaacaagtaagacttgggtacgtggaatttgaggaaaatatcgttaccctacaagaaaaagcccaaaatgcactcacgagactagggcatttaatcgataaaaatcgaaccaaaattgagggcgtaaagaaaagattgaatcagcgttttcaaaaatgcgcggtggactatcaaaagtatgaacctatcttagataatactcagtcagaacatatacccgtctacgagacccaagatgacacgaaaatacaaagtatcaacttcatcagagaacagatgtctcgaattattgttacgctagagatagatgaaatccgtttatctccaaaaaatgtagttgaccgattatcaaaacggatagaggatatggaaagagatgcgaatgaaaaagatagagaattgtaccaagaaattctcattaacactttgggtgacaaaattagacggaagatacagtatgtggaagcttgggaaaaagaaatgaacaaatttatggagcataaaaacctaattaaattccgaatcaaatgggttccgaaagattcggaaaaaccggaggaaatgaacacgcgagcactagtagaagcattgaagaaaaataccagatggatagatattgatgaaatcagtaatcatttccgctcaaaaattaaagatgccaaacgaaaatatgaaaatgaagctgaagctaatctccaacaaatcatgaaggaagtgttggattaccgaagctggttccactttgaaatatatttcaccaaaaaaggggataaggaaaagaaactaaaccggaacacctatggggaattaagtggagggcagcgcgttttggcaatggtgacccccgtactggcagctctttattctaaatatatggaaggaagagaagatgccccaagaatcttcacattagatgaagcatttgcccgtgtggacgaagagagcatcaatgtaatgtttgaatacatctacaagctgggatttaactacattcttaattctcagtcgctgtggggatgttttgagtccgtgccttcccttaatatatacgaattatctagaccggataatcgtccgtttgtagccattcaatcttactactggaatggaaacaaaagagtaaccgtagatgaagcttggatgcaacgagaaaaagaaggggaaatggtcaatgtcgccacttga

SEQ ID NO: 50979 - DNA, 1332 bp, Bacillus sp. B-jedd
atgtcgccacttgaggaactagttgaaatgtttaaacaggaaaatggctttaatcggcttttttcctccttttatgaacgttacagaagctatggaagacttgagaaaggaataacggtaatcattgaaaaaccgacagaattggaacgtgatgcaattggcgggttgatgggacacgattattccaaaaagaaaaaaataaccattacggcatcacagtttgaaagaggcttgcagaaaaccaaatatgggaaatggatcccggatatctccttaacggaaatcgtagagttatatgttggtgaaaagttgttaaccaaaaaagaagccgcaagtacctatttagaagataggtcttctttttttctgtcgttcaaaacgcctgaacatccagatgaattacaccaaattgtcgattggatattgagtgtagagaataaaaataatcgttattacgcccaattcaaacaaaataaagcggggattgaaaagaatctgaagaccttatctctactttttcaatcgttccctttgaaggaacccgtttatctgcccatatttgcttcgaaagttacgcgaaaccctcatgcgtttgacggaggaacagagagaggtgaaatcttaatccatgccttacaagttctacaagaaattatgaccggcgccaaaataaaaccttccttaaacgcagaagaaataaatgagttattgtttaaattcaacctattaagagatgatttaactaattatgtcaccatttttaatatagagggtaccaatcattcaggggagccaaacgagttattgcgaggtttagtgacagaaaaaagtgctgtgaatcttcctcttaaagaggtcatgaaactaagtatggtaagtgctaagaacaatactgtattcatgattgaaaactcaagtgtatcatcctatatcattgatgaattaataaggctaaataaggatgtttcaattatctgtggaaatggcttcttaaaactagctaccctgaaattcttggatatctttatccgaaacggaggaactatttattattcaggtgattgtgatccggaaggagtaggaattgcccaaaggttaataagtcggtatggtgaatctgttcgtttatttctctgtgatagagcatcataccttaagtctttatcagatgaaagcatagaaccatcacgactagctcaattaggaaataatatagaagataaggaacttcaagaagtgaaggatgaaatgctagctcataagaaagcaggttatcaagaaaatattttggatgaaattttgacatatgtgatgaatgatttatatatttag

SEQ ID NO: 50980 - DNA, 1605 bp, Mesorhizobium plurifarium
atgtatggaaaaaacgtcgtggtgcttgacgatcatccagaacaaagcaaaaacactcatcgtagcttagaggcagcgatctccatgcaatttgcgagcgactcagccgagctgttccggcacctgaatgcagacaaagctacgctctaccgctgcatcatggacgtcttcgccgcagcgaaacggcaatatcgccttcaattgagaccagacgaggtgctcgcggaaggccgatggccgaacggatcgccacgcatcgaggaaataaacgcagccctcgcccagttggcggaatggggcaatctggaatcgcacccggacaccgcgcgcgtgtccagtctcagcgatttttatcgcgcgcggtttctctaccgtctgtcgcagggcggcgaggcggtggaatcggcattggcggtcttcgtgcagacgttgcagcgacgtgccgaattgcagacggtggcgctcgaagacatagcgagccggctgctggcgcttgaagctctggccgccgaatccgagccggacgtggccaagatccacgagacgctacgggatctggtacgcgtgttcgagggtctggccgaaaacgcgcaggcattcatggccggcgtcgcccgcagcatcgagttgcagcaagctgaggcgagcgcggtcgcaaactacaagaagcggctgatcgattacctggagcgcttcatgggcgatctggtgcgccgctccgacaccatcgcccgcctcatcctcgccttggagccaagggtggacgccctgttgggtcaggtggcagagcgcgaatcgcgtgacgccgctcctggcagtgcgcaggatcaggccaatgcgcaagacctttacctgcaaggctggcgggaacgctggaaaggactacgcggctggtttctcagcactggccacgagctgccgcaagccgaattgctgcgagcgcgagcgcgctcggcaatcccgcaactgctggcggcgattgctgccctcaatgagcggcgcagcggccgcagcgatcgctcggccgacttccgcatgctcgctggctggttcgccgcttgcactaatgatggcgaggcgcaccgtctcgcgcgcgccgccttcgcgctcaatccggcacggcatttctcgctgaacgtcgatgccgacgctgcacttccggccagcacctcttgggctgacgccaagccgctcagaatccatccgcgcttgcgcgaatacggggaggccgcgccgcgcggaccgttgccgtgggtgcgcgaccgcgccgaggatcgcgctttcctggcgctccagatcgcggaagaatcgctgcaggtcgaggcggcacgcaagcgcctcgccaccggccaaacggcgcgcctttccgacttgggtgaactcgacactccttcctttggccttttcttggggctactcggagaagcgctgagcgaacaggccgggccggagatggccgtggaacggcagaccggagacggcttgctacacattcacctgaagccgcttgcggccgacagctatgcccgcatcgatacgccgcgaggcgtgttcgccgggcgcgaccacattatcaccatcacgcccctgcgaggcgccttgtga

SEQ ID NO: 50981 - DNA, 1128 bp, Mesorhizobium plurifarium
ttgcgggaatggttttcgcgcgagacgggctggccgctgcaggtcgagcgcgagggcgcgcgcctcttcaagcatcccggaaccgtgagcgacgcctcgcgcggcctgcccggctatgatcgtcgccgctacgtgctactgtgccttgcctgcgctgcgcttgagcgcgccgacccgcaaatcacgctgcgcctgctgggcgagaggctgctggagctcgccgccgagccggggctcgacttcaccttcacgctcgaggcccagcatgagcggcgcgaactcgtatgggtatgccgcaccctgctggggctgggagtgcttcatcgtgtggccggcgacgaggaaacattcgtacaagcccgaggcgagcaggccgatgcgctctatgacgtgcagcgccgtatgctcgccggtatgcttgcagccgtgcgcggcccgtcgacgtggataccgcaagaggccccggctacgctcgaggaacggctgcgtgcgctggtggacgcgcatgtagcggacagcaacgaaggccgccgcacggctctgcgccaccagctcgcgcgccgacttctcgacgatccggtagtctatatcgagaccttggatccagaagtccgagcctatttcctcaatcagcgcggaaccatggccgcccgcctcggcgacgccgctggcctcgttgccgagcagcgcgccgaggggctggcgctggtcgatgagacgggatttttgaccgacgttgccatgcccggcgaaggcacggacgcgcatgtgacgttgcttgtcgccgagcatctggccgcaggccaacggcagcgaaaatcgaatggcgccgagctagcgccggtacccgtccggggcttccgcgaacacgatattgccgatttcctgcgcgaagccagaacacgctacggtcgctactggcgcaagtcggcacgcgagccaggcgccgaacgcgagctcgccgtcattgcaatcgaacgactggaaaagctgcagctcgcattgttgaaggacggcaccgtctatccgctccccgcgctcgcccgcttcgcgttgggcgaggcgcaaatccgtgaaacccgcgacgtgccggccgttgccgccggtcccctcttcggaccgacatga

SEQ ID NO: 50982 - DNA, 4353 bp, Mesorhizobium plurifarium
atgaacgaccgccttgtcctgaccgccgtacagccgggaaagcctgtcttgccggtgccgacacgggaacgctggcagcccctgcgcctcggcctggtggagctgtttcactacgacagcgaggaattctggttccgcgacggccatctgctgttgcgcggcaacaacggcaccggcaagtccaaagtgctgtcgctgacgctgccgctgcttctcgatgcgcagctcaagccctcgcgcatcgagcccgacggggacggtggcaagaagatggcctggaacctgctgatgaacagctacgaccggcgcatcggctatgcgtggatcgagttcggccgcatcgccgaagacggtccgccgcgctatctgtcgctcggcgtcggcctgtcagcgacggctgcccgtccgcaggtcgacagctggttcttcctgatcgaggacgcggacgatgcgccgcgcatcagccaggatttgtggttgacgagcgcccaacgggtggtgctgaccagggaacgtctgcgcgatgccctcgaaggtcgcggccagctgttcgacaccgccgccagctaccgccgtgccgtcgacgagcgccttttccatctgggcaccaggcgctacgacgcgttgatggatactctgatccagcttcgccagccgcaactctccagaaagcccgacgaaaccgccctttcgaacgccttgaccgaggctctgccgccgctcgcgcccgaactgctcggcgatgtcgccgaggcgctgggccagttggaggaggaccgccgtcagctcgaggagtatcaagcgctggccagggctgttggccgcttcgaagagcgctatcgcgcctatgccggcacgcagacccgccgacaggcgcggttgctgcgccaggcgcagacggagttcgacaatgccagccgcgcgcgcggtgaagcccaggcccgtttcgatgaagcacgagcgcaggaagcgcttgcccgaaccgcccaccaggatgccgagatcgatctcgcgcgcgggcgcgcgcggctcgatacattacgctccgaccccacgatgcaggatgccaaccgcctcgaaggcgcgcagaaggaggctgcggcgcgacggcaagcaatgcgcagggcagccgaggcgctcgaggaggcgacccggcgactagggctcagcaccgaggaaacggaacgcgcggcccggcgcatggaacaggcggaaagtgttttgactgatctgcgccggcaaagcgcggcccacgcagatgcgaccggcattgccgcccagcatggtgcaagcccgcttgccgtatcccaagcgtccgaactggtcgaactgacgcggcaggccttcgacaaggcatgcgccggacttcgcagccttgttgacagccggcgcgagcagattgccgtgctgcgccgccgccaggccgaagtcgcacaggccgaggcgatctatgcgcgccggcgtgaaatccaggacgaacggcgactcgaggccgaagaagccgccgggcgccgcacacaagccgatgccgaggtcgaacgagaaggccggagcctggtggaaagttgggatggccatttcatcgggttgaagcaattgcatgtcgaccccgacgacaggttctcggccctggctgccctagcggaatgggcggtagcgttgcagggcgatgatcctgcccggcacctcctgcaatcggcgcatcaacatgccagccatgcgctcacacagcgtcgcgtggagatcgataaccagtgtcaggcactggcgagcgaaaacgaaaggcttagcgaagaaggcgagcgtttggaggctggtgcagatattgcgccgcccctgccctacacgcgcggtacatccgtccgggaaaaccgtcagggtgcgccattgtggcaggtggtggactttcgcgataagacgacggccacacagcgcgcgggtctcgaagcggcgctcgaagcggccgggctgctcgatgcctggatatcgccggacggccgccttcaggctggcgacgacggcaggccgctgctcgacgtgcaagtgcttgagcggcaaaaccgttcacagtcacttgccgactggctgcatgtcaccgtgccggccggctgcgatatgtcggatgacgtcgtcgggcgagtgctgtccagcatcgcctgcgcggatgacgatcccgtcgacagcgaggcctggattgctccggacggccgttttcgcctcggcagcctatgcggcgcctggggcaagccggcggcggtctttatcggacatgttgcccgcgccacagcccgcacgcgtcggctggccgagatttcggagcgcctcgcggagctttcagccgaactggccgccgcgcaagctatggccgcacagctcgcgctggatcgtgaacaggccgatgaagaattgcgccgggcgccggccgacgaggcactgcgcagcgttcatctggcggccgccgcctcgacccgccaagcccggctggccggcgaacggctcgctgatgccgacattcagtgcctcgttgccgaaaaggcgctcaaggccgttcatgaacagctcgcggctgacgccgcggacctgcgcctgccggaatcgcccgacgcattgcgcattctcgagacagcgctgcagcactatcgcgatgcgcaggtccggctcgagcaagccgtccacgagctgcgtctggctatgccggaatggcagcgccagcggatccgcgaggacgaggcgcgcggcgacatgcggcagcgtgaagaggacctcgcggctgcccgcattgaagcagaagacgcgttcgcccggttcgacgtgttgcgggacacggttggcgccaaagtcgaggaattgcagcggcagttgtccgatgcccgtattgcggtcgaatcgggcgaaaccgcgtcgaagttagccaacgaggtgctgcgcgacaagggcgaggcgcgagcagtcgctagccagcaggtcgagacggcaaacgtcaatcttctgcagcgcggcgaagcccgcgcccaggcaacattgaaacttcagcaattcgcggacaccggtctattgtcagccgcgctgccggatatcgatctgcccgacatggatggcctgtggacgatcgaccccgcactgacgctggctcggcgggccgaacagggactgtccgctctcaaggacgacgacgaggcatgggcacgcgtacagcgccagatatcggaagaactcaccgaattgcagcgcgcacttggcgcgctcggccaccaggtccaggccgaccagaacgactggggcttcagcgtgaacatcatctatcagaatcggcgcgaacggccggaccgcctcgccatgcggctcgccgaagagattgcccagcgcagcgaactgctcactgccaatgagcgggccgttttagagaaccatctgcaggccgagatcgcgtcggaaatccagcgccttctgcaggccgccgaacggcaggtcgacgccattaaccgggaactgcacaagcgtcccacctccacaggcgtgcgctaccgcctagtatggcagccgctggccgaggaggaaggcgcccccattggcctggacctggcgcgcaagcgcctgctcaacaccagctccgatctctggtcggtggacgaccgcagcgtcgtgggcgccatgctgcagcaacgcatctccgccgagcgggagcgcgccgattcgatcgacgcaagagatgccggcggcaccctgctcgatcagctcgcccgcgcactcgactatcgccactggcatcgcttccgcgtcgaacggtggcaggaggggcattggggcaagctgttccttaacctgccggtgcgcgaggccgaaagcgaccgctggcttccgggagagccggcctatgcatcgctgcggttgttgttgcgcttgccgcctctatgggatgtggcggatcgcaagatccatgtctgcgaaaatccaaacctgctcgctatcgcggccgatagcctgggcgccggctgcgcgcccctggtctgcaccgacggcatgccagcggccgcgcaacgaagtctcctgtcccagctggcgcacgccggggcgaggctctgctatcatggcgatttcgactggcccggattgcgcatcggcaacttcgtcatgcgcgaccacggcgccgagccgtggcgctttggcgccatcgactacctcgccgccgtgcggacgcaatctaacatgacccacccacttggagggaaagcggtcgaggcattctgggatggggcgctgacggccgcaatggaaggccatcgcgtggcgatcgcggaagaggccgtggccgagtccttattggaggatctcgatattgcaagatctcgatga

SEQ ID NO: 50983 - DNA, 1578 bp, Rhodococcus ruber
gtgtggcacgcacggcaccgggggttgcgtggcacgtgggccgcccccgcctaccctgtcacggtgaacgaaacgcagccgcccgccgggcacaccgacccggggcccggggtgcagcacgatcggctccggttgttctcgttcgccacggccgagaagcgggccgagtacctctgggtgctgcgggctttcgacatcgctcgggccaactacgtcgtgctgctgcacgccgccgaggtcgcggcgatcctcgagcggaccggctcgacggatccggcggcggcactgtccgctcaggacgtggcgcccctcctcgagcagctgcacgcctggggggtgctcgaacgcagctacgacggcacccgggtggcgtcgctggccgagtaccgcaaccggcactacgtgtatcagttcggccgggccggttaccacgccttccgggcggtcgaagaggtgctgagcgcgcgcggcgaggacgcgtcgctgtcgcgtctcgccctggcggatctgctggccgacctgaccgagctggcggcggcgaacgacgccggggacggcgagctcgtctaccgcaaactgtcgcggctggacacgacgttgtcggacatggccgagcgggccgccgggttctacctgatgctcggcgacctggtgcgcaccaccgaggtgacacccgagtcgttcctggcgcacaaggatgcggtgctggcccacatgcgggagttcagcaccgacctggcccgctacggtcctaaactcgcggcggcgctggcgcgggtgcgggagaccgggatcgaccgcatgctcgggttcgctgccgcgcacgacgagcggatgctgttgtccgtggccgagcggcacgcggactggcgggcccggtggcgtgggctcgagcggtggttcgtcggcgccgccgacgtgcccagcgagtcggagcggctccgggacggcacgatgagcgcgatcgcggcggtgctggcgctgctgcggcgattgacggagacccgccggggcggggtcagccgcgaatcgcagctgcggcacctggccgcctggttcgcggccgcgccggacgagcagtcggcgcacgcgctgttcgacgcggtgttcgacctgggccgcccgcggcacttctccgtcgtgcatcccgacccggagacggtcccggtgacgacgtcgtggtgggacgcgccacccgtgccgatcgcccggacgctggccgagaccgggcgcaccccgtcggcgggagcgccggcgcgggtgcagcgcaacgaatccggggtccggcggttgcgggagcggcagctggcgacgcagcgggcgcgggccgaggcggcacgctccctcgcggcgggcggcgtggacgagcgggagttgtccgagccggagaccgaggtgctgttgggtctgctcgacgcggcgctgtcggcgcgggttccggtcagcggcaccgtgccgggtgcgacgggcacccagaacggggtgcggctgacgctgagcccggccccggagggcacggtggtccggacggcgcggggccggctgcatctggacgggctgcgggtgagcgtgcagtga

SEQ ID NO: 50984 - DNA, 1365 bp, Rhodococcus ruber
gtgagcgcccggcggatctcgccgctcgaccgggattcctaccagcgggcggcacggctgatcctctcgcaccacctggtgaccacccgataccccgaccgggccgcgctgccgctgctgcgccggtgggcgacggagctgcgggaggacctgctcgagttgttcgggtaccggctcgaggtgaccgagacgaccgcgcggttgttcaccgtcgccgaccggctcgatcccgggggcggggcgcgctcggtgaccgaccggcccttcgaccgtcgccggtacgcatatctggcgctggcgctggcggcgctgggccgcgcgggtgggcagatcaccctgtcggagctggccgagcaggtcgcgtccgaggcgggacaggtgcccggggtcgaactggctcccgagcgggcgacggaccgggacgcgttcgtcgacgcggtggcgtggctggcggcgcggggggcgatcgcgctggcggacggcgacgccgggggctgggtgtcggacccggagcgaggtgaggccctctacgacatcgaccggcccgtggtggccgcgttgttccggccgccgcgggcgctgcagcacctgaattcggtgcggggcctgctcgccgccggtgaccgccgcgacggggaccggagcgtgggcaccgcggaggtggcgcggcgggtgcgccgggcgctggtgcagcggccggtggtgtatgccgaggaactcgacgacgaggcgcggctgcagctggcgctgccgcgcacgaccgcggggatcgaactgttgacggggctggtggccgagcgccgcgcggagggcgtcgcgctggtggactcgtcggggcggatgtcggatctgcggtttccgggggtggggacggttccgcaggtggcgttgttgctggccggggagatctgcgcgcgggtgtcggagccggggtgcgaaccggtgcggttgccgcggccggtggacgccgaggccgagctcgaggcgggattggacgccgcgatcccggcggccggggtgttcgcgccgctggcgggtgacgcggctgcggcggatgcgcccccggggtcgcggccggcgccggcgcatccgctggtcgaggacagttggctggcggagacggtggcgcggctggccgacgagttcggtcgtaccttcgccgcgcagtggcaggccgatccggccggtctgctggaggcggcggtgacggtgttggagcggcagcggctggtggcccgggtgcccggcggggtgctggcgctgccggcgctggcccggttccggggggtggtggtgacggtgcgcgaacgcgatccgcgtctcgcgctggccggcgaggattcgaacgaagcggagatgtcgtga

SEQ ID NO: 50985 - DNA, 4146 bp, Rhodococcus ruber
gtgagcagtgcccgtttccggcccacccgggccgggatcatcaacctgtgggactaccgggatcaggagttctcgttcgcggacggtcggctggtgctgcgggggcccaacgggtcgggcaagaccaaggcgctcgaggtgctgttcccgttcgtgttcgacggtcgcatcgagccgcggcggttgaacccgttcgccggcgaggagcgcacgatgcggtccaacctgctgtatcaggggcaggacagtgcgtattcgtatgtgtggatggagttctgccgcgggcgccgggacgatccggaggcggtgacggtgggggtcgggatgcgcgcggcgcgcggccacgacaaggtcacgcggtggtatttcgtcgtcgacggccgggtcggtgtggacttctcgctgctggatgcggccgatcgtccgctgacgcggcggcagctgatcgaggaggtcggtgccgatgcggtcacggaccggccggtggactaccgggcggcgatcgatgcgcggttgttcgggctcgggatcgagcgttacgagcagctgatcaacctgatcctgacgttgcgccggccgcagctggcgaagaatctggatccgaaggggttgtcgcaggcgctcaccgacgggttgcggccgctcgacgagcagctggtgctcgaggcggcgcggtcgttcgccgacatggaggaggtgtcccgcacactggagtcgttggcggcggccgacgacgcggcgcagaggttcgtcgcggtgtatacgacctacctgggtcagcaggctcgcgccgacgtggaccggctgggggcccggctggcggcggtcgacgccggcacgtcggagtggacggcgtcggtggcggcgttcgagcgggccggggtggagcgggcgctgacgctcgagcggctcgaggtcgcggagcgagacctcgagcagacccgcgcgacgctcgaggcgctgcagcggtcgagcgcgtacgagggtaagcagcagctcgacgatctggcgcaggtggtggcggatctcgagcgcaccacggccgggcaggcggagcaggcgcagcgcgcgcgggtggagctggcgcagcgtgaggaggaggcgcggcgggccgcggaggcggccgcggacgcggcgtccgcggcacaccgcgccgaggacgcgctcgccggggcggcgcgcgatgcgggtgtcgagtgggcggggccgggcggggacaccggcggtgaccagatcgcggcgacggtcgccgcgtgtgcggaggagcgggccgcggatgtgcgcgcggtgcgggcggcggtggcggccgcggagggggcgtcggcggcgcgggtgcgggcggaggccgcggccgagcgcgcccgggcgcagcgcgagtcggcccgggcggcggtggacgcggcggacgcggcggtggagtcggcccgcgcggaggcgtcgaccctgttgcgggagtggtggaccggtcatcgggacgcatggtcgggggtcgacgggccggaggagctgttcgaggcgctggctgcggcgatcgcggcggccggcgacgacgaggcggcgacaccggcggcggtgctggccgagcgcacggcgccggtggtcgaggagttgcggttccgcggccgtggcctggaggcggagatcacgcacgggcgggagcggatcgcgctgttggaggccgagcgggacatgatcgaggccgagcgcgacgacgctcccccggcgttccctgcgtcgaccgcggggaccggcacgtcgggcgcgccgctgtggcggctggtgcggttcgcggacgcggtgagcgcggaggcggccgcgggcctcgaggcggcgctggaggcggcgaacctgttgacgggctgggtgtgcggcggggcgggagacgtgcccgcgggggcgacggtgctggtgccggcgccggcggcgcagcggcccgcgggccggacgttggccgacgtgctggtcgtggaaccggataccggggtgccggccgagcgggtgcgggaggtgctggcgtcggtcgcggtgccggacgtggtgacggacgagaccggcccggccgtcgacgagcgtggcggctaccgccagggggtgcagctgggtcggtacacgaaggcggaggccgagtacatcggggcgaccgcgcgggcccgtcgccgtcgcctgcgatcggccgagctcgacgcggagatcgccgaggtgcgggcgcgggtggcggacgcggagtcggcgcgggtggcggtcggcgaacggctggcgcggctggatggggccgcgtcggcggtgccgcgcaccggcgcggtgcttgcggcgttgcggaaggtcagtgagtgcgcgggggcgttgcgcaccgccggggaggcggcggccgcggcggaccgggacctcgatcaggtgatcgccgaatgctccgtgaaggagcggcaggtgcggtcggtggcggcccggcaccgggcgccgcacacggtccgcgagctcgagcagctggcggcggcgatccggttcttcgagtcgcagggccaggtgttgttgcgtgcccggcgggagcgggtggccgcgatcgagcgggcgcgggaggcgcaggcgcggcgcgacgacacccgggtggcggccggtgcgtccgccgaacgggcggtcacggccgaggagtcgctgcggcagcagcagcagcggctggcgacactgcgtgaggcgttgggcgccgacgcgcagcagatcgacgcgcaactcgcacaggcccgcgaacggatcgaggcggcgcggacggagcaacgcgccgcgcgccgcgcgcacgacgaggcggtcgaacggctcgggaaggcggaggcggcgcatgtcgcggcggagcaggcgctgcggtcggcgttgaccgagacgcgggccgatgcggcacagctggcgccgtatgcgcggccggatgtgctggcgctgctggggatctcggaggagctgcggtggccgtcggcggcagtggagtggccggcgccggagcaggctcggctcacccgggcggccggggacgtgcctgcggtgcccgcggcggtgggggcgctgtacgcggcgctggcggcggcgacggcgacggtcaagggcggggacggggcccgcaaggcggcccggtcggcgttgacggcggcgttgcaggagttcgacggtcagctcgcggcggccggtcaggactatcggctgcagtgggatgcgccggaggggttgacggtggtgcgggtgcaggacgagcaggggttctcgtcggtggcggagttcgcggtgcggatcggggcggcgcggcgggagcaggagctgctgttgaccgacgcggagcggcgcatcctcgaggatgcgctgttggcgggcttggcgcagcagatccacgagcgcaccgaggacgcgcgggagctgatcgcccggatggggacggagatgcggcaacggcgcatgtcgtcggggacgacggtgggagtgcgatgggtgctggccgatcatctcgacgatcaggcgcgggcggtgtgccggctgctggatcgggaggtgtcggcgctgggtccggaggagctggcgcgggtgcgggcgcatttcgcggcgcggatccgggcggagcgggcggcgcatccggagcggtcgtatccggagatcctggcgaccacgctggattaccggcggtggcgggtgttctcgttcgggttgatcggcgcggacggcacggaggatcggttgacggtggcgcggcattcggcgttgtcggggggtgagcagtcggtgtcgctgcatctgccgttgttcgcggcggcgcacgtgatgctggattcggcggatccgcaggcgccgcggttgctggcgttggacgaggcgttcgccggggtggacgacaacgggcgggcggagttgctggggttgagtgtgcagttcgatctggatctgttcatgaccggctacgacctgtggatcacctatgccggggtgccggcgtgcgcgcattacgatctggcgcattcggtggccgagcacacggtcggggcgacgctgttggtgtggtcggagggcgggttgctcgccgagcacgacgggtcggatctggcggcggcgctggggtcgccggggacgcggcgggtgccggcggtggtggagggggcgctcgagttcgcgtag

SEQ ID NO: 50986 - DNA, 1548 bp, Kibdelosporangium sp. MJ126-NF4
gtgatggcaggcgaggagagcactgggccgcagccgttcgcgcacctgagcgcgcggaacgcggcgttgtaccgggatgtgctgctgacgttcacgcgggcgagagaccgtttcatcgttcacatgcggcccgaggacatcgcgggtgagcttgggcgggcaggtgacgtcgaggcgatcgcgggctcgctgcagcaactggtcgagtggggcaatctgcgtgccgacccggacacgagccgggtgacgagcgtcgcggacttccaccgggcgcgttacctgtaccagctcacggcggccggtcaggcggctgaggaggcgcttgccgtctacgacgaggcgttggggcggcggggttctcttcagtcggtcgcgttggaggacattgccgggcagttgcgagcgctcgccgagatggcaggcgcggccgacccggacccggccaaagtgcatctgctgttgctcgcgcttgccgaacggttcaccggacttgccgacaacgcacaggcgttcatggcctcgctgcgacgggtgatcgacttcgccgacggcgacatggacgcgttcatcgcctacaagcaacagttgatcgactacatcgacaggttcatcgcggacctggccaaccggggcgccgagatcgccactctgctcggcaggatggcacaggcggacgtggagcacttgctcaccatcgctgccatgcgcgaggccgcggacgcagcgccggacgcacacgcgaccgccgtcgaggcaggcgttgcttcgtggcgcaaccggtggcggggcctgcacgactggttcgtctcggccgactcccgtcatctctcgcaggccaggttgctgcgtggtgccgccgtcatcgcgatcacgcagctcatcgacaccgtggccacgctcaacgaacgacgctccggccgttccgaccgttcggcggatttccggacgctggcgcggtggttcgccgaagcccccgacgacgccgccgcccatcggttgtggcgaaccgctttcggcctgcattccgcacgacatctcacggtggaccgggaaaccatcgccgcctgggacgcggaacaacccgcgccgagcacaccatggtcgctcgccccgggcgtacagatcagcccgcagttgcgccggacaggatcctacgagcggcgcggtcagcccaaccgggtcgtggaccgtgccgcgcaacggcaatacctcgcagaacaggccgcgctggagtccgagcaggtcggcgaggcgcgccgacgactggtcacgccaggcccgatcaggttgtcccagctcggcacgttggacacgcgggcgttccggcttttcctcggcctgctcggggacgcgctgtcggcccgcgcgccgggcgacaccgacgtacggacaaccacgagtgacgggaccatggagatccggatgagcgtcgtccacgacggcggcactgtcagtgtgcagaccgaggacggagtgctgcacggacccgagcacatcatcgagatcgtcgacctcgccgccgagcgacggacgcaggccatcgcgtga

SEQ ID NO: 50987 - DNA, 1185 bp, Kibdelosporangium sp. MJ126-NF4
gtgaccgcgttcgccgacgaaacccttgcccagcagcgcaaagcgatgcgggcgatcctgacgagaccgctgctgaccgcgggcgccgacgacgaggtcctgcggctggtccggcggcacgccacgcacctgcagaactggctgtccgccgagaccggctggcgactcgtggtcaacgccgagtccgcacggctgttcaagatcgctccgaccacggccgacgacacgcacgcggccaccgacggcaagggcaagccgcctttcgggcgcaggcgatatgtgttgctgtgcctggctttggccgtactggaacgcgccgacgcgcagatcacgctcggccgcctcgccgagggtgtgctggccgcggcgagcgaacccgaactcaccgcagccgggatgtccttcaccctcggcaaacgcgacgaacggtcggacctggtcgccgcggtgcgcctgttgctcatgtggggcgtgctggagaaagtcgccggggacgaggacgcgtacctcagtgacagcggggacgtgttgtacgacgtgcggcgccgagtgctggcggcaatgctgaccggaagccgcggcccttcgaccatcgcggcggacgacctcgcggaccggctggacgagttggcccacgaggcggtcgccgataccgacgacctgcgcaaccgcgcgttgcgccatcgcctcacccgtcggctgctcgatgatcctgttgtctactacgacgagttgaccgacgacgagcgcgcatacctcacgggacaacgctatgccatcacgaaacgcatcgaggacgccaccggcctggtcaccgaggtgcgcgccgaaggcatcgcgatggtcgacccggaggacgaactgaccgacgtgtggatgcccgaacagcgcaccgacggccacgtcacgttgctcgtcgccgaacaccttgcgacgcaggatgggcctgtgcagcttgacgctctgcgcgcgtacgtccggaagatggcgcaggagcacaagtccttctggcgccgaggtgtcaccgagccgggcgcggacgccgaactgttgaccatcgcgctggccaaactgcgggcgcttcggctggtcgaaacctccgccgatgacacagtgcgggcacgtcccgcgatcggccggtacaaggtggccgcgcccgtcatccgggaaaggaaggcgaagtga

SEQ ID NO: 50988 - DNA, 4026 bp, Kibdelosporangium sp. MJ126-NF4
gtgacgtcaccggtcccgcatcgagatcgatggcagccgctgcgcgccggtcttgtcgacctgttctactacgacgtggaggagttccacttccacgacggccggttgttgctgcgcggcaacaacgggacgggcaagtccaaagtgctcgctctgacgctgccgttcctgctcgacggggaactgtcggcgcaccgcgtcgaaccggacggtgaccgcaacaagcggatggagtggaacctgctgctcggcgggaagcatccgcacaacgagcgtctcggctacacgtggctggagttcggcagggcccttcccgacggcggcaccgagtaccggacgatcggctgcggtatgaaagccgttgccgggcgcgggatcgcgcggcactggttcttcgtgaccgacaggcgcgtcggccacgacctgtcactggtcggcccgaccaaggtggcactgagcagggagaagctcaaggattcgctcgacgggcacggaacggtgtacgacacggccaccgagtaccggcgcgcggtggacgaggcgttgttcgggctgggcgcacaccgctacgaggcgctcgtcaacctcctgatccaactgcggcaaccgcaactgtccaagaagccggacgagaaactgctgtcccgcgcgctcaccgaggcgcttccgccgctcgaccccgcgctggtcaccacagtggccgaagcgttccgcggtctcgacgaggagcgcgaggcgttgcgcggtctcgacgaggcgaggtcggcggcggaagcgttcctcacccattaccgacgctacgcccgagtcgcggccaaacgccgtgccgcagcgccccggcagacccacagccgctatgaacaactcggccgggacatgggcgaggcggacaacgcgcacgacgaggccacgcgggcactggaagagtcgcagcggctgctgggcgaactggccgacgcacgcgttcacctggaagccaggcggaccgccctgcaggacagccccgagatgcgcgacgccgaagcgctcaagcaagcaggggcggatgccgagaagttgcggaagttcgcggaatccaggcaactggtacacgcgtcagccgtgggcaccgcgcagcggcgagagaagcaggtgacgcaggcccgcgaggccgccgaggtcgacgcggaagcctatgaacgcgaccgaaacgcggcgggacatgccgcggcggccgcgcgtgtcgccgatggccatgccgtggtcgtcgccaacgccgatgagcgggcgggtgccgcgctcgtcgaacggcagagcaaggcagtggggcgtctgcaggagctgctcgatgcggcggtcaaagccgagaacgacctgaggtcggcgcgggcggacgtggatcggatcaccgccgagcagcaggccgcagccgaccggatcgctgacgcggaccgcgtgacggttgagcgcggcaccgaactcgtcgccgcctaccggactttcctcgccgagtcgacccggctcgcggtgtccgatatggacgatgtgctcgccgcactggacgggtgggtggagacgctcgacggggccaaccccgccggggcggccatcgacgaagcagtcatgcgggcgacgaacgaactcggccgcaggcaggcggcgatcgaagccgggcaacgccaggccgagaccgaacggacggccgtcgtcgaggagatcgaacggctggaggcgggcgggcacgacgctccgccactcccgcacacgcgcgaccaaggggtacgcgacgatcgtcctggtgctccattgtggaaggttgtcgacttcgtcgacggggtggccgacgagcaccgcgcgggcctggaagctgcgctggaagccgccgggatcctggacgcctgggtcagcccggacggacagttgcgtgccacgaccggtgatgtcgtcgtcgtgcccggcgacaccgcaccggcgggcgggctcaccgccgttctcacccccgcggtcgaccgggcagaccccgcggcaggcgcgctcacggacgacacggtcacctcggtcctgctggcgatcgggctgggaccgggttcagcgacgtgggtagcggtcgacggccggttcgccaacggcgtcctgcacggctcgtggcacaaggagtcggccggttacatcggtgaaggtgcccgtgaggccgcacgccgtgcccgcgtcgagcggctgcacgacgagctggctctgctgggccagcgcattgccgaactcgccgatgccatgacacggctggtcgccgaccgggacgcgctggccgctgagcaccggaaacagccgaaggacagccatcttcgggaagcgcacgtcaagctcgcgagcgagcacgacgcgaaacggcgcatcgacaggcggctgggcgatgccgttgtcctggttgacgaacggaccaaggcgtcggacagcatgcacggtgcggtgaccgagttcgctggtgatgtcggcctgccgtccgatccggacgaactcgccgtcgtgcgggccgcgatcggcgactaccgggtggcgctggccgcgttgtggcccgctgccagggctctgcggcgagcacagcagaatctcgctgacgcacaacaggaactgttgaccgctgtggaagaacgtgagcaggcactggaggtcgcgaccagcgcacgcgtcgaagccgaggtcgctaccgagcggcaccgggtccttgtcgagaccgcgggcgcgggtgtcgaggagctgtaccggaagctcgacgcggtcgctgccgaactggacgagcgcgaccggagggagaagcaggcacgcgacacggaacggatcgcgatcgagaaacgcggcagggctgaggggcgccgcgaggagctgcgtgactcgatctcgatcgcggcggccgagcgagaccaggccatcgcccagctgcgtgccttcgcccggaccggcctgctcgccacagctcttcccgagctggacgtccccgatcccacgactgagtgggcgcccaatccggcggtcgcgctggcccgtgccatcaacacggcactggacagtgtcgacgacgccgaccggccatgggaactgatccagcaacgcgtctcgagtgaacacaaactgctcaccgacgcgctgtccgcgcacggacattccgtcgggatggtcgtgcgagacggaatcatcgtcgtcgacgtcgtgttccaggcacgttcgcaggacattcccacgctggtgtccgcgctggcggaggaaaccggacagcgcaaggcgctgctgtccgcgaaggagcgcgagatactggagaaccacctgatcaacgaggtggccgggacgctgcaggaactgatcgtcaacgccgaggaccaggtccgggcgatcaacgccgacctcgccgagcgcccgacctcgaccggcatgcggctgcgcctgcagtggcggaccgctcgcaccgctcccgaggggctcgatcgggtgcgggaccggctactgcggcagaccgccgacgcgtggagcctcgcggaccgccagacggtcggagagttcctccaggagcagatcaaccgggaacactccgaggaccgctcgggcggctgggtggagcagctgacccgagcactggactacaggtcgtggcacgaattcgtgatccagcgccaccaggacgggcagtggcgcccggcgacgggtccggcctccggtggtgagcgagtgctggcagcctcggttccactgttcgccgccgcctcatcgttctactcctcgtcgggcaatccgcacgccccgcggttgatcgccctcgacgaggcgttcgcgggcgtcgacgacgactcacgtgcgaagtgcctcggcctgctggcctcgttcgaccttgacgtcgtgatgacgagtgaacgcgagtgggggtgctacccccaggtccccggcctggccatcgcccagctcgcgcgtcgggacggcatcgacgccgtgctggtgacaccgtggcggtgggacgggcgtgaacgtgtgcgcgccgatcggccgtacccggttcgatga

SEQ ID NO: 50989 - DNA, 1278 bp, Kibdelosporangium sp. MJ126-NF4
atgaccgacgaccacgatcgcctgcacaggctgctcggtacctcggacaccgagtggctgcttgaccgcctgcgcaaacggctggcaagtgggaagccgttgaccgggactgtcacgctcgcgtcaccgacgcatgatcagcggcgtgccatcgagcggctgctcggcaggcgcgcgggcgccggaacgtcattgacggtgtcgctcgacgacgtggacgacgttctgcgccgcagtggcgccgcgccggatgggctggtcggcgctgtcgtgtcgttggtcggggctgtgccgaggcgtgcggacgagatcgctgcgtgggcggctgtcctggcgccgctggacgacctggtcgcgcgacgtccggaactggcgccgtggcgtgcctggctcgatgccacggggatcgtgcgcaggctcgcacgcgatcctgtgacggcgtcggcactggtcacgtccgcgactgtggttctcgaacggctgccgtcgggtggtgtcgcgctcggcaggctggccgtggagaccaccggcaacgcgcacaacctggatgctgggcgtccattgacgaccgtcgtcctgtcggcggccagggttctcgccggtgcggtgccgggcggtgacaactcggcggccgaacggcgtgccgtgtgggcggccgtgggcgtgcacctggacgagctgtcgtcgtccgtgctgtgcctcgggctccgcggcgggtcagggaccacgaccggccggatgctcgccatggccagcgaggacggcgagccgtgcgtgctgacgttgcggcagctgactcgggacgacatcgatctcggggtcggcgacggtctggtctggatgtgtgagaacccgatcgtgctcgcgtcggcggcggacgaactcggggtcgcctgccctccgatggtgtgtgtgaacggtcagccgtccgtcgctgtgtggcgactactcgaactgctcgcggcgggcggcgcccgcttcgcctaccacggcgacttcgactggggcggcatacggatcggcaacaccctgcgagaacggctgccgtggcggccgtggcggttcgacgcccgcgcgtaccaggcggtggacacaaccggggcaacactgaccggtcggccggtcagcgccacctgggacagtgaccttcgctcggcgatggaacggcgcggtgtccaggtcgaagaggaactggtcctccccgagctcatcgacgacctgcgcggacccggccgacggtcgatacgccaccggtcccatacgtgtacagacggttaa

SEQ ID NO: 50990 - DNA, 1554 bp, Kibdelosporangium sp. MJ126-NF4
gtgaaccccgagcagcaggaccgtgcggcccaggcccccgcgcgctcgaacaccgaccggctcgggctctacgcatatctgcaggccagggagcacaaatcgacctacctggcgatcatgcggctgttcacagcgaccctgctggccgatctttccgcaggtgacgtggccgcggcgctggctccggccgagcgcgagggcacggtcgagcgcggcgagtcgcgcatcgagaacgtgatcacccggctcaagcagctcgtcgagtggggcaacctggtgcagggccgccgcgaggtggtcgccgccagcatcgccgagttccagcacggcagcgtccgctaccaggtcagcaagctggccgtgcgcgtccagcgggacgtggacgagctgctgcgcgtgcccgagggtgcccgcgaggtctcccgtgagctgctgcccgcgatcgagcgcggcctgaaccagctctgcaagtccctgtcgaacgcggtcagccaggaacagcgcgacgccgagtccgccgccgcgcagcgctcccgcgagctgttgtccgagcaggtcacgaccctgttcctgcagcacgccgagctcgccgcgacggtccgcgacttctacgcgtacctcggacaggtcgtcacgcgccaccacctggccgccgaggagatctccgggttccgcaacctgctggtcgagtacatccagaaggtcgtcgaggacgtgctgcggcagaccccggcgatcgccgagcacctcactggccggttcgccgcggcccggcccgaactactgcgattgttgggtccgagtgaaggcctggggcccgcggtggagcgcgccaggggccgcagcgcggcggactggcaggagctcacggactggttcgtggaccgtcctggccgtccgtcgcaggtcacggtgttgcgcgaggccacggcacgcgcgatcggctcgttgctggccagcgtgaagcgcgcgacggcgggcggcgggttgctgccggggcggcgcgcggagttgctcaagctggcgaagtggttcgacgacagcacgtccgccgaggccgcgcagatgtacgcggccgcgttcggcctgtactcgtctcgacacgtcctgcccgcgccggagcacgactccgacgacgagcgcacgccgtggagcgaaggccccgtgtgtgacgtgacggtcagcgtgcgcagccgcagcgaccggggcgcgcgtggccgcacgtcacggatcatggacgacccgatcaccgagcagtcactgctggccgatgcccggcgcgccgacgagctcagggccgctgacgtggccgaactcgtcgcggcggcaccgaaactggaccaggtcacgctgtcgtccggcgcgctcggtgtgctgtgtgagctgctgaccatggcaatggcccagcgggagtcggcgcgggatgtcggctcggctgaggaccaggtccggggactgaccgtgcggatcgagtacgccgaaggcgagaccgcgaccgtccggaccgccggtggaacgttgacactgcgggattcccggctggtggtgggatga

SEQ ID NO: 50991 - DNA, 1260 bp, Kibdelosporangium sp. MJ126-NF4
atgaggatcagcgcggccgacccgctcgacgggctggcggacatcgacgcggcgaacgtggtgcgctgcgcccgtaccctgttgcgccgcccgctgctgcggctcggcggaccggacggcgagctgcttccgttggtgtaccggcatcgcgtggtactcggtgagatgttcaccgcgctgctggggtaccggctggtggtcgagcgcaagttcgcgcggctctacaagtccggtccgggcggggattccacgcgcggtgtgccggagctgtcgccgcgcggctacgcctacgtggcgttgaccatggcggcgctgaccggcaccggccgtcaggttctgttgtcccgtctggtgtcggacgtgcgcgcggcggcggtcgaggcgggaatggacgtcgtggacaccatcgccgaccggcgtgcgctgaccgccgcgctgcggcacctggtgtcgctgggcgtgctcaccgagaccgagggcacggtcggctcggccagccaggacgccccggccgaggcgttgatcacgatcgagacggacctgctcggccagctgctcgccgggccggtcgcggacgcgcaggacgccgggcacctggtcgcgctggcggcacggaccgcgccccgacgggtggacttccaggtccgccgcaggctgatcgagactcccgtggtgctgtacgccgaactggccgaggacgagcgggaatggctgttgcgcaaccagaggcgtgagtcgtacctgctggagcggtgcttcgggctgtacaccgagacgcggctggagggcatcctcgcggccgatccggaggagtacctgtccgacgtgatgttcccgggtaccagtacagtcgcacggatcgggttgctcgcgctgcccgacctgctcgacgggaacaccggcgacacaccggaatcgtccgaagtggacagtccggttgccagtccggtcgacgctgccgggcgtcgcccggtcaccgccgagaaggtccgcgaggtgtgcgaacggcttgtggccgactacccggcggcctggtcacgccaggcggcagaggatctcgacgggattgtcacggaggtgctggcgctgttggtccatatgggactcgcagtcgccgacggcgagcggtggtggttgtcaccggccgcggcccgttggtggccggaacccgacggcgaccccgagcgcgagatcgccgagcccgcgccggaacccgaggtgccgggctggtcactgttcgacgaggagggcggcgcatga

SEQ ID NO: 50992 - DNA, 4059 bp, Kibdelosporangium sp. MJ126-NF4
atgacggatcgctggcggttgcaccggggcgggatcgtcaacgtctggcagtacgccgagcagaccttcgacttctccggcgggcgcgcgatcttccagggcaccaacgggtcgggcaagtcacgcacgctcgagctgctgctgccgctgtgcctggacggtgacctgcggcaactgggctcgaagggcttcgacacggtcagcatccgcaggctgatgctcgacgactacgacggcggcccgaaccggatcgggtacgcgtgggtggagctgcggcgcgaaggacacacgctgacctgcggtctcggcgtgaaggcgtccaagacctcgcagcagatctcggactcgtggcggttcatcaccccgcagcgcgtcggcatcgacttccagctcgccggtcccgaccgcgtgccgctcggctccgcgcagctgcgtgaagtccttggcgcggactgtgttctggaggaggcggcgttccgcgccaagatcgccgagacggtgtacggcgtgcccgccgtgcgctacggcgacctgctgcacctgcagcggacgctgcgcaacccggacgtcggcctgaaggtgctggaaggccagctcgaacagatcctgtcggacgcgctgccgccgttggacgcggccatgatcgagcagctggccacgtccttcgacgacctggagtcgatcagggagaacatcacccggctcggcaccgccgacaaggcgctgcggacgttcctcaagacgtactccgactacgcgatcgccgggctgcgcacggccgcggacaagctccgcgtcagcgaggacaccgtccggaaactcgggtcgcagagcaagaagctgaccggcgagctggagcgggcgcgcaccgagcgggccgacgcggaacgggccgagcaggacctggaaggcggcgagcagcaggccgaggagaccatcggcgcgctcaaggagctgcccgcgttccgtgacctgcaggacctgcagagccgcgagaagctcgtggccgcgtcgcgttcggccgcgtcggcggcgttggacgtggcgggcaagcagcgcctggccgaggacgcggcggtcgacggtgtcgtgcggctgctgcgccgtctggcacaggatctcgactccgccggggagttcggcgagtcgctgcggacggcgttgcagacggccggtctggacaccacgttggtgccgtcgatgccgcggatggccgagggcgagagcgaaaccatcaccgagcgggtccgtgccaagccggatcccgagtcggagccgttgccgatcgagcgcaaggtgccgccgcccgtcgccggtgacgagctgctcacgacgttgaccgaggctgcggaacgagccggtcgcgcggcgaaggaagcccggcagcgcagcgccttgacgctcgccctgcatcagcaggccgtcgagcaggagaagcaggaacagcgcgtggagacgctgcgctcgtcggcccgtgccgcccagttggaggcgaccgaggcggcgggcaggcgcaaccaggccaaccaggaatcggtcaccgagtcggaagtgtggctcgagcaggtccggtcgtggtgcggagcggggccgttgacctcggcgacgccggagcgttcgctgcagcttccgtccgtcgaggacctgtcgaccaatccgggccaagcgcgcgagctcggcacagcggcgcgtcagtggacggcgccgttggtgcaggccgcccgtgacatcgcccacaccgcgtcccagcgtcgcaccgagaccagggacgccatcgacgagcgggacaccgagctggccgcgttgcgtgcgggcaaggaacgttcgccctcctcgccggtgtcgcgcgacgagtcgaccggtgcggctttccaccgtctggtcgacttccgcgcggatctgccggacgccgaccgcgccgggctggagtccgcgctggaggccagccgcctgctcaacgcgtgggtcacgccgtccggctcggtgcccgaccttgacgacgtgctggcttcgcccggtgctgtcgtcgccgggccgtcgctcgccgatgtgcttgtcgccgttgaggttccggatagtcccgtgcccgcggaccgggtggagtcgctgctgcgtggcatcggtctcggtgacgcgcccgaagctgccatggcgctgtcggtcgacggccagtggcgtgccggagcgttgcacggtcgcggttcgaaaccggccgcggagttcgtcggcgcgggtgcgcgggccgcgggacgtcagcgtcggatctcggagctggaagaggaactcgccgcgctgcgcacggaactggcggcggcggaggaacagcagcgctcggcgaacgacgtcgtggccgagtgggagcggcacctggagaagttccccggcgacgaggaactgatcgccaagcacaccaggatgcgcacggagcaggaagcgaccgaacgcgccaacaagcacgcccagcagttgcgtgaagagcacgaccagatgcagaaccgttggcaggcaacaaccgccgacctgttgcggcaggcgggcgacgcgggcctgtccccgcgttcggacgacctccgccaggcccagcaggccgccgccgaggcgttgggcgcggctgaacgtcttgcggaggccttgcgtcagcgttgccgtggcacggtggaagacctggtcgacgcgacccaccgctaccacacggccgtcgccgaccggacgaccgcggagacagaagcggaccagcgctgcgcggagtacgcggcgcaggcgggcacgttgtcggagctgaccggctcgatcggcggcgaggccaaggagatcgcggcgcggatcgcggagctggagcagtcccgcaagcagatgcgcggggaactgaaggacacccgcgagaagatcaccggactgcgcgagcaggcggcgaagctggacgcgcagttggagagcgcgaccgagcagttggcgtcctccgaggaggtccaggcgcacgcgtaccaccagttcgcggccgtcgcgcaggcgccgggtgtgctctcggcggcgttgccggagctggaggagacggacctggccgcggtgcgtgccgcggtcgtcgaggctgcggaccgcaagaccgccggtgagacagctgtgatcaccaagctgcaggacctgcagaccgcgttggccggtgggtatgacatcgcggccgaggagcacgcgggcctgttgacggtgtcggtcgcgggcgaggacggtggccgcccggtcgcgcaggcggcgaagcaggtgtcgtcgaaactggctgaacagcggggattcctggacgagcagtaccagcggatcttcgccgactacctgatcagggacctggcggagtggctgcgcggccagatcacggtggcggaggacctggcccgccggatgaacgacgtgctcggccgggcgaagtcgtcgcagggcgtgcacgtccagctggagtggaaaccgtcggcggcactggacgacgagacgcgccaggcgttgtcgctcgtccggatgccttacggcgaaaggacttcagcacaggacgcgacgctgcgccgggtgttcaccgagcggatcgaggccgagcgggacacgcattccagtggctacgcggaaatcctgtcccgcgcgctggactaccgttcgtggcacgctttcaccgtccgggtggccgacaccggccccgacggcgggcagcgggtccggcggctgcgccaactgtcctccggtgagacgcggctcgtttcgtacgtcacgcttttcgcggctgcggcggcgttctacgacgcggtgagcagttcgtcggaggatttcaacccgttgcgcctggtgctgctggacgaggctttcgaacgtctggacgacccgaccatcgcccggatgctcggcctgctggtcgatctggacatggactgggtgatcacctggccgagcggctggggcgtctcggacaagatcccgcggatgcacatcttcgacgtcctgcgcccccgcaacggccggggtgtcgcctgcacgcagaccacgtgggacggcgcggccatggaccggatcgacccgtaa

SEQ ID NO: 50993 - DNA, 1635 bp, Streptomyces albus
atgggggcatcagtatccggtgcaggtcaggacgccgacgaggaggcgcggcggcggctgaacgcgtacacgtacctcagcgcgcctgagcggctggagcacgtcgcgatcatgcgggtcttctgcggaacgctgctggcggatctcaccgtcccggacgtcatggcgaaactgcgccagaccggtgcttccgccgcaggactcgacgccgacaccctcacagtccgactggaacagctggtccagtggggaaacctgctccgcagcagccacacggtgaacgcgtccagcatcagcgagtaccagcgttcccgctcgcgctaccagctgtcgaagctgggcgaacgtatccagcgggacgccgacggggtcctggccgaggccgacgccgcccgcgaggtgagcaacgaactgctggccctggtcgagcggggactacgggagctggccgacctcgtgaccgcgccaggcggcgtcgagccgcaggacggactggaacggatcagcacgctgttcgtgcagttcaccgagttcgcggactccatacgcgacttctacgcctacctcggccaggtgctgtcccgttacgacctggacagcgccgagtaccagggcttcaaggagctgctcctggactacgtcgaggcgatcacggaggacgtggcgttccgcgcgccccggatctcggcggcgttggacaccctgtggccgcacatcccggctctgctggaccggctggactcccatgcccagggactcaccgggctctcgacgcaggcgcaggcgcagggcgaaagccgcccggacgtccggatccagcgcagccggggccgcgaattcgcggactgggagggcctgcgcggctggttcagcaacaccgacggccagggcagccaggtcgaccagctacgcgatgccactctgcgcgcgttgcagtcgctgctcgccaacgccaagcggatgctgcggtcggccaccggggagatgtcccggcgcaaggatctgctgcggctggcccgctggttcgacgaagcggcgccgcgggacgcacacgacatcgccgtcgccgccttcgggctgtacggcgcccgccatctgggcatacctccggccaccgaggaggtggtgcccgcctacacgagctggtggaccggtccggtggtcgaggtgccggtggccctgcgggagaggggcagccgcgcccagcggggccgggcctccgcggtggaggaccactccgcgcagaagcagctgctgagggaggccgcacggcagcgggcagcggccagagcagcggcggcggacgaactgcgcagcgcgtccggccggttcgccgaggtacgcctcacatcagcggcgctcggcctgctcttggagctactggccacagcgctcggaaacgcacagctcagcaggcccatcagcacggacggggagaggaaggcggtgttcgacctcgactcggccagcagtgaagacgccgaactacgtatccgcctcaccgtgcgccggacggcgggcacacgaacggtgctgtactcggccgacggcgacctgctgctggacgacctggagctggacatcagtcgcacctccgccgcggtcggcggcgaagcggaggcgagcgtgtcatga

SEQ ID NO: 50994 - DNA, 1326 bp, Streptomyces albus
atgaccctcccctcgactcacgacgtagccttggcagccgagcgccgcaccgccgcccggctgctgctcgcccacccgctgatcgcatcggacggcccccacgccgacctcttcccgctgatccgcaggcacgccgactggctgggcaaacggttccagcaggtgctcggctaccgcctgctggtcgacagctcctacgcccgcctgttcaaggcggggctggggacggattcgggtcatcggctggagcgctccaccggcaccccgttcaccccacacacgtacgcctgcctcgccctcgccctgtcggtgctggtgaccgcgcccgagcagatgctcctgtcacacctggtcgccgatatcagggctgccgcagccgacgccggaatcgagctggaggaaaccggccgagcggccgggaagcggaccctggtcgcggctctgcgccagctcgtcgactggggcgtgctcatcgagaccgagggccgtgtggccgcacttgcgcaggaggcgggcggagaagccctgatcacgatagaccgggagctggcacgcgtggtcgtcgccggcccgctctcccaggcacggaacggcgccgacctggtccggcgggcagcggacccgggcttcggcggaccacgcacctacgtgcgccggatgctcgtcgagacacccgtcgtccacctcgacgagctgacagacgccgaacgtgactggctgcgcacccggcagcgccgggaggcccaggcattctccgaactccttggcctggagatggagatccgtgccgagggcgtggcgctggtggaccccgaggaggagctcacggatctgcacctgccgggcaccgggaccgtcgcacaggccgcgttgctgctggcggaacggctcgtggaacgccttcggccgcaggaaccggggcatccggcgaccggcgggacactcaccatcggggtggccgtcccggacggcctggtggacgaggtgctcgccgagctcatcaccgagtacgggcagcgcagcaactggcaacgcggctacctggaagaccttccctccttgcgagaggccgtactggacctgctggtccgcatgcggctgatcgcccgcgcgggtcggctgcgcgccgagggcgaaggactgccggaggggtacgtcgaagaggcgtcggaaggacgcacggtgaccgatgtccatggcgcacggcccggcggcgacggctgggtgctgctggccgcagcggctcgctacgccacccaagtcacggtgcgcccggccaccgcagtgggcaaaggcacggacgttcaagaggagttgccgctatga

SEQ ID NO: 50995 - DNA, 4239 bp, Streptomyces albus
atgaccaccgacgcgcgtggcctcgttccgctgccgcgttccggccccgcgacgaccaccggcgcgcgcttccggctgcaccgtgcgggcatccagaacgtctggcagtacgacgagcaggagttctccttcggcgacgggcggctgctgctgcgcggcaaaaacggcgcgggcaagtccaaggccctggaggtgctgcttccgtatcttctggacggcgactcccgggcactggacgcgacaggcaccggccgcaccacacttgcctggctgatgctggacgggttcgagcagaccaaccgtctcgggtacctgtgggtggagttccggggcacggccgacgccggcggtcaccgccacctgacgctcggtgccgccatccgcgcctcgaagtcgacgcagaaggcgctgccgacgttcttcgtcaccccgctgcggatcggtgaggacctgcacctggtcgaggccggtaagccgctgccggtcgaccggctcaaggagatcgtcggctccgacaacacgaccgaccgcgcggtccagcaccgctcacatgtggcccgggaactgttcggcataaccgacgcgacgcgctaccgcaatctcacccagctccttcaccggctgcggcgcccgacggtcggcgaccggatcgaacacgggggcctggtctccctgctgagcgagaccctgccggggctcgacgaggacgtggtcgagaaggtggcgcgcaacctccacgacctcgacgccgtacgggacgaactcggccgcctggaacgcaccgacgcagccttgcgtacgttcctcaccagttaccgcggctacctggccggggtcctgcgcacctccgccaagagagtgagccacgagctgggcgtcctcgctcagcggcgccgggcggccggagacgccgcacagcggacgagcgacctgaggacgcaggaggaggagttggagggccgactggagaccctgcgcgaagaggaacaggacgcccggaccgacctggccgccctgcacgccagtcacgcctaccgcagcctgcgcgaactgtcggagcgccgcggcacggtggaggcactgcacaccgccgccgtggccgcgttcaccaccctgcggaacgcacacgacgcggaggagggctcggcggagcggctggccgaaggtgtcgaacacctcggaagtcggctggccgagctgggaaccgaacaccgggagttgctgacgcaggcggagaaggccgggcttcctaccggccacctcggcgaggcggtggctctgccgcgcacggttctcgcccaggccaccgggaccgggctgacgactccggatggggagacgcgcaccgtacggcaccggtcggtggcccgagtggaaacggtcacggcgcaggaagggctgcagtcctggcagaaccagttggaaaacgccgagtcggtcgcgaggaaccgggcccggatggttcaggaggtgacccacctcatctcacgggcggacgaggcccgggccggggcagcccaggctgatgccgagcgagaacggctggaaggcgaggcagaagacgccgctggccatctcgacggcagccgtgagaaggtagccgaggagagcggcgcctactccggtcaagtcgctgagtgggcggcacgcacgcggaatgcactggggcccgactgcccgtcgctggacgccgtccacgccaccgtcggccacgagacctctaccgacgcacccttcgcggaccgcactctgccgcccgacgtcgacagccaggcgcggcggacagctcaggccgcgttggagccgtacggcgaggaactcaccggacgccgggacgccctggcactcggcgtcaaccggctcggcgaggaactcgaccacctggcggaacagaagcgaaactgggagcaacgtaccgaccccgagccaccggccccgcaccatcgcgccgccgcgaggacgccgggcagtggtgcccctttctaccggctcgtggacttcgcggacgacctggctccggccgaccgagccggtgtggaaggggcgctggaggcgagcggaatcctggatgcgtgggtgagtgcggacggcgtcctcctcaatccacgcacccaggacacccttctccagccgggtcccgtgctatccgacgggccgactctcgcctcggccctgcgcccagcccctgaaccggattgcggcgtcacctccgagcaggtgggcagtctcctggccaccatcgcactcgcatcggcagaggagacctccgcgcacaacgcggtcttctacgacggcagttggcgtctcggcgtactcagcggtcgtcatgacaagggcgccaccgagtacgtgggggccgccgtacgcgccgagactcggcgacgcatcctcgccgagctggaggagcggatcacgcatacggaacaacggctggcagatgtccgcgaggaactcgccgtagccgatgccatgcgtcgggctctcacgctcgcggaacgggatttccccagggcacggaatctcgcggacgcgtggagcaggactgagtcagccgagcggaccctgcgcgatctgaccgccaaggcgacccgggcggcgcggctggccgaggagacacgcgctctcgcggtatcggcgcggaccgaggcggatgccaccgcgaccgcccacgacctgcccggcgaccccacctccctggaccgtgtgcgcaccgcactggctggtctgctcagcggtatcggacatttgcgcagggccgtcagcagcacgggtgagcggctcggtacgaaccaggccgatgccgaccggtacggacgcgcccgcgaggatcgcctggccgcggaagagagctaccgggtccacctcaccggcctgcgcaccgccgagcaggacctgcgcacccgcgaggaggccatcgggtcgtccgaggaggagatcctctcccgcgagcaggagaccaagcagcgcatcgcgaacgctgtccaagcgctccccacggcacaacgagctcgcgacgatttccacgacctgcgcgtccgcgcggaagaggacgaaaagcgcctgcgccggagcctggtggatcaggagactgcggtcatcaacgtcggcagcgctcttcgcggcgctctcaaccgacccgaggtggtgcgcggcgccgggcttgaccgggcttcgctgcccgagtacatgtcggacgatcccggcgcggacgtgcgcagccgtctgcgagcactgcgggccctcgccgacgccgtggaacatgccctcggccgcccgaagggcgaggtgtcggacagcaccctgctcaaccgtcacaccgatctgcgcgaccaactggccggcgggttcgacgcgcagctggaggagcgcgacgggatcaaggtgtgccgcttggtcgacgaccacggctcccatgacgtcgcagccgtgggcgagcggatcgccgtgcaggcggcggaggcccggggacggctcaccgagcgcgaacgcgaggtcttccagcggttcctgaccggcgagctcggcgaccacctttcggcgcaggtcatcaccgcggcgaacctggtcgccgctctcaacgacaccctgcggaccgtgcgcacctcccacggcctcggtgtcgagctgctgtggaagctggacgaggacgtggacgcggatgtgcgcgcggccgtcgagctgctgcgcagtccgtcgagcctcaggacgcgcgaccagaccgagcagctgcgcgaggtgctgcaacgccgaatcgaggacgcccgccgtgccgacccgtcagccggttacgccgcccatctgcggaccgcgctggactaccgcgactggttccacttccacacctttgtggtcgaggacgcggctccgggccgccgtaggaaactgaccggccggaccggtctcagccagggcgaacaacgggttctctcctacctcgtgctcttcgccgcggcagccgcccatttcaccagcctcgccgagtcggcaccgcatgcaccacgcctgattctcctggacgacgccttcgccaaggtcgacgaacccactcacggccggcttggccgtatcctcgtcgacctcgatctcgacttcgtcctcaccagcgagcggctcatgggcaactggcccgaggttccgtcgctgcacatatacgagtgcctccgtgatccacacgtacgcggggtggccacccttcactacacctggaacggccggcaccggcgtctggtgtccgtatga

SEQ ID NO: 50996 - DNA, 1281 bp, Streptomyces albus
atgagcgggctgcccgccgcgacgcgcgaatggctgacgggacctggactcacccggctctggcagggggcacgcaaacgcctggagagcaacggcgtacaggccgcgggttcgctccgactgaccgcgatgaacgcccaggaacgcaacgacctgtctctcctgctgggcaaacccctcacaggtgccgccgtgaccatacggctcgacgtgctcgacgcacggctacgcgcctcggctgccggactcggcctcaaacagaccctggaggaactcggcccgccactcaccgaccgccgtgccgcccgcgcggacgtggcggcacggcgggaacaggtgtggtcgtctcttgcttcgtcactggccgcctccccactcgccgaccaggaatggccccggcagtggtacgacctgctgcgccgttccggtgttccgagaggagtgacgcccgaagcggcgatatggacactccagcaggcggtccaagtcctcaccgctctcctcggacccgacggacctgaacgcaacggcacacgcggtcgaggagaactcgccgccatgacgaccggctccgcgcacggcctggacgacggcacctggctcgcacgcctcgtccaacgcggggtcgccctcgcgcacggcaccgagttccccgacgacgcggccggccgacgcgctctgtggcggctggtgtccgtcacgccggacgaggtctccagcacggtgctgacgtacgggctgcgacccgacggcgagggctggcgggagcgtgctctgcgggagcgggccgaccatcacgccgaagtgcacgtcacgccacgcgacctgcatggcctgcggctgcagctccccgccggaacgctcatccacatctgtgagaacccgcgcgtggtggaagccgcggcggacgcggcctgcgtccagcccctggtgtgcacctccggcagcgcggccaccgtggtcttcacacttctcgacgccctcgccgccacgggttgccgcttcgcgtaccacggcgacttcgactggccggggatcgctctggccaaccgggtcatccgccgctacgaagcccggccgtggcgcatgggcaccgcggactacgagcacctggccgctcgcagccaggctgagggcatcccacaactggcgctcgacggccagccggtcagcgcggactgggacccggatctcacccctgccatgaccgccctcggcatcgcgctccatgaggaggcgaccctcgaacttctcgtagacgacttgtcacgtcagatgtag

SEQ ID NO: 50997 - DNA, 1488 bp, Bacillus sp. OxB-1
gtgcaatcattcaagaaagtgaaggaagcgagttatttatcggctgagaaggcgtggagctatcgggcgattttacggtatttttatgtgcagcatgagcggatgagggattttctgtttccggaagaagtgctggcacatttgcaggggctaccggaattccacctgtacacggaagagcaagtgcagcaggatttggctcaactcgtgcagtggaataacttggtggcgcgtcaggagatggggcgggcgcagacgattgaggagtttaagaagaagcggttccgctaccaatgcactgcgtatacggtggagtttgagcggatgttgtcggatttggagaagggtggaaatgcgttcggcgggtcgctggagaagaaggagttcgagcggttgtatgagcgcttgcaattgatggtcgggatggtcgggaaaggtgtgtttacgaatgcggacgagtgtgcgcagctttggaccgatgtattcacctatttccgttcgatcacgaaaaacacgtccgattatattgcgtacatcagcagcgaggaagtggaggagcggatgcagacggacgcattccttctttttaaagatcggttcacatcgtatttgcgggatttcatcatcgggctgcaacagacggcgttgaagatccagaccgtgctggaggagctgacggttgagaagttgttgccgtttttcgagcaggtcatcgcgcatcaggagcaagtgccgcgttttgaggacattgcgctggattcgcaagcgatgcttgtggagcaccaacagaagtggatcagcttgcaaacatggttccttggcagtgtgcatggagagagtgaactggagagcttgcggaagcggacgaatgaacagatccgccgtatcacgcgtgttgtccagcggctcggggaacggaataattatttccgcagccgtaagaaagactatatgcatctagcggaatggtttgattcactcgaatccatggaggatgcacatagattgtcaagtgccgcgttcggtatattccatacgaagcatctccataccgaccatgtaccgactgaggatatctacgccgacgtgtgggatgaaatgccgggcatacatgaaatcaaacctcgcatccgtcaatatagggagaagacccgtccgggggcagtcgtcagccgaaaaggagagcaggcagaattggtcgaagcctatttagcggaacgccgagcggagcaggaagtcctttccacctacataagagacggtgaaatccggctggagacgattccccatatcgaaccccatatgcgaaaactgctgctcaactgggtggccaagtcgatgacgcgaaaagaccggatcataaagacggaacaaggctacacagtgagagtgctgttggacgagtcgaagcggattgagttgaagtcggaggacggggtgttgataatgcctgccgcagtattccagtttgtggaaggaggtgaatga

SEQ ID NO: 50998 - DNA, 1167 bp, Bacillus sp. OxB-1
atgaatgagaatcgatttgacgagaaagcgcagtcggctttgcgcttgttgtttgaacgattttggatcttgcgggcggaggacccggcctcctatcagctgatacgtgaacgggagaaggtgctgaagcgctatatcgatgacaaattcgggtatgacttgatcatccatcaacatttcatcaagctggaaaagattccagttgagccgaagagttggatgggtattcaagcattcacaatgcctctcgattatgcgattttttgctgtgcccttgctttttcggaaaatcgggcagtcgatgaacagtttcttctatcggatttatgcggggatattaaagagctgtatccagggggattaccgcttgattggacaaattataatcatcggaaatcgcttgtgcgggtcgttcgccaactggagatgttgtcgctgatccgtgcagttgaaggggaagtggaacagtttgcactcgacgtggagcaggaagtgttgtatgaagtgacggtgtatgcacgttatttcatgcgtgcgtatccgaaagacatatttgagtttacatccatcgaagagatgcttgcaagcgaggaagaacggcatacagatgacttgaggcggaaacgggtgtatcgtaaattgtttttatcccccgcagtctttcgagtaggggaggaggattccgatttcgcgtatatccgtaatttccggaaccgccttcgtgatgatattgaaacgcactcccatttccgtttggagctatttaaaaatatggggcttctcatcatggatgagaagaaacaggaaatgacattatttccggaccaaaaagcgatttccgaccttgcgctgcagttttcggcattgctccgtaaccagatggatacgtatccggcggacgcctttggacggattcaaatatcggcttttgcaatggagcatctggttgaacagctgcaagcggaatacgggacgggctggagcagtcattaccggaagaattccgtcaaggcgacaacggaggagctgatcgacttgttgttatcctgggaaatgatcgaagtggaacctgagacaaatgactatctgatcaccccgcttgcgggtcgtcttgcgggcgtttatccgagtgattttaagctgaaaggggaggaagtggatgcgtga

SEQ ID NO: 50999 - DNA, 4167 bp, Bacillus sp. OxB-1
atgcgtgaaccaaataaatggaagatgaaccgggtcggcctattcaacttttggtattaccatacgatggaagtattcgatttcgcggatggcaagctgttattgcgcggttcgaatggatcggggaaatcggttacgatgcaaagtctgcttcctgtgttgctggatggccgaagatcgccggaacggttggatccattcggctcaagagcgcgtaagatggaagactatttgcttggtgaaaaagaggtgggcggcagggatgaacgcaccggctatctgttcatcgagtacaaacggactgacacggaacaatacataacgacggggatcgggttgcaggcgcgccggcagaagcagatgaatttttgggggttcgccattacggacaaccggcgggtcggcaaggatttcgatctgtttgaaatggagacgcaagccgggaagaaacagcagatacctttatcacgggtccagcttgaaaaccggatcggggacggcggcgaggtcgtccgttcgcaaagcgactatatgcatctggtcaataaactgctattcggttttgaaacggatgaagcatttgcggatctgattcagctgttgctgcagctgcggagcccaaagctttcaaaagatttcaagccgacagtcatttatgaaattttggagaaggccttgccgccgttgacagatgaagatctccgccatttatccgacacgattgaacatatggacggcgtcaagcagcagatcgaacagctggagcgggaacgaggggcactgaataagctgatcagacattacgatgaatacaatacgtataaactcgctgaaaaggcggaggcctacaagaagacgaagcaccgtctgactaaggcggaaaaggagattgccagtaaacagcgcgaagccgaggcattggcggttgaagtgcaagcgttggaatcacggaatgttcagcttcatcaatcgaagaaagtggcggaagagaagcgcacgcggctccaaggccacggcgtatggcaaatcgagcgggaaaaggcggacaagcttgaacagctttccaagtactcaaaggaccggcaggcaaaattggacaagctggagaataggaagcgccaggaacgagcggaaaaggaacagcttgtgaaaaccgaagaatcgttggatgagacggcgaaaacgatggaacagcaactggaggatttacaggatcatgctgaaaacgcggtttttggagggcatcctgtcaatgagcaagactttcaacgcctgcggaaatcgggctatgatttcgcggtatggcatgaggaagcggagcggcatgacctttttctgaatgaaatcattgaaaaactgcgcgaacttgaacaattacgcaacgacctggcggaacacgaaaaaaagcaggcagataaacagttggaaatcgacaaattgcggatggaagcggcagactggcaaaacgtatttgaaacagacaagcagaatcagttggatgccatccatgtttgggcaaagcggcattcgttcttcgaagttgatgaaacgttgcttggtcaaacggcacgattgcttgatgatctgtatgagccgtttgaatacgggatgatccgcgaaccgttttggaaattgaacgaaaactaccggactcggctttatgagaaaaaagtaagggtgcaaaatagcgcggacctgttgaagcaacggattgacgaaaaggaagcggacttaatgaactgggagcagcgtcaagatccggagcccgtattccgcgatgaggcgacaatagaagcgaggtcccttttagcgaaggaggggcggcgtcattcaccgttttttgaagcggtcgagttcagggcggacgtgccggagccgacccgtaaccgcttggaagccgcactgctggaatccggaatcctggatgctttgattgtggaagaggaaggtctggacatccatcacgatcgaatcatcgtgccggccccgaatttgatggcgcatacgctcgctgattacctggttcccgactgtgatgactcggtgctgccacagtcggttgtcgatgatgtgctgcgcagcatcgtagtaggtgaggatttgaagggcgaagggtcgggcttttcgattgcggaagacggtacgtatgtcatcggacttctgcaggggcatgcggctcctgtcgatgctgttcgtttcatcggtagaactgcacgtgaacggttccgtcaacaggagattgcacgattggcaggagagatcgagatgttgcagacggaagaacaggaactggaacagatgatccaggcactggatgacgattttcagaaagcggaatccgctatggaagattttccgacagaccaggatttgtctatgagtttccaacagatccggcaaaagcggttcgagatgaatgaattgcaaaaagtgctgttgcaaatggatgaggagatccgtaagcgaaaacaggcatttctggagttgaaacgatcggtcgatatggaaacaaggggattggaccttgaacagacccatcccgcttacacagaagcacaactggaaatgcgattgtataaacgagtgcttcaaaagcttgaattggcgcataaggacgaagggaatctggcatcccggtcgcagcagctcaaggagcggctcgaagagatcatctacgaggtggatgaacttcaaggggaaatcaatacaatagcaggcaatatcgagcaactgacaagttcgctggctgaaattgaaacccagcttaagtcgcaaggtgtggaagacgtccgtcgtgagattgaagcagtccgcgttttgttggaagatgtggaaaaggaattggatcaaaacaaggaacagctgcctgtgaaacaagtccgcatggagacgctgcataagcagattgttatccataaacaggaggccggctttttgtcacagctggttgctggctggaaagcggcatttttcaaggaacgggcgtatggttttgtggaagggcatggggtggacgattcatcaccggaacagcagttggatgaggttgcggaacaatatagaacattcctggagcaaaaagaccttagcaagattgaagagaatttgacgaaggcttacaatgagcagtttgcaaatttactggaatatcgtatgcaggatagtagcgacaggctggatagctcggattgggaagcggcggactggacggaatcgcaacagatcgaattcgccaactggcagcggatgtcgacgcgcaggcttattcagttggatttccaggggaagcgggtcagtccttattttatccgtaattccgtggatgcggactatgaacgtcagtcccatgcactggaggaagaagatcgacgcttatatgaagaaatcttgttcgattcggtcggcaatatgctgcgtagtcggattacgcgcgcacaaaattgggcggagaagatggataagctcatgcgcggtaatgattccagctcaggtctgtcgttttcaatccaatggaaaccgcgttctgctgagaacgaaacggaacttgatacaaacgaactggtcgatttattgcggcgggaccctcggttgatgaaggaagcggatctcaatcggattattgaacatttccgatcgaaaattgaccgtgcaaaagaagaggtcgacctgcaaggggaagggaagaccttgctgcaggtcttgaagtccgtccttgattaccgttattggttctcgttcgtcttgttttataagcgggagagggagacccggaaagagttgacaaaccatgcgtttgataaattcagcggcggggaaaaggcgatggcgatgtacatcccgttatttaccgcatgcttctcccgttatcaggaagcagcgccgaccgcaccgcatattatcacactcgacgaggcgttcgcaggtgtcgatgaaaataatatcagcatgatgttcgggattgtggaggaacttggctttgatttcatcatgaattcacaagtgttatggggcgattatgaaacgatttcggctttatcaatctgtgaattgatacgaccgaaaaacgcggatttcgtgtctgtgatgaggtatcattggaacggattgaaacgggttgaagtgacgtcaaaaccgtcagaacctgcaatgatcccggctgatgactaa

SEQ ID NO: 51000 - DNA, 1329 bp, Bacillus sp. OxB-1
atgcaggacgcattggagttttttagaagtgagccggcctatggaaagttatttcaagcattccgtaataagtatgaatccctcggcaggttgggcggcaatatatccacagattcgttttcggaggaagaactagaacagattgctcgtttttttggtatatcgacaacccgattacgacggaaaggggcggttgcgctactggattttgaaagtcagttacgcatgacccgattcggcataatggacttgaaagcgttgttggatgcgtattttggagaagaaatattctcgaagcgtgagcaggaaatggctaggcggaatcgaatccaagatttgttgcaaacattgcaaagtgaattaccggcattatcgttctggttcggttgcctccttgcacagtcagctgaggctagatggatcatacaaactgccgagcgtgacgaagcgttgttccgtaccatgtcgaaacagctgcataaggcgatactcgaattgccgaatagtccggtgagattgcccttttttagtcaacttgttactggagatccacatgcgatggacctgaacacagagtttggaaaactttttctgcatgccttggctgttctgcaaaggatgaatgaggatgggacggaaggcgcggacgggaagcttacgactccgactgctacagaagaagtgaatgaacttcttaacacatataatatttaccgcgatgatctgttgaactttgtcacgattgccaattttacggcccgaatgaaaacaggggagacttatccggtgtggcagtctgccggtgaagttggggctgtattgaattcaccgctcagggagatcattgcattatcggatattcgccccgcaacaggccagcatgtctggatagttgaaaactcgggtgtttgctctgcgttgcttgattggcaaccccgtatgccgattatttcaacgaacgggcaatttaaattggccgccttgcttatgatggatcagcttgttgaagcgggttttcagctccattactcgggggatttcgatccggaaggactttctatggcacagcggttgctggaacgttttccgggttatgtggacctttggtgcatggatgtcaacacatacaggttgagcaagccattgaaaaaattggaaccggaacggttgtcaaaactaaatggcatcaaccacccctcgcttattgaactttccgaagcaatcaagacggaaggaaaggcaggttatcaggaagcgattgtggaagggatgctgagctatataggggatgtattggaaaaggggctgtctaaaaagcccctaaaatga

SEQ ID NO: 51001 - DNA, 1533 bp, Bacillus bombysepticus str. Wang
gtgtttgatattccaataatccaaacgccgataaaggaagccacttatctaaatactgataaaacatgggtataccgtcccatcattaaatattgttatactcgttacctccaagccaatcggtttgtgtatccacatgaagtgctagagttcttgcaaagtacaggaggatttacatcatatacacttgatgatgtaaagcgggatcttgagtcacttgaaaaatgggggaacctagtcgccagacaggatgttcggggtcctgaaaaattagaagatgttttgaaaaaacgttatcaatacagtgtctcagaaatctcaattgggtttgagcagttcttagaaaaactagattctaaacgttctaatattacaggttctactgatagctctttggtatcccgcttactagaaacaacatatgcgttaaaagattataccatcccgagggttaaagatatgaaggtaaatcaagagatttatgaactttggagtgatattttttatcgatttgaaaagctacaatttgattcagttagttacttatctcatattgattatcaaaaaatacaaacggaagtagcgaagggtgaatgggcctttttacactataaagatgacttcattacttatttacaagatttcgttttgtcgctacaccgtacagtagatttgattatttctgtttttaaagaaatagaggtaacaaaattggagaaagtgattcttgctgcggccgaacataaatgctatcgtgaccgcttcatttttgaaaatgtttcggtggaagaacaaatacaagagtttgaaaataattggttatatatgatgcaatggttttccagtgattcatctaatcataacggtggctatgaatctctattaagacagacgcaagaaaccattgatcaaatagtgaaattcattagacaaattggtgagaagtatcgtcaggttaaaaatagacagcatgagtatttacacgcagctgtactatttgaaaaaatgaataaatcaaatatggatgaatgccatgaaatgtttgcttatctttttggtgttcaaaatacgaaacacatcagagcacattcaatatccactgaccaacaaaataatgatttgtgggaaataaaaggcgacaagttgaccttgctatccaaatacagagaacggaaagaaagaaagaaacgaaaagcagtacaagaaaatttagaggcacggtataaacttctcaaggagtatgaaaaggaaagagaaataaaaaaacagtatattgttagatacttatcgtcaaaggtgattcgggtacgtgatttagggccggttccagcttgtatacgtgaagaaattttagaatggttaagtcgttctagtttcgagttttcagagaaaggtatattacgttatggctttacggatgatggtagaacatttgaagctatagccgttacagaaaatcgaataaaactagtttgtgatgatggaacactcgaaatggaagacttggaatttagatttaaagaggtgaggtaa

SEQ ID NO: 51002 - DNA, 1203 bp, Bacillus bombysepticus str. Wang
ttggaagaaaaaaacggtattaccgaccatatgaaggaacttgtagaatatttatttgaatacatgtttattgatcgtaaaaaaaatcgagatatctattatgaaataaggcggttgcaaaaacagatcacttattatgtaagtgaaaattttaagtacaacttactcgtccatccagactttattaaattagaaaaggttacaacatcacctaaaccatggatgggcattgaacgttttaaaggaccgagagattatgtaatcttatgttgttttatggcttttttagagcaagaaatcacgaatgaattcattactgaagacctaacaaaagctattaaaaattactttcctggagaagaaggactacagtgggaaggtaatggtggttatcagaatcgtctttcccttataagagtggtacgagcgttagaggaaattggaattatcgtgattttagaccaaaatatcgatgattttaaagatgatgataaaaagcaagtgttatttcaaaaacaaacccaaagtcattactttatgagaaacctcccttttgatattacagcttgtcagtccccacggtctttaaaattgaaaagggtactagaaaaagagttaacaggcatcctaccaaaacacgaattgaataggcgtttatttatagaacctagtattcgaaagcgagatttagatgaaggtctgtatgactacttaaagaggaatatcgaacaagtggaatcctttgtggaagaaactagttcttaccaattggaattctataaaactggggcaatgttaaccaggacggaaacctataaacctcttaccacatttccaaatttgaaaatggaaagtcatcttactatgcagctatctttttatgtaagggaacttatcaaggagagaaaagtccataaagagttggaaggggagattcaaatgacccgctctgagttcctacaagtaatagattcattaaaggagcgaaatggagatgaatggaccgcaagttatagacaaatgagtgctaagcaaatatgtaaagagtttattcctttcctaaagagttggggcttttgcaatgaactagaagacagagaaaatcttgtattatatgattcacttggccgggtaagtggtacttatgacatggaaatgaaacaaactgaatgggaaagtggaggagttgaaaaaacgtcatga

SEQ ID NO: 51003 - DNA, 4203 bp, Bacillus bombysepticus str. Wang
atgacaaaagatactcgatggagaccaaaccaagctggattccttaacttttggttctttaaggatgatatattggagtttatcaacggaaagctacatctaatgggagaaaacatgagtggaaaatcagtcaccacacaaagtttaatcaccatattactagacggaaagaaagatgcaacccggatggatacattcggtagtcgctcccgaactttacgggatacctttctagggagcacgggggataaggacaaacaagaaagaaataatcaagataaactaggatatacctatctcgagtataaaaggggtatttatgatgaatacattacaacagggatgggtctgcaagctaaagcgggtgttcaagacttagactattggttttttatcattttagataattctagaatcggaaaacgacctcaggatgttaaattgtacaaagaagagtggatagacggtgatgtgaaaaaaatcccactttccaaagaagagttgcgagaacaattaggagaaggcggtaaaatttatacgactaatgcagagtacatgaaggccgttaatgatcatctgtttcaatttagggagattcaagtttttgaacatctgattaaattattaattgctttacgttccaataaattaggtgggggccaaaagccaaaaatggtgtatgaaatcttaaccaattccctgtcatcattatcatcaaaggaactaagtccacttagtaacacgattgaatcaattgatacaattgaaagcgaattaacagaattacagtttgcctacgactacatagaagttattacaagtgtatatgaagcctatcatgaagtgtatttagcagaagtggcaaatggatatttaaaggctgaaaatcgcttacagaacctttatgaacgtcagaggtataattcgaaccagttaagtactacccaaagtaatgtagtaaaactgactgaagaaatatcccatttggaggcaaaagaaaagaccttgaatgagcggattgaagcgctgcgtagtaaggaagcaaaagacctctctatacaaaaaggaaggctcgaaaatcaaaagatagatattactcgtttaatgaaaccgaaacaagagcagagaaaaaccaaggaaacaaaaattaaagaaatgaatcagctatttgaagctacaagtacaactagtttaaagtggataaatcgcatgaaaggtgaattgtcagaaatggagcgctgtgctttagaatcgtcttttaagcagcatagccgacatgcaggacactttattactcgatatgagcattttgattatgatttttccttatggaatcaagacattcaatcttatcaaacattcattcacgacatacaaaaacagatattcgaactcgaaaaattaggacataagaaaacagttcttacggaagaaaaaaatgaagctacggttctccttaaccagaaacaagaagagcttcgtatgatgaaaaagaaacttgatgaactgaagaaaaccttcagtaatgaaatggatgaatggttagaagataatgaattcttagttatgaatgaagaagagaaagagcaattgttaaaaaaattgtaccattttccttattccgtcacagaacgagaactaactgaaatgattgagcagcaatatactgatgtaaaaaggaaaatcaatgatgaaattcatcaagtagatagattagagggtgaaatcggacaaaagcagtctagtgtagaggaagaactcaatgaatggattgtcggtaagatgcctaaaccttttctttcaaaagagaaagaatcagtattagaagcaataaaagaatggaatattccgcatatcttattctatgatgcggttgagtttcaagatggtctttcagaaaaggaaatggcttccattgagtctgcattagaagatactggacttctaactacggtaatcgcagatccaaaatgggatatacagctaagcgagcatacaacagttccgaacaagcatggaactccatataggtttaacttaacccaatatctaaaaccaagtaagaaatcaggaaagctggctgtatgggttgaagagctgttaagccacgtcggtatttcgaaagaggaagagtgttttattttatccaatggtaacttcaaaaatggaattattaaagggcaagcatcgcttaaagagtcacctcagtaccttggtgaaagggtgcaaattcactataaaaaacaaattatgtcatcgttggaaaatatgttagacgaaatctcccatgaactagagaaattacaacaagaaaagagcgatttatttctacagctggatttgttggatgatgaatatcataatttaccagatagtaatgaaattttagaactatatcaagcttcaaacaggaacgaacagagtataaataatatttttgagactaagttagattctgtaagaaaaaggcttactactcttcaaaacgaaatggatacaatgactagacgtattcaggtagaagcagattttacagaaattccattaacatctgaagcattttcacaagtgagagatgaaatgcaccgttatgatcgtcatttgaatcaaattaaaatgacttataccgaattaaaaagtattcaacaatcgatggactcatacaacacacagaagcattcattattagaggatgtagataatttatctgcagagattttgtcacacgaaaaggaattacagaaaattgaagttcaaatcagtgtcataatggaagagatggaacattcagggctacttgataatgaaaggcaaatcctagaatatatgaaagaattacagtccattcctgataaaaaggactatctcagaaaaaatttgcttaaagaagaaagtaaatcattgcagttaagtgagaaaataagtttcatgttaaaagagcaaggcgttagagaggttattcgagatgcatgggaaaagtattttagctctctcttcacattaggtgaaaatgatactttgagaagagtagctgaggagtatttggaaattgctcgtaattatctggtcgggaaagaagatttaaggagtctttgtacacggtctgaaaaagagttattaaatgaattctataagtctagacaagcaattgcacagtattctccaattcttgatgaatacgttagtaacattgaggataacctggagattccatcagagttagacgaattgaacttagagacggaatggaacaatctcatttctctacgtaagtacaaacttgttctagatatacaaattaacggcattatccaacgaagagaaccacgttatgtgctttccgttctcaaagaacgtatggacttgcagcgagctaatttaagtgagcgggataagagaatgtatgaggaaattctattgggttccattggtcgaacaattaagcggaaaattggtcaaacgagagactgggtaaaaaatctgaatgaaattatgatgaacatcaatacggggggcgggctacagttcggaattaagtgggtaccattgaaagctacaaccgaagaagaactaaatactagagaaattgttcgtttactcgaaatagatgctcctttgttaaagcccgaagatcgtgaaaagttaattgatcatttcagaagtaaaatagaaacaaggaagctagaacaaggtttagagcaatatactggtttcgatttaaaagaaacatttaaagaaatacttgattaccgtaattggtttgaattccagcttatatcaaagtacgttaacgaagaagaattcactcttgtggatcaagataagtttggaaagttcagtggcggtggaagagcattagctttatacattccgatattagcagcagttagttcttgttatggcgaagctcattatgactcgccgcgtattatttcaatggatgaagtttgggctggaattgataataaaaatattaatgaaatgtataagttacttgaggaacttgagtttgactttatttcgaacagtcaattcgtttctggttgttctccagatttgaaaggattatcgatttatgaactaatcagaccaaagaacagtaaagaaatcaatttcggaaggtatatttggaatggaaaatacaaagaatatgtgaaaaataactcattaagcgaagactatcctggttcggccaatatgtaa

SEQ ID NO: 51004 - DNA, 1335 bp, Bacillus bombysepticus str. Wang
ttgtattctcaaattcaagaaacagtgaactattttcgttcaaaaggtggctacgaccgccttttttatttgtttagagaagaagttattcgatacggaagagtaaaaggtgttgtaattttaaaaaacgcaacagatcaggaaaaggaatgtttggatgggataatgcctaacatcaattttaaggataccgatattaaagtacgcttacttacttttgagaaaagattaaaagaaagaacagtttatgctagcgtaaatttggacgatttattagaatgttatttttctcaaaagatcgttagtaaaaaagaagtggatgagcgtaaaagaagcagaaaggttcaatttattgaagaagtatctaaatatacaagccacccttattatcaatactatatagtctcaataaagagaaaaggaagaggatataaacgttttatgaatttgtatgaagaatcatcttctactttgaggaaatatttatcccacttaagccagtcgatacagcttttacccttaagtaaaatgacgcatgttgctatgtttgcagctaaaatgacaaaagatcctcatgcctatgatatacaaacctcattaggcgacttattttttgatatattgacaattgcctatgagaaggaaataacaaatacgcaattatcatctaaattatctatagaagacatcaatgatatattgaatcattgtaatttgattagagatgatatttctagtgatgtgatattcacaggtctttatgccaaagacataagaggtttaccaatagaatacattgatttagcaacaaagcatgacactgttttgaagttacctttatgtgagcttataaagatagaaaaattttatccaattgaatcattcaaagttgtttatgcatttgaaaaccctattctttacaaggtttttattgaatcagtaaaagaagaagttgggtgttatcctccttctgtgtgtacgagtgggcatttttcttatgcattatggaagttcttcgataaacttatcccatataactctactgtaatcattaaaactaatttcgatatggatcctgaaggattaaaaatgaatgataagctatatagtcgctatggagaggtgattcacccgattgcttattctaaagagttacatcaagagcaacagtcggataagaaaattcatcttaatcgattaaagcaattagataatcttacacatggtgttctaaaggaaatgggtgagttgttaaaggaagcaccccaggcatcgtatcaagagaactttcttgaagcttgtttagaggatgctattagccaatttatggggtga

SEQ ID NO: 51005 - DNA, 1479 bp, Bacillus coagulans DSM 1 = ATCC 7050
atgaagaaagttgtcgaagcgagttatctgacggcggattctgctgcccagtaccgcgtgattttgcgcttcttttacaggcagcatgaaaggatgcgcgactttatttcgccggaggaagtgctcgaatatttgcgctcgctcccggcttttcacgattatgaagaagaacagctgcaccagcagttggcccagctggtaaaatggaataacctggttgcccgccaggatatgacaaatgccaaaaccatcgaagaatataagaaaaaaagattccgctaccagtgtacgccttacacagtggaaatcgagcggatgctgatccagcttgaaaaactgggggaccagttccagggatcgctcgaacgttcgcaatttgaccgtctgctcgcctctttggcaaaactggaagaagaactgaaacagccgttggacaaacctgcagcccactacatgcacatttgggatgacatttttcactttttcgggaccatccggacaaatacagcggattacatagcctatatcaatagcgaaaagacatcacaacggatgcagacggaagcctttctcgtatataaaaaccaattcacggcttatttgcgtgattttatcgtctcgttgcaaaaaacatcgctgcaaatccgggaaaggttgcgggaactggatacgcatatattggcgccgctttttgaaaaactcgtggaacacaggcgccaaattccccgcttggaagatacggctgcttccgcacaagaatggctggaagaattccgggaatactgggagtctttgcggcggtggtttcttggggccagctcctcccaaagtgaactggaaatgctgcagatgcagacaaatgaaatgatccggaggatggcccgttatgttcagcggatcagtgaacgccagcaacatttccggagccggaaaaaagattatttgcacctttccaaatggtttgccgggtgccatagtttggaagaggcccatcaattgtcatccgtcgtgttcgggacgatgacggtacggcatttgcacctggaggaggcgacaacggacaatcttcatgccgagacatgggaagaacagccggagatgcgggaaatcaagccgcgaacgaaccggtaccgcgagaaaacaaagccaggcgctttccgttctaaccatgagcagaaagaaaagcagcggctcgcctatttaaaagagcgcgaacaggaaaagcagctgattgaaaaatatatgaaaaacggggagattcgccttgctgaaatcgggatagtggagccgtttgtccggaaagtgctgctcggctggatcggaaaatcgatggcagcgaaaaaccatgaagtaaaaacggattacgggatgtccgtaaaagttgtgattgacccggatcggatcatcacactggatgcagaagacgggaaactgatcatgccggatgctgtatttgaattatcgggaggagagcgctga

SEQ ID NO: 51006 - DNA, 1164 bp, Bacillus coagulans DSM 1 = ATCC 7050
atggatccgttacaagtttttgatgaaaaagcggtgcaggggatggacctgttattccatcattactggattttgcggtctgagcacccggactggtaccagctcatccgcgagcgcgaaaaagtgctgcgccgttacatcagcgagaaattcgggctcaggctgatcatccaccagcattttatcaaacttgaaaaaatcccggtggaaccggaaagctggatgggcatcctgcattttcaggagccgatggattatgcgattttttgctgcgcgctttcttttctggaaggaaaagcggtggatgaacagttcctcttgtcggagatgtgccaggagatccaaaacgattatcctgtggaagatgggctggactggacgctttatcttcaccggaagtcgctcatccgggcggtccaggcactgatggaattccatctgatccggacaatagacggcgatatttccaggtttgacacttacgaagaccaggaagtcctatatgaagcgaccgtttacagccgctattttctaagaagctttccggatgattttacaagttatgcggactggaccgggctccttgaagaagactggaaacagaatcaggaagatgaacggcgcaagcgggtgtaccggaaattgtttttctcccctggcctgcaccggaaagatacgcaggaccccgattttctttatatccgcaatttccgcaaccggctttttgaggacattgaagaacacagccgttataaactccatgtttttaaaaacacagcctttttatctgccgcagaaccgcggagttaccaccatgtttacccgaatgcaaaaggttctacggatctgatgctgcagttgtcaaagacgctgcatgaccacccggaaaaatacgttccgaatgaagcgggggaaattttgcttacggaaggcgaatttgaagcggtcattgacgagatgcgctcccgcctcgaacgcggatggccgaaacatttccgggacgccggcacaaaggcggtatgtgcggaattggtcgaaacgatgaaagaatggatgatggcggaaacggatgaagcggcggggctgatccggataaaaccgctgttaggcgtgcttgcaggcaagtatccggctgattttgagaaaggggatgagcaaccgtga

SEQ ID NO: 51007 - DNA, 1296 bp, Bacillus coagulans DSM 1 = ATCC 7050
atgaatgatgcgatcgatctgttaaggaaggaaccggggatgatgaaactgttccgcctttttaaagaaaaataccgttcgctcggccatatcgggggaaccatcagtcttgccggttttacgcgcactgaactggaggcgattgcaggtcttgccggcacgtcccctgatttgctcagagagaaaaacaaaatttcgctgcgggcatttgaaaaggcgctggcgccgactgttttcggcaagtacaccctggttgagctgcttgaagcggttttgagggaaaaaattttttccaaagcggaagaaggggaaatagagaaaaagaaagaggaacagtttttggcgcggctggcggagacgatgccgggcggaaactggtggtggcgccggattgccggtaaaacggctgacacgcgttttatctggcatgcgtacaagcaggatccggatacgttgtccgaacagctcacaaccgtcttgaaagcttccacaatgctgccggaagaagggaaatatgaacgaattccgtttttttcccagcgtgtgacagggaacccgcatttttttgaccagaaccgtttcgaaggcaggctctttgtccattgtttgttcaccagccaattgttgaaagggctgatcgaagagatgccgaaaacgacggaagaattgaacgaactgtacgcaaatgccgggctgatgcgggatgacttatggagttttgtgacgtgccgcgcatttttggcggaaacggaaaacggcctgcacccggtctggcgggaagcagctgctgcagggacggtcatgaatgtcccggtgaaagaattattgcagcttacgaacatttggccgcgggtgggaaaaaaagtctggatcattgagaattccggcgtggcttcggccgtgcttgatgaagtgcccgatgcgcctgtgatttgcacgcatggccagttccgcactgctgcctggatcatgctgcagcgtcttgcggaaaacgggtgtactttttattattcgggcgatctcgatccggaaggcgttgccatggcggagcgcctcagcaaccgttttcccgggcaaacggtattttggcggatggacccggatgcatacttgcgggttctgtcggaagaggatatatccgcccggctttccaagctggatgcggttcaatcccctgaactgcttttagtggcaaatgaaatgcggttgaagaaaaaagcggggtaccaggaaggccttgccgatttgcttgtagaagatttgaaaaaaagatgggcgggcggaaaagagatatga

SEQ ID NO: 51008 - DNA, 1482 bp, Anoxybacillus ayderensis
atggatacgtcatggctaaagccgattacagaggcgaaatatttagtagtggacaacgcgtatcgataccgtgcgattttgcgctatttttatacacagcacgagcgaatgcggcaatatttgtttccggaagaagtatatgcttttctaaaacagttcgatgaatttcaaacgtatacagaagaagagatgcaacaagacttagagcagctcgtcaaatggaaaaacttaatcgcgcggcaagaaacgggccatattcggacgattgaggaatttaaaaagaaacggtttcgctatcaatgcagcccatatacagtcgaaatcgaacgaatgattcgtacccttgagcaactaggggaaacttttggcggttcgctcgagaaaacgcggtttgaccgcctgtatgcctcgcttgtccggatggaatcgattattgacaatggattcggggaaaaacgagaagaaatgaatcaagtgtgggaagaaacgttcgattattttaaaaaaatcatccaaaattctgccgattacatcgcttatttgaacggagaaaacatggaagaacggatgatgtctgattcgtttcttgcgtataaagaacagtttaccgcctatttgcgtgattttatcgtcgcattgcaaaaaacatcgatgcaaattgaaaagctgctcgaagatttgccagaggacggggtgcgtcggtttattgaggaagtagttgcttaccaactcgccattccccgttttgaaggcgccgttttttcacgtgaacagctaacggaagagaagctagacacatggcgcagtttaaaagaatggtttttagggagaaacggacatgaaagcgagctatcgtttttacaaaagcaaacgaacgaagcgattcgacgaatgacgcgcgtcgtccagcggttaggagaacgccatcatcattttcgcagccgaaagaaagactacttgcatttagccaaatggttctcgtcattagaaacggtagaagaagcgcataaactgtccgcggttgtgttcggctgtttccatacgaaacacatcgtcgctgaaaacgatgcgacggaaaacatgtaccgcgatatttgggaggaacagccgacagaatggctcgtcaaaccgcgcgttcgccattaccgggaaaagaaaaagccagaagcaatgattgataggcgaaaagaaaaagaggaaacaatgaccgcctatttagcagagaaacaacaagaagaagaagcgctcgcacagcttataaccgacgggaaaattgtacttcaagagcttccgatcgttgctccacacattcgtaaaacgttgctcggctggattgcgaaagcgatggggcgagaagacaggattgtccaaacggaaaacgggtggaaagtgaaagtggtccaacgtgaaggaacgattacactggaagcagaagatggcatgttaatgatgccgaattacgaaatccatttgctagattag

SEQ ID NO: 51009 - DNA, 1167 bp, Anoxybacillus ayderensis
atggaaaaagagtttgatgagaaagcgaaagaagcgttaacggcattgtttgaacatttttggattgttcgggaaaaagagccggagctttttcaaaaaatacgcgaacgcgaaaaagtattaaagcggtatgtgcaagagaaatttggctatcggttaattattcaccgctactttgctaagctcgaaaagataccagcggagccagaagcatggatgggcattgagtcgtttcaagaaccgctcgattacgcattgttttgttgcttattagcatatttagaaggaaaagcggtcgaagaaaaatttttattgtctgacgtatgcgaagaaataaaagcgatgtacccaggcgaaacagcgcttgattggacgaactatcaacatcggcgcgcccttattcgcgtgttgaaaacagccgagcaaatcggaattgtacatcacgtcgacggagaactcgaggcgtttgccaatcaagaagacgaagaagcattatatgaagtccctgtattgtctcgctattttatgcggtcatatccgaaagattttattcaatatgaaacgatcgagcaactgttagaagaagaatggaaagcagcgcccgacgactaccgccgccactttatttatcggcagctctttttatcgcctgtcgtgtatcgtcggcaaaaagacgacccaaacttttattatttgcgcaacttccgccatcggttgcgtgacgacatcgaagcgcataccgattttcgctatgagctatataaaaacgcagcgttgctgacgatttcagaacggcaacatgtgtatacattgtttcctaaccaaaaaggaacatcggatatcattcttcactttgccgccgttgtgcgcgctcacttggacaactatccgccagatgaatacgggcaaattcgtgtcacgatgccggagtttcatcagttgctgaaccggtgtatggagcaatacggcgaaggctggagcaaaacgtatcgagaaatgacattggcacaactttcatctgaactgctctctgctttaaaagaatggaaaatggcggagcatgaacaggaaacgggcatggtgactctttatccgctacttggacggcttgtcggtcgatatccggacgattttctaatgaaaggaagagacgatgatgacgaataa

SEQ ID NO: 51010 - DNA, 4137 bp, Anoxybacillus ayderensis
atgacgaataaatgggtgcttcatcgcgcaggattgattaatttttggtattacgatgagcaatattttgagtttgccgacggtaagttgttgcttcgcggaacgaacggttctgggaagtcagtgacgatgcaaagcttgcttcctgtcttattggacgggaaaaaaacgccagatcggctggatccgttcggttctcgggcacggagaatggaagattacttgcttggtgaaaaagaaattgtcgatcgcgatgagcggacaggctatttgtttttagaatataaacgaaagcagacggagcaatatgtgacaacgggaatcggattgcgggcaaagcggcaaaaaaacatggatttttgggggttcgtcatttttgataaccgccgcatcggccgtgatgtatttttatataaaacggaaaaatcagcgaacggaacggaaaaaatcccgctcacgaaacgcgagttagccaatttgcttggcaacggtggaacggtcgtggattcccaaaaagaatatatggaactcgtcaataagcacgtcttccgttttgaatcaatggaggcgtttcaagagttaattgagctattgattcaattacgtagcccgaagctatcaaaagattttaagccgaccgtcatttatgaaattttagaaagctcgcttccggcgttgacggacgacgaattgcgccatttatcggaaacgattgaaaatatggatcaaacaaagcaacaactagagcagctcgagcgggatgagcagtcgttaaagcggctttgtgggcaatatcgggcgtataacgagtatatgatagcggaaaaagcgagcgaatggctaaaggcagaaaaacaggtgaagcggctagtcgaagaagggaaacaatggcttacggaagaagcagaaacagaagcgcaccttgtggatttaagcgaatacattcaaacgcttgcaaacgagcaggacgtattgcatcaacgggaattagaactcgcaagccacgaagtgttccaagcggcgcaacaatatgaacgcatccaacgagaaatccaaaacgtgaaagaaaagcaacaaaagctattgcgacaaatcgatgaaaaagaacaaatcgaacgccgctacaaacgccagcttgaagaaacgaatgataagctgtacgaaacagaaaaacaactcgatgggcagctagaagatttgcgccacgatgcgctagaaagctccttttctgcccacgacctcaatgaagcggatttttcccgccaccgccaaacgccatttgattttactgtatggaagcgtgaggggcagggatatgttgagaagctagaacaaattctcaccctttggcgccgccatgatgagataaaggcgcgctatgaagagacgagtaaagaagtaggcgacctgcagcgggaagtcgacgaattgcgccacgaagaagcgaaatggctcgagctgttagaaaacgaaaaatcgcggttccaacaagaagtatttcgctggctcgagcaatgccaagacgtttccgtgcaagaaacatctgtccaactatttttgcagcgccttcatgaactatacgaaacgtatcatatcgacgagatgaagcagccgtttacggaagcgtattacgaagcgctcaatcgaaaaaacgaagaaaaaatggcgcaaaaacatgcgtgcacgttactagaagagaagattgccgcaaaagaagcggaatggaaccaatggaaaatgcaaaaagacccagaactagcgcgcgatgaacaaacgttggcagcgcgggcggagttagacaaaaaaggcgttgcttttgtcccattttatgcaggggtggaatttcaagaccatgtgccagaaccgcttcgggagcggatcgaatcggcgctgtaccacgcagggctgcttgatgcgttaattacagaaaccgatgttgaagtaagttgtgaccgtgtacttttcccacgtcctgtcgaaatggcgcatacgttggcagactacttacaaccggacgtagatgaagcgtgtcaggtgtcgaaaacgcgcatcgaagaagtgctccaaagcattgtgctttctgacagagaaatggatggagcgtttgtgctcaatgaagcaggacattatacgctcggattagtcaaagggcatgcaccgatgcgagaaaaagcgctatttattggccgaacagcccgcaaacgttggcggttagaaaaaatcgccgcacttgaagcggagctagctgaacttcgtgcccatctttacgaacaaaccgaaatgttccgccagctggacgaggcgattgagcaaatgaaaaattggtttcgctcctttccaaccgatcgtgacatgcgcgcagcctttgaagagcgagaaaaaacgaaacgcacgatgtttagtaaacaacaagaatgggaaaagaaaaacgaaaaactagcacagcttgcccgcaattggcaacaactcaaacaaacgctccgtgaacaaacggaagggctcgatatagaattttccaaagatggctatgaacagtcgcttcttttgatgaaatcgtatatgcggcgtttgcatgaacttcaattgacccaccaatcatttgttcatttatttgagatgatcgagcgtctcaccgagcaagtgggaacattgcaacaagaaatcgatgacatcaagggtgaacgaaatgtactagcaaacgaacagcaaaaacttgatttgaagcggcaagaaatcgagcgaacgatgcagctgatgggggcggaagaagtgcaagcagaaattcagcgcgtccgcgcccgattggcgtttttgcagaaggaaatgccagcgaaaacaaatgagcgtatcgcactagagcatcagctcaaagctatccgtgagaaacgcgaacagctagaagggaaagaagcattcgctaaacgattggcaggggcgtggaggcggtcgtttgagcgagaggtcgccctcgaacttgttgaacttcacgcacaagatgcggttgaacaagcaaaagaagcgattgagcgatatggagcacagcttaaggaaacgcgaacgtcgcttgtgaaccggttaaatagcgtctttttccaagagtcagcgaatttgacggaataccggcttagccaagagccagttgtcgtagaggaagcgagtccatttgcggagatcgagctagacgaagaaatggaattaaaggtcgctgggtggagagaaaagcaagaccgaatcgtccttttgcttgattataaagggcagcgcgtatcgccgttttacgtatggaacgaaatcgagcatgatattttcttgcagcgtgaatacatgaaagaacaagaccgtgaattgtacgaagaaattattttaaaaacgattgggcggattttgcgcagccgcatccaacgagcggagcgttgggtaaaagatatgaatgacttaatgcagcagctcgatacgtcttccggtcttgtgttgtttattcaatggaagccgcgcactgcggaaacggaagaagagatggatacgaaagagcttgtcgagttgttgcggatgaattcaaggttattaaaagaggaagatttgcagcgggtgacgaaacatttccgctcgaaaattaaccgtgcacgtgaactgctagaagagcgcggccaaggcaatacgctccaccaaattattaaagaagtgttggactatcggaaatggttttcgttcactctttattaccaaaagacgaacgagccaaagcgggagttgacgaaccaacgtttctatcaatttagcggcggggaaaaagcgatggcgatgtatattccgctctttgccgcaacgtattcgcgttatcaagaagcggcagaagatgcaccgtacattatttcactcgatgaagcgttcgcaggggtagatgaaaataacattcgcaatatgttcgggcttgtcgaacagcttggatttaactatgtgatgaactcgcaagcgctctggggcgactatgacaccgtcccatcattatcgatttgcgaactcgttcgtccgaaaaacgcgtcgttcgtgaccgtcattcgctattattggaacggaaaagtaaagcagcttgtcactgaagcaagaaagggtgagctcattgaaccgattagatga

SEQ ID NO: 51011 - DNA, 1242 bp, Anoxybacillus ayderensis
ttgaaccgattagatgaagcggtgcaattttttcgcggtgaacgttcgtttcaccgccttttttgcgagatgaaaaagaaatacgaatcgcttggccgcattggcggcacgatttccgttgcatctttttcaatggaagaaaaagatgcgattgcgtctttttttggcaaagaaatgagccgtgtatcgcttgcagcatttgaacaacagcttgccaatacaaagtttgccggtatttctcttgtggaactactgtcaagctattttggcgagccgctcgtaacaaaaaaagagcaacaacaacaagcagagcaagaaaaagaagcatattttacgcggttgatacatacgtatcgaccacagcgcgattggctgatggagatggcgaaccaacgagtggtgcaactagcctatcaacaaaatcctcaagcgctagaagcagccatttccgccgtttgccgcgcgcttgaacagcttccatccacgtatgtccgtcttcctatgtttgcacaaaaagtggcgaacgacccgcatgcatttgatttgcatacgcttgcagggaagctactgctttcggcgctgcaattttatgcggacaccaaatacgacttgtcgtcggtcgaagacgtgaacgaattattgcagtcgtatcggttattgcgggaagatgtgctgaactttgtcacgtgcgctggcgtgatggcagaaaaggagggtcgccatcctgtgttcgctgctgcatgcgaaacgaatacggcgctaaatgtgccgcttcgggaagtgatgccgttgacacgagcgtatccgtccattggcaacattgtctttatcgttgaaaatgccggcgtgttttcgacgttattagatacgaacgtaccactcattagcaccaacggccagctcaacttagcaacgatatggctgcttgatttgcttgtcaaagaaggggtcgctctgtattattcgggcgattttgacccagaaggattaaaaatggcgcagcgccttgtcgagcggtacggttcctctgttcggctttggcattacgatcgattggattatttggcgacaaaaccgaccgttccgctaccagatgagcggttagcgaaattgcaatcggtgacgcttcatgacttgcagccagtaaaacaagaaatgttgcggcggaaaaaagcaggataccaagaggcgcttgtggaagcgttgaggaaggagataaagagaaatgttgattttgtttga

SEQ ID NO: 51012 - DNA, 1512 bp, Rhodococcus sp. MEB064
ctgaccgcctaccctgttgcagtgaccgaatccgccgactcctacgtggtggacgacaggctccggctcttctcgttcgccacagccgagaaacgtgccgactacctgcgggttcttcgagcgttcgaccatgcccgcgccggatacgtcgtgctcctgcacgccggtgaggtgtccgacatcctggcccgcaccgagggcgccgacgttctcaccggtgtggagatcagcccgctgctcgaacagctgcacacctggggagtgctcgaacggagctacgacggcacgcgcgcggcgaccctcgccgagtaccgcaaccggcattacgtctaccagttcggacaggtcggatatcaggcataccgcgcagtcgaggacgtgctcgcggctcgtcccgaggacgcctcgttgtcgcggctggtcctgccggagttgctcggagacctcgccgagctggctgcggcgaacagcgccggcgatgccgatctggtctaccgcaagctgaaccggttggacacggcgctgggcgacatggccactcgcgccgcgcacttctacctctcactcggtgacctggtgcggacgacggatgtcaccccggaatcgttcctcgcgcacaaggacgctctgctctcgcatatgcgcgagttcagcctcgacctggctcgtttcggacccaagctcacggcggcgatcgagaaggtggacgccaccgggctcgaggccctgctagatcgcgccgctgcgagcgacgagagagtgttcctgacccccgacgagcggcgcgccgactgggcggggcggtggacgggactcgttcactggttcagctcgacagacggtgatccgaccgagtcggatcgactccgcgagggcacgatgagtgccatcgccgccgtcctgtcgttgctgcgccgcgtcaccgagacccgcaagggcggggtcagtcgcgagtcccagctgcgacatctggccgggtggttcgcgtccgcacccaccgaggacgccgcccacgccctgttcggtgccgtgttcgggttggggagaccacgccacctctcgatggtccaccccgacgacgacatcgttcccgtgtcccggtcgtggtgggacgcaccgccggtggagatctcgcgcacgctggcggagaccggtcgaccgcccgcggccggtgcaccggcgcgagtgcagcgcaacgattccggtgtacgacgcctccgcgaacagcagttgagtgtgcagaggcggcgagccgacgctgcccggtccctggccgatcacggtgtgtacgaccgcgacctgaccggtgaggaaacggacgtgctgctcggcctgctcaatgctgcactgactgcccgtgttcccgtgtccggtcgcgtcggctcctccaccggctccgagggcggcgtgaccctgactctcgctccgcacgagcggtccaccgtcgtccgcacggaacgtggactgctgcacctcgatagactgtccctgaccatcggtacgcggcgatga

SEQ ID NO: 51013 - DNA, 1332 bp, Rhodococcus sp. MEB064
atgagggcgcggacgatcccgagcctcgcgctcgactcgtaccagcgtgctgcgcgaacagtgttgtcccaccacctgatcacccgcacgtatcccgaccgcatcgcgctaccgctggtccgccgctgggcgacggagttgcgggaggacatgctggagatgttcgggtaccgactcgaggtcaccgagaccacggctcggctctacccggtgctggaccgcctggacccgacccaacctgctcgcaccgcgtccgaccgggtcttcgaccgccgccggtactcgttcctcgcgttgtccctcgctgccctgggccgcgccggtgaccagatcacgttgtcggagttggcagatcacgttgccgccgaagccggccgcgtcgtcggcgtggacctggacaccgagcgtgccgccgatcgcgacgccttcgtcgatgccgtcggttggctgtccgcccgcggcgccatcaccctggccgacggagacgccggtggctgggcgagcaatcccgacgccggcgaagccctgtacgacatcgatcgatccgtcgtcgtcgcgttgttccgaccaccgcgcgccgtccagcatctgcgcagcgccgcagggcttctggccgacccgacggacgactctcgacgggccaggcgggcgttggtcgaacggcccgtggtctacctgaccgacgcaacactcgaccccgcatcgatcgacgacgtgcgcctgctgaccgggctcgcggtggaacgtcgcgccgaaggagtggccctgatcgacacgtcgggccgactgtcggacaccagattcccgtccacgggcaccgtcgcacaggtcgctctgctcctggccggcgagatcgccgaccgcgtgctcgaccccgacgtcgaggacggacgcaccgtcgaggcgcctgccgaccgcaccgcggaactgatcgacgccctcgactccgccatccccgacggtagcgtcttcgattctctcgcagacgatctcgccgacgacgagtccgaggacgacgcggacgacatcgagcccggccggcatccgttcctcgccgacgagtggatagacgacacggtcggagcgctcgtcgacgcgtacggccgtaccttcgccgcccagtggcagtccgaccgtctcggagttcgccgagcggcagtccgactcctcaccgacctgtcgctcgtcgcgccggtccgcggtggaatcgtcgccctccctgccctggctcgctatcggggcgtcgtcgtcacggtccgcgagcacgccacgatccaacttttcccaccgtccggcatcgggcagtccgagttccaggagttcaccccgtga

SEQ ID NO: 51014 - DNA, 4143 bp, Rhodococcus sp. MEB064
gtgacgtcgagtaccaggttcaagcccacgcgcgccggaatcgtcaacctgtgggactaccgcgatcaggaattctcgttcgccgacggccgcctcgtgctccgcggacccaacggatcgggcaagaccaaggcgctcgaggtgctcttccccttcgtcctcgacggccgtatcgaaccccgtcgactcaacccgttcgccggcgaggagcggacgatgaagtccaacctcctgtaccggggccaggattcggcgcactcgtacgtgtggatggagttcgcccgaggtgaccgtgacgaccctgaagcggtcactgtcggtatcggcatgcgcgccaccaagtccgcggacaaggtcacgcgctggtatttcgtcgcggaggggcgcgtcggggtcgacttctccctgttcggcgccgacgaccgcccgctgaccaagaagcagctcgcagaactcatcggcaccgacgccatcgtcgaccgcccggtggactaccgggccgcgatcgacgcccgcatgttcggactgggcgcggaacgctacgaccagttgatcaccctcatcctgaccttgcgccgcccgcagctggccaagaatctggacccgaagggattgtcgcgcgcgctgtcggacggcctgcgccctctcgacgaacacctcgtcctggaggcggcacggtcgttcagcgacatggaggaggtcggccgcgccctcgagggcctggtgcaggcggatctcgcctcgaagcgtttcgtcggcgtctactccacctacctcggcgtccaggcgaagaccgacgtcgaccaggtcacgcgtcggctcgaggctgtcgaccacgccaccgtcgcgctgttcgccgcgaaggagttacgggagcggcgtcgaatcgagcgggtggaggcggagacgaggttcgaggcagccgagcgcgcactcgatctcgcagtcgccgatcagcagaccctgcaacggtcgacggcgtacgagggcaagcaacaactcgacgatctggccgacgcggtgcgcaagctcgaggtgtccaccgggcagcaacgggacaaggcgagcaaggcactcgaatcggtcgatgtccggcgtcgtgaatccgaggctgcggcagcgtcgttgcgtgaggccaccgccgccatctcccgcgccgaggacgaacttctggcagccgccgaagacgccggcatcgcctggacgccgctcccccacgacgctcgaacggatcagatcaccgcggccgtgcgcggtcatgcggaggaacgggacggcgacgtccgcgccgtgcgtgcagcgctggcggtcgtcgaccgcgccactaccgaacgcacgcgaaccgaacgcgcagcgtcgcgtgcccacgagtcgcacgatgcgtcgtcggcggcggttcacgaggcggaggcagccgtcgagatcgcccgatcgacgtacgcggaatcgttgcgggcgtggtggtcacagcattcggcacgactcggcgtccccggactgatcgaatcggtgaccgacgcggtcgcgaccgtcgggcaggacgacgctccgtcaccggccgaggtgctgagcgacggtgtgcgcgatcttctcgacaccgtgcgtgatcgacgatcagcagccctgcagacgcgtgacgacgccgcgggcaccatcgcggacctgacggccgaacgagcgtcgatcgcagccgaacacgacgatgctccggcgccgccggcgactcggaccggtgacaggtccgggctctcgggcgccccgttctggacgctcgtgcggttcgccgacgacgtcccggccgacgaggcagcgggcgtcgaggcggcgctcgaagcctccgggatgctcgatgcgtgggtcgccgaaaccgttccggcgggcagggagtcggaacagttcctcgttccggccgatgccgtcgacggaccgtcgctggcggacgtcctgctcgtcgaaaccgacatctctgttccgcatgatctggtgcagcgcatcctcacgtccgtgtctttgactgcggacggcgacggggtccgcgtcggacgcgacggaaccttccgacacggcgtcgtcctcggtcgccaccacaagccgaccgccgaatacatcggtgcaacggctcgcgcctcacgtcgcgctgcgcgcatcgccgagatcgatgcggctctcgaggcggccgaatcgcgccgtgacgacgccgaacgcatcgccgaggacgcccgcgcgcatatcgacggtatccgcgccgcggtcggcgcgatgccccgtgcatcggccgtcacctcggcgttgcgcaccgtctcgtccgctgcgggcgcactgcgctcgaccgcggacgccgcgaccgcagccgaccgggaactcgatcgtgccgtggctgacctgaccgctgccgagcgccgccttcgtagcgatgccgtggcccgtcgtgcgccgtacacccctcgcgacctcgatgcacttgccgctgcgatccggcacttcgagaacaccgggtcgtcgatactgcgctaccggggcgactccgatcggtccgccgagcgcgaccgtgaggcgtccggtcgcctcgacgaggcgcagatcctcgcggaggaatacgccgaggaagcggcgatcgccgagacggagtacgagcagcagttcaccaagctggagaccttgcgggacgcgctgggtgcgggagccgacaagatcgacgccgaactcgacgcggtacgccgacgcatcgaggcctgcaagacggagcagcgggcggcgaccaaggccgaccgtgaatcaggggaagcgatcggcaaggcagagggtgcccacgagaccgccgtcgccgggttgacgacggcgctcaccgaagccctgtccgatgcgggccggctggcaccgtacgcacaccgtgatctgctgaccgtcctcggcgcggcccgcgactgcacatggccggcgagtgatgcggcatggtccaccgtcgagcaactcctgtaccgcatcgactcggctgcaggccccgacgatgctccggacgtgctgccggtcgaagtccgccgtctgcacctcgagctgagcaccgcaaccgagcgggtgaaggccggcgacgcgtcgcggcggtccacacggagcgcactgacggccgcgctccaggagttcgacgcccagctcgcggcatccggtcaggacttccgcctcagctgggacgcagcggacggcgtgacggtcgtgcgagtacaggacgagcagggacatgcgaccatcgccgacttcgccgaccgcatcgatgcggcgcgacgggaccaggaaaccctgctcaccgacgccgagcgccgcatcctcgaagatgccctgctcaccggtctcgctcagcagatccacgagcgcaccgtcgatgcccgcgaactgatcgcgcgcatggggtcggagatgaagcagcggcggatgtcctcgggcaacacaatcggagtgcactgggtcctggccgacactctcgacgacagcacccgcgcggtgtcgaagttgctcgagcgcgacgcgtcggctctgggaccggacgagctcgccgagatgcgcatgcacttcgccgcgcagatccggaccgctcgtgaacagcacccggagcgctcgtaccccgagatcctgtcgaccgcactggattaccggcagtggcgtgtcttcgcgttcaccctcatcggctcggacggcacggaggaccgactgaccgtggcacgccacagcgcactgtcgggcggcgaacagtccgtctcgctgcaccttccgctcttcgcggcagcgcacgtgatgctgtcgtcggccgatccgcactccccccggctgctcgctctcgacgaggccttcgccggcgtcgacgacaacggtcgcagcgaactcctcggtctcagcgtgcaattcgacctcgacctcttcatgaccggctacgacctgtggatcacctacggcgacgttcccggctgcgcgcactacgacctggcgcactccaccgccgagaacaccgtcagcgcagcccttctcgtctgggagaacggggagctgctcgccgagcacgacggcagcgacctggccgcggcactcgggtcgccgctcacccgacgcgtgacggcgccggcggtgggtgggctggacttcgcggaggtgtag

SEQ ID NO: 51015 - DNA, 1479 bp, Kitasatospora griseola
atgggagtgttcgtccgggccaagcaggagttcaccgtccatctgcgcccggaggacgtgcacctggggctgccgccggaggaccgtccgccgctcgaaggggtggcgaccgcgctggagcggctcgccagatggggcaacctgcgggccgacccggacaccagccgggtcaccgcgttggaggacttctaccgcgcccgccacatctaccagctcacccgcgcaggcgaggccgccgaagaggcgctgaccgcgtacgacgcggcgctcggccgacgcggtgagttgcaggcggtcgcgctggcggacatcacggtgcagctgcgggcgctgctggcgctggccgggcagcccggacccgacccggccgtggtgcacctgtcgctgctggcgctggtggatcgcttctcgggcctggcggagaacgcgcgggcgttcatgaactcactgcaacggacggtcgacctgcacgaggccgaggtcgaggtgttcctcgcctacaagcaacggctgatcgagtacctggagcggttcatcgaggacctggtcacccggggagccgaaatcgccggtctgctgacggagttgggcacgcccgaggcgggtccggtcggaccgcttctgcggctggccgccgagcgcgaggcctccgacgcggccccggacgccgcctccgaggccctggccggcgccgaacgccgctgggaggggcgctgggaaggcctgcgcgcgtggttcctgagcgtgccggggcgcaactcccaggccaagctcctgcgctcggccgcccgccaggcgattccccaactgctcgccgtcgtccaggcgttgaacgaacgccgggccggtcggtcggaccgctcggccgacttccgggagctggcccggtggttcgccgaggcgcccgacgacgagtcccgccaccgactgtggcggtccgcgttcgggctgtactcggcacgtcatctgaccatcgaccaggaggcgttggccgaacgcgacgccgagccggtgcccgcctccgcgtcctggtacgacgcaccgggcgtacggatcagcccgcagctgcgccggaccggttcgtacgagcggcgcggccggggcagggcggtgcaggaccgtgccgaggccaaggcgtacctggccgagctggcacgcaagcaggccgagcaggccgccgcggcccgggcccggctggccacccggggagagatccggttgagcgacctcgacgagttggaccgggattccttccggctgttcctgcaactgctcggcgacgccctggcgaagtggcggccgggcacggaatcggtgtccaccaccaccaacgacggggccatggagatcaggttgaccagcctgcccggtgccgggatcgccgagatccgcaccctcgacggcgtccttcggggtccgcagcacctggtcgagatcctcgacctcaccaccgaacgcgcaggagcgggccgtgagtga

SEQ ID NO: 51016 - DNA, 1260 bp, Kitasatospora griseola
ctgggcgacgtcctcgccgcgcagcgggcggaggagttccgccgggccgcgcgggcactgctgcgccggccgctgctgcgcacgggcggttcccactccgaggagttccgtctggtccggcagcacgcggccgaactgcgcacctggttcgagcggaacaccggctgggccctgctggtggactccgaggtggcccggctgcgccgcattccgggccgggacagcgatccggcccacccggcacgggaccagcgcaccggactcccgttctcccggcggcgctacgtcgtggtctgcctgtgcctggcggtgctggaacgtgccgagcaccagatcgcgctggggcggctggccgagcaggtagtcctcgcggcagcggatccggcgctggagactaccggcatcgacttcaccctctccgatcgcgagcagcgcaccgacctggtggcggtggtccggctgctgctggagtggggcgtgctggccaaggtcgccggtgacgaggacgcgttcctcaagtctgccggtgacgcgctgtacgacgtggaccgccgggtgctggccgggctgctggtgtcccggcgcggcccgagcaccgtacgcgccgacggcttcgcgcagcggctggccgaactcaacgccgaggtgctgccggacagcgacgagctgcgcaaccaggcgctgcggcacacgctgacccggcggctgctggacgatccggtgctgtacgccgacgggctgtcggaggccgagagcgcctatctcacctcccagcgcggtgcgttgacccgccggatcagtgaactcaccgggctggtcccggaggtgcgggccgagggcatcgccatggtcgacccggacgacgacctgacggatctccggatgccggagcagggcaccgacggccatgtggcactcctgctcgccgagtacctggccgggaagggcggtaccgtcccgctcgccgagctgcaccgccaggtggcgggctgggcgctggagcacgccgggttctggcggcgcagcgccaccgtacccggcgccgagaccgagctgaccgaacaggccgtcgaacggctggtcgcgctcgggctgctggagcgcgcggcgaccgcggacggcacccccgccgtccgtccccgcccggcgctggaccgctaccgggtcggcgagacgatcctgctggagcccggccagagcgctccccggaagagcacccagaagtccgcgaggaacacgaagggcaagaggacccgatga

SEQ ID NO: 51017 - DNA, 1254 bp, Kitasatospora griseola
atggacctcccccgcctccagcggctgctcggcccacccgagctcgcctggctgctcgaccgcgcgcgccgacgcctggaagccgggcggcctctcgacggcacggtctccctggccgaggccgacgacgacgcgcgggcggccgtcgcccgcctcctgggccggtccccgcgccccggccggtcgctgtccgtctcgctggccgccgtcgaccacacgctccgggccagcggcgccagcccggacgggctcgccgcggccgtggtggcgctgaccggcccggtcaccgacaagcacgcgcagggtgccgccctggccaccgcctggcaacgcgcgctttccgagctcgaccaccccgccgtcaccgggcggcccgaactcgcctcctggcaggccaaggtggcggccaccggtctcctcagacggctcgcgggcggcgtcccggccacagcccgccggctggccgccgacgcagtacgggtcctcgcccaactccccgccgacggactcacgctgcccgtcctcgccgcccgcaccctcggcgacgcccatgccctggaccagggccgtccgctcgccgcgctcgtccactccgccgtccgggccctggccgccaccgagctgcccaccggcgccgaaggccgccgggcggcctgggcggccgttggcgtagccctggacgaactctcctcccgcgttctcgtcctcggcctgctcggttccaccaccaacaccaccgcacgcatcctcgccgcggcccgcgaaggcggcgaaccctgcctgctgaccctccgccagctcacccgacagctgcccgagctcgggctcaaccggcgcaccgtccacatctgcgagaaccccgccgtcctcgccgccgccgccgacgaactgggttccggctgcccaccgttggtgtgcgtcgagggccaactgtcggtcgccgcccgcaccctgctcggtcacctcgccgaccagggctgtcggctcgcgtatcacggcgacttcgactggggcggtatccgcatcgcctcctccgtcctccgcctccccggcgctctcccctggcgctacgacagcgcttcctacctcaccgccgtagaacgcggcctcggcaccccgctcaccaccggcagcccggcccctaccccctgggacccggaccttgccctggccatcacggagcacgccgtccgcatcgaggaggagcacctgctcgaccaactgctcaccgacctccgtcggcagactgcatag

SEQ ID NO: 51018 - DNA, 1488 bp, Lachnospiraceae bacterium TWA4
atgcaaaatttagataaattaatgaagccacttgtagaagttaagtacttaacggcagataatgtggataggtatcgaagcattatgcgtatattttttaaaaattatgagcgactaaaatactggatgtatcaggaagaagtttatgacgagatgataaaaaatccatattttaaagagtatcgaattgagcagtgtcaacaagaccttgctgcacttagagagtggagaaatttagaagcgattcaagatactaaaagggcgatgagtgtagaggaatttacaaataaaaaatttcgttatcgaatgtctgaatacagtgtagaaattgagcgattggttttacgattggaaaatttatctgtggaaggttcctccctagagccaacactgctagaacgaattcgtattcagatggaacaattttctatgatatccgtaaaagatgccgaacagattaatgcttggtggaaagatttgaacaatgattttattcgtctaaatcaaaattatcaggattatattcgtgatttaaatagcgtaaaagctgaggaaatgatgcatacaaaggagtttttgatttttaaagaccgactcatagaatatcttagaagttttatcaaaagtcttcaaaagaatgtgggaatcattgaagaattactaattcaattagatgaaaatgtgctagtagctgtcttggaaaaggtcatagactatgaattatcgattcctagaattgatgtagaaattactagagaacaaattaaagaaaaagtttatggaagttataatagcattagaaattggtttgtttctgaaaaaatgactgaaagtgaagcagctaagctttttgatgtgaccaatgatattatccgaaggattacaagatatgcagcaagacttagtgagaagaatgcattaggagcaaatcgcaaggaagaatatcgaaagattgcaagtatttttatggattgtgaaaatgtagaagaagcacataagatggcagctatggtctttggtcttaaatcaccacatcacttaaagggacaactagttcgagaatcagggagtatgaatcagggagtttatgaggaaaaggcattgcaatttaagttgactcctagaataagaacttataacgagaaaactcatcgaagtggaattacagaatctaagcgaaaaaaagaagaagttcgaagacaattaattcaaacgattaaagaaaaccaagagaaaattgccaatttagaagtggatggagtcattgatttttcaaacttaccagtgattgagtcaagagtacgtgaaattttactaaaatggttatcaaatgcattagaagattcttcttatacggcaaaaactgaagatggtagagactataagctagatatggaagaagctgataagaggtgtattgttcactgtgaggatggcaattttacaatgcctaaaattcggttaatttttacaaaggagaatttataa

SEQ ID NO: 51019 - DNA, 1143 bp, Lachnospiraceae bacterium TWA4
atgatgaaagaacttgaacttttgttaaatagacggtggatactaaaatcagaagataaagaactttattataaaatccgagattcgattggtgaaattcgccagtatgtaacagagaaattaggctgtcagataattgaaaattcactgttgattaagttagaaaaaattccagcgattccagaatcctatatgggaattgaagaacttttatcaaaagaagaatatgccatactttgtattcttttgatgtttttagaagataaagatgcaggagatcaatttcttctttcgcagttaacggagtttattgaagggcagatgccaaagggaagtattgattggacaatttatagccatagaagacgattggttcgtgtacttcgctatgcagttgatgagttgatacttaaagtaactgatggaagtgatgagggatttgtagaccaagaaatcggggaagtgctctatgagaatacaggagcttctagatattttgttaagaacttttcgagagatattatggggtatacaaaaccagaagattttagagaaagtgattggtttgatattaatgaagacagaggaattgctagacgtcatagagtttataagtctttgcttttttcggttggtatgtataggggagttcattcagatgaagattttgattatttaaagcgttatggctatcgactgaatgaggaatttgaacaaaactttgactgtgaccttcacattcataaaggaagcgcctttttgattatgggagaaaattctaagatagggacttcctttccaggaaggaatgcaatttcagatatcttactgctttgtttttcaaagattcgacaacgaattgaagacaaggagtggaaccttcagaaaaatgagcgagtaattgtcagtcaagtcgaatttgaaaagctgctgtgtgaagttaaaaatgaaagtagtagtggatttacgaaaagttatcgtgagatgacacagggagagtttattttagctgttacaaaggaaatgatgcagtggaaatttatagaagtgaataaggaagaacactttgttgagatttatccagcggtgggtaaattaggaggatattatccaaaggattttaagggagatgcaaatgaatag

SEQ ID NO: 51020 - DNA, 954 bp, Lachnospiraceae bacterium TWA4
atgaatagcagatggcaagcaaataaaattggattaattaatttttggtactatgacgagcaggagttttcatttattaaagggcgaatgttgcttcgaggttcaaatggatcggggaaatcagtaacgatgcaaagtgtggttcctcttttattagatggaaatatgagtccagaacgacttgatccttttggctcaagagatcgaaaaatgagcagttatttattggaagaagatgatgaaagggaggaaagaaccggttatctatacttagaatttaaacgacaagaaagtgatacctatttaacggttggaatgggcattcgtgcaagaaaaggaaaacctttagataaatggtattttgcaattaaagatggaagtcgaattggaaaagacttcttcttatataaagaaacgagcgaaaaagttactttatccaaaagacagctagagaaccaattaaaaactggtggagaagtctttgaccgtcaagtggagtatatggaatttattaatcgtgaaatctttggatttgaaacgattgaagaatacaaggagatgattgatttactcattcagcttcgtactcctaaactctcaaaagattttaaaccatcggtgattaatgatattctaagtaattctctacaacctttatatgatgaagatttaagaccgatgtctgaggcaattgaaaatatggatacaatgacgagtaatttaaaatctcgtgaagaaggaagacaggcagcaggtaaaatttatagagtatacgataagtataatcgtttactattatttgaaaaagcaaaaaatttagacgaaggcgaaagggaattattgacaattaaacgtcagaagagtgaagcatatacattattagaaagttgtaaggagcaggttgctagactagaatctgagcagatggagttagatacaaaaaagaaactttag

SEQ ID NO: 51021 - DNA, 1491 bp, Bacillus coagulans; identical to SEQ ID NO: 50897

SEQ ID NO: 51022 - DNA, 1164 bp, Bacillus coagulans; identical to SEQ ID NO: 50898

SEQ ID NO: 51023 - DNA, 4116 bp, Bacillus coagulans
gtgacagaaggaaaatgggtgatgaaccgcgccggcttgttaaatttttggtattatgacgatgaagtttttgaatttgcagacggaaagctgttgttgcgcggcacaaacggttcagggaaatcggtgacgatgcaaagcattttgccggttttgctggatgggaaaaagacgcctgatcggcttgatccattcggctcaaaagcaaggaaaatggaagattatctgcttggggaaaaagaagtgtccggccatgacgagcggaccggctacttgtttctggaatatcgaaagcaagggacaaagcagtatatcacaacggggatcggcatgcaggcaaagcggcacaaaactttaaaatcatggtattttgtcctgactgacaaccgcaggatcggctacaattttgaattgacacacacccgccaatcggaacggattccgttgtctgcaaaagagcttgaaaaccgaatcgggtctggggggcatcttgtccattcgcagaaagaatatatggaactggtgaacaaatatatttttggtttccagtcgatggaagcttttgaagatttgatcaagcttttgattcagctcagaagcccgaaattgtcaaaggatttcaagccgacggtcatctatgaaattctcgagtctgcgttaccacctttgacagatgacgagcttcgccatttgtccgacacgattgaaagcatggacgaaacggagcagcagcttgaacagcttgaaagagagcacgaatcggcaaaaaaactggtgcgccaatacgatctttacaatcaatatattttggcagaacgcgcccaaaaatggcaggaggccgaaagcaggctgcaggaagcaaagcaggaggccggtacgttagcagttcgctgtgaatccctgcgcggagtgattgaaaacctgacagaagatcaaaaacagaacgaacagaaacgcgacgttttaaaagcggaacaggaacggctgcagcaccatgaggtatggcgccttgaaaaagaaaaaggagagcaacaggccagggctgaaaagctaaaaagtgaagcagcagatctggagaaaaagtgggaattaaagaaaagccagcttttaaacatccgcttggaacaggaccggttggaaacagaaaacagcaaggatgaagccagcatgcaggagacgctggatgaacttgcactggatgccggagaagcggctttcccccagcacgagatcaatgccggagacttttctcggcatgaaggggaagcttttgatttttctgtttggaaacaggaaatcaaacagcacagcggacttttgcaaaagttgcagcaactggccggagaagcggagcggcttcacgagatgcatatgaaattgcagcgccagtcatctgccaaaaagcaggaaattgacgaactccgtaaacaacttgaccatttggagaactggtttaccgaacaaaaacaagaactggaagatgccgtgtttttatggattgaacagcatccggccctcccctttacagacgaacgactccggcgcattgccgtcgcgctggacgggctctatgaagaaaaccgttatgaagcggtcagggaagaaattgtgaaggcggcaaacgattatattttgcaagtgcagaaggaaatttcccgcgcggagcaggcgcaaaaggcaaaagaacaggaattggctgaagccgaagaaacacttatgtattggaaaaacttgaaacttgccaatccggagcgccctcaggatacggaagctttccgcgccggtctcgatggagcagggaaacgctatctccccttttatgccgcggtggaattccaggatcatgtgaccgaagcccaaaaagccagaattgaagcggcactccggcagacgggaattttggacagcctgattacggaagaaccggttacacctgtgcacgaccgggttatccgtccaaatccgcacattctcggctacacacttgccgattacttaaagccggatccggataatgacagcccggtatcagccgcacgcattgacgaagtgttgcgcagcattccgcttgaaccgtcggacagcggctttcacattgatgcggatggctctttttcagtcggctgccttgttggccatgctccggatgaaggaccttccaaattcatcggcagaacatcccggaaacggtaccagcaggaaaaaataaaagaaacagagcaaacgattgctgaaatccgcctagcccttttgcaaatcgaaaaccgcctttcggaatgggctaggaaagtacaagaagcagaagattggaaagcgggcattccagatgacaaagatttacgcgaccttgaagaacagattgaaaaaacagcgcgcagcctgaaacaggaacaggaatttctgacagaaattgaccgcgattggaaacaagtataccagcatttgcaaaacatccggctacagctgcatgagcaaggagccggcttgaaccttgtccttcaaagcggtccgctcgatgaagcactagcagctgcgaaaagttatgaagaacatcttcacagcctggagctcatttttcaacgtttgttttccgggcgcaaaatgcttgcgcgtcttgctgcggatatccttgaaaaagagcaggaactcgatgaaattcgcggtgaagagaacatccgccggtcagaatgggagaaaacggtggcaaatattgaagcgattgagcagcagctgaaattgcaggggattgatgaggttcgcgcccggattcaggcagtccaacacgaatataccagtacggaggaaaaaatcagggagatctacgaagaaaagccgaaaaaagaagcagaactagaaaaatgcaccaccaatttgtctcttgccaaaacgcgtaccacgttttggacaaatatggcggcggaatgggagaaactcgtaaaagcagaactttccctcggcttcgtggagagcgagcacacagaaccggaaagcattttgacggcgttttctggtgtgctggaaaagtatgaccgcgcaaaattaaatgaaaacttgacaaaagtttttttcaacgaacagtcaaatttaacagaataccgcatgtctgagtttacaaaagaagcggacccgccggattggttcgctgaaaaactcgatgactattacgaaacgttcaaaaaggaatgggaaggcttgcggggccgccgcctcatccagatggaataccgcggccgcagggtgagcccgtatacggtactcgagtctcttgaaaaagaacttttaaacttgcaaagttatttggatgagcaggacagaaggctgtacgaagatattatcgtcaatacggttggcgtcattttgcggaaccggatccagcgggcagccaagtgggtaaaagaaatggatgcgatcatgagaaaccgggataattcgtccggacttactttttcgattgcctggaaggaaaaaacggcggagtccgaggatgagctcgatacaaaagatcttgtcgcgttgctgcagcgcaacagcaagtttttaaacgaggacgatttgaaccggattacgaaacatttccgctcacggattgcggctgccaaagaactgattgaaatccgcaatgaagggtcgacgctccatcaagttttaaaagaagtgctcgattaccggaaatggttccaattcgtgctgtcatacaaacgtgccggcgagccgaaacgcgaactgagcaataccgcgtttttcaaattcagtggcggagaaaaggcaatggccatgtacattccgctctttacagcagcctattcgcgctatttggaggcaggcagtatggcgccgtacatcatttcgctggacgaagcgtttgccggggtagatgaaaacaatatccgtgacatgttcgaagtcgtcgagcagcttggattcaattacatcatgaattcgcaggcgctctggggtgattatgacaccatatccagtcttgccatctgtgaccttgtccgcccgaaaaacgccaattatgtgacagtgatccgttaccggtgggatgggcataaacggtcgattgtagagaagccgaaagaatcattggcaggcgccaccccggatctgctttga

SEQ ID NO: 51024 - DNA, 1299 bp, Bacillus coagulans
atgatgaaggatgcgatcgatctgttaaggaaggaaccggggatgctgaaactgttccacctttttaaagaaaaataccgttcgctcggccatattgggggaacagtcagcctttccggttttacgcgcaccgaactggaggcgattgccgggctggccggcacgtcccctgatttgctcagagagaaaaacaaaatttcgctgcgggcatttgaaaaagcgctggcaccgactgttttcggaaaatacacccttgtcgaactgcttgaagcggttttgaaggaaagaattttttccaaagcggaagaggaagaaattgagaaaaagaaagaggaacaatttttggcacggctgacggaaacgatgccggacggaaatgggtggtggcgccggattgccagtaaaacggctgacacgcgttttatctggcatgcatacaagcaggacccggatacgttgtccgcacagctcaaaatggtttggaaagctttcacgatgcttccagaagaagggaaatacgaacggattccgttttattcccagcgtattaccgggaacccgcatttttttgatcaaacccgtttcgcgggcaagctctttatccactgtttgttcaccgaccaatggttaaaagggctgatcgaagaagtgccgaaaacaacggaagaattgaacgaactgtacgcaaatgctgggcttatgcgggatgacttatggagtttcgtgacatgccgcgcatttttggcggaaaccgaaaacggtctgcacccggtctggcgtgaagccgcagctactgggacggtcatgaacgtcccagtgaaagaattattgcagctaacgaatatttggccacgagcgggaaaaaaggtttggatcattgagaattccggtgtcgcttcggctgtgcttgatgcagtgtccgatgcgcctgtgatttgcacgcatggccagttccgcactgctgcctggatcatgctgcaacatcttgcaaaaaacggctgtactttttattattcgggtgatctcgatccggaaggcgttgtcatggcagagcgcctcagcagccgtttcccggggcaaacggtattttggcggatggatccggatgcatactttttgaccctgtcggaagaggatatatccacccggctttccaagctggatgcggttcaatcccctgaactgcttttggtggcaaatgaaatgcggttaaagaaaaaagcaggataccaggaaggccttgccgatttgttgatagaagatttgaagaaaagatggttgagtggaaaagaagcatga

SEQ ID NO: 51025 - DNA, 1503 bp, Bacillus subterraneus
gtggacgttacgatgaaaaaagttgtcgaggcaagttatttaacagctgattcagctgcacattaccgaacgatcttacgttatttttaccatcagcatgaaagaatgagggatttcatttcccctgaggaacttctagattaccttcggactattccaatgtttggcgattatcaggaagaacagctgcatcagcagctagcccagcttgtaaaatggaacaacttaatcgcacggcaggatatgacgaatgcaaagacggttgaggaatataagaagaagcggtttcgttaccaatcaacaccttatacaattgaaattgagcggatgctgattgtgcttgagaagaaggtaggagataccttccagggatcgttggaacggtcgcagtttgatcgattgttgcagtcattagcaaacttgcagaaggaattaacaggtgatctgtcaaaaaaaccagaagagtacctcagaatttgggaggatgtattccgctatttccagacgatccgaacaagtacagccgactatatcgcatacattaatagcgaacaaacagaccaacggatgcaaacagaggcttttctggtctataaaaatcaattcacgacttatttacgggattttattgtttccttacaaaataccgctttgcaaatcagggaaagactggatgagctgactctagataaaatgtctgtctttttcgaaaagctgattgaacatcgacaatccattccgaggttggaggatgttcgttcatcggttgaggaatggcgaatggagtatctcgaatattgggattccttaagacaatggttccttggatcaagcttacagcaaagtgagttagatgtattgcaatggcagacaaatgaaatgatcagaagaatgactcgttatgtacagcgtattggcgaaagacagcagcatttccgcagccgaaaaaatgattatctgcacttggctaagtggttcgttagcacggacacgatagcagaggctcacaaattatcttccgttgtatttggtgcgatgacgatcaagcatcttcagctggaagaagttagtaccgataatatacatagtgaaacatgggaagaagatccggtgttactcccactcaaaccgcggacgaatcgttatcgagaaaggacgaagccgggttcgatggtatcaaatacagagagaaaacgtcagcaaagagagcagtatttagctgagagaaaacaagagaggctattaattgaaagacatatcgacgaaggcgtcatcaggctttcaacgttagctacagtcgagccttttgttagaaaagtgctgttaagctggattggaaaatcgatggccagcaaggatggaagagtaaagaccgattatggcatgatcgtcaaggtgtcgattgatcgtgaaaaatcgattcaccttcatgcggaagacggaactttacggatgcctgatgcgttgttcacctttgaaggggaaggaggatccggagcatga

SEQ ID NO: 51026 - DNA, 1167 bp, Bacillus subterraneus
atgaagcctgagcaaacactcgatttcgatgaaaaagctattcttggaatggatcttttattccatcattattggatccttcgcagcgaacagcccgaatggtatcagcttatccgggaacgtgagaaggtgctgcgccgttatatcaatgaaaaattcggcttgaggctgatcgtgcatcagcatttcatcaaattagaaaagatcccggttgaacccgaaagatggatgggggttacagaatttcaggaaccgatggattatgccattttctgctgtgcgctttcgtttcttgaaggcaaatcggtcgatgagcaatttctgttatcggaattgagccaggaaattcaagctgactacccgggggatctttcccttgactggacgatgttcatacatcgtaaatctttgattagagcaatcaaggtgctaattgatttccagctgatcaggacaattgatggcgacatcagcaggtatgatcataatgaggagcaggaggtcttatatgaagcaacggtttatagccgttattttatgagaacctatcctgatgattttaccagctatcagcactgggaagagcttttgcatgaagattggcggctcaaccaggaggatgaacggagaaaacgagtgtatcggaaattattcttttcccctggacttcaccggttggatcagcaagatcctgatttcctctacatccggaatttccgtaataggctctcagaagatattgagaatcatagtgattataaactgcatgtatacaaaaacactgcatttctttcgactgatgccttaagacaataccggcagttatatcctgattccaaagcttcgaccgatttgatcctccaaatctccaaacatcttcatgatcatccggagaagtataagccgcgagaaaatggggaaatcattttgacggagggggaaatggatgcgatcatccttgaactgcgcgatcaatatgagcggggatggtctaaatactttcgtgaaaaaggcaatagcagtattcgtgcggaactggtcgaggctatgaaagattggatgatggctgaggtagaaacagaaagttcattgataaaaataaaaccactgctgggtgttcttgctggaacattcccgagcgattttgaagggagcgagaaggaatga

SEQ ID NO: 51027 - DNA, 4089 bp, Bacillus subterraneus
atgaacaatacaaggtggatgatgaaccgagcgggattgttgaatttttggtattacgatgaagaagtattccattttgaaaaaggcaaactattattgcgtggctcgaatggttctggaaaatcggttacgatgcaaagttttttgcctgtcttgctagacggaaaaaaatctcctgatcggctggatccatttggttccaaagcgagacggatggatgattatctactcggagaaaaggaagtcgttgaccgagatgagcgaactggttatttgtttatggaatacaaaaaacaaggtacggaacagtatatcactaccgggattggcatgcaggcgaagcgcaataagggaatcaagtcatggtattttttgttgaccgataatcgcagaattggacatgattttcagcttgcccaacagcatactggtgaaaaaatcccattatctgcaaaggaattagaaaaccggattgggcagggagggtacgttgttcattctcagcgggagtatatggaactggtcaataaatatgtattcggattccagtcaatcgatgcatatgaggacttgatcaagcttttgattcagttgcgaagcccaaaattatcaaaggactttaaaccgacggtcatatatgaaattctcgaatcagctttgccgccattaacggatgatgagctgcgccacctatctgatacgattgaaagtatggaccagactcaacagcagctggagcaactgcaaagggaagcggaatccatcacaaggctggaatcggcgtatgacacctataataagtatattttggctgaacggacactgcaatgggagaaggctttgcaaaaaagcaagaatgcagaagccaaaatgaatgagtacaatacacagaaacaacagctagagcaggacatagtcagactaagggtagagcttggaagaagtcaacagcagaagcaggtggccgaacaagaaagtcactcccttcagcagcatgaagtctggtcgctggaaagaaagcgaacagagaaagtagaagaatcttcagcagcagaaaaagaaattcttagtttgactaagcgtatagaagacgtgaaccggaaacttcgtgacgagttacagaagaagcaggccgccgaagatgaactttttcgatatgctgaaaaagaaaaggaactattaggtgaacttttaatagatagcgatgctagtggttttcttcagcacaatgtcaatgtggcagacttcaacaggacgaaggaaaacggatttgatttcacggtttggcaaaaagaagcgaaaggtcatctggcattgattgctgaactcgaaaagctggctgttgaatctgaaaggttaggtcaagagcaaaaccggctgcaaaggaattcatcggaaaagaagaaggaattggacagcctgcaaaaggaccttgaccattaccaaaactggtttgaagaagagcatcaaaagctcgaaaatgatgtgtttctttggatcgaaaatcaccctaaactatcttatccaaatgagctgcgtcaagaaattgctcgtgcacttcaagggttatatgataacaaccgctttgaagttgttcggtcccaactttttactgccatccaagcttatgaagcagaggtgaggaaggatgaagcactgacaaaggacaggatcgagcaaaaagaaaaagcgataaccgaggcagaggcagaacttatccggattaagacccaaaagatggtcgaacccgcaagatcttcaggaacgatggaacaacgtggcaaacttagcgaggaaggagttcgtttccttccgttttatagcgcaattgaattccaggagcatgtaacggaacaggaaaaagaacggcttgaggctgcattaatgagaacagggattttagacagtctgcttacggatgaaccagtttctccaagggaagatgctattttgatgcctgaaccgcgattaatgggctatacgctagcagactacttggttcctgacctggaggatgatagttccttaacaccagagtttgttgaccaggtgctgcgttccattcccctgcaagctgatgggtctggcttccatattgatgctgacggaacctactccattggctgtttagtagggcacgctccgattgaggggccttcaaaatatatcggcaggacatcgaggaaacggcatcagcgggagcttatccaacagtggatggaaacgattcaggagttgaatgaggaacttgcggacttaaagcaagagctagcaatcctcgggtcggaactagtttcgattgaaatgtggaagcgagaaatgccagaagatgcggttttgatggatctccatgagcaaatcttaaataagcagcatcaattaaagaatgaaagaatcatgctgagccggattgatgaagaatggaagcttgtgtatgacaagtacacagaagtgaagcgcacgatacgggataagggcatgcagttaaatatttccatgacattggaagatctaggtgatgcacttacttcagcacaaagctatatcgattttttacatgaattaaaaaataatgatgttaaggtattcgcagccaaaaaacatttgcaaacgaatgtccaacggattgccgagttggaagaagatcttgatgtgttaaatggagaacggggccgaaaggaaagccagcgtgaaaagatactagcgctaatggaatcgatcgacctgcagctgcaattgaaggggatcgatgaagtaagaaacaggatacgtgaagtccagagggtattgaatgaaacggaagaagcaatcgaccgagtgcggagtgctttgcctcaaaaagagtcagacctagaacgcaacgaggaaaagctcgcagacagccaaaaagatttattcttttggaagcagatgagtgaagaatggggcaaaatggtcgaagaagaaaaaagaagaaacttctttccgtttgatgaaacagcggaattcggaaatattttggaaaagcatgagcgatctaaattatccgaattgcttacgaaggtatttattaacgagcaagtacacttaacggaatacagaatgtttgaatataccgaagatgctgaaatgccgctgtggtttgctgaaccacaggccgataagtatgagccattcatcaatgagtggcagcagctaaaaggccgacgtctgattcaaatggaataccgcggccagcgtgtcagtccttattatgtttctgctgagctgaaaaaggagctggaggaacagcagggctggctggatgaacaggatcgcaaattgtatgaggatatcattttaaacagtgtcggcattattttaagaaatcggattcaacgcgcacagcaatgggtgaaggaaatggataaaatcatggcagatcgtgataattcttccggactgatcttttccattgcatggaagcccctgacggctgaatctgaacaggaattggatacaaaggatttggtacaacttttacagcggaacagcaagtttttgaatgaagaagatctccaaagaattacgaaacacttccaatcacgaatcggcaaagccaaggaattgatccagctcagaaatgaaggttccacgctgcatcaagttttaaaagaagtactcgactaccgaaaatggttcacatttgtgctctcgtttagccgagtgaatgaaccaaagcgtgagctgtcaaataatgctttcttcaagttcagtggcggtgaaaaagcgatggcaatgtacattccgttatttaccgcggcttactcccgatacaaggaagcaggcgatatggctcctttcatcatctcacttgatgaagcatttgctggtgtggatgagaataatatccgtgacatgttcgaggtcgtcgaacagcttggtttcaattacatcatgaattctcaagcgttatggggggattatgacaccatttccagcctggcaatttgcgaattggtacggccgaaaaatgctgattatgtcacggtcatccgctatcaatgggacggaaaacaaaagtcactagtctttgaggaatctattgaggaaatgatgataaatgaatag

SEQ ID NO: 51028 - DNA, 1281 bp, Bacillus subterraneus
atgaatagcagatttcgcgtttttaaggaagaaccgggatttatgaagctgttcagcttgtttcgtgacaaataccgatcattaggccgaagtggtggattcgttagcttgaaaggatttgaggaaccggagatcgaatcgatcgccggtttccttggcctatcagctgccgtccttcatgaaaaaggcaggattggtcttgcccaatttgaaaatgaattagcgaacaccgggtattctgatgttaagctcattgatctgctagaagcaatatttgaagagccactgttgtctaaaaaagaagcagctgaaaaaatccgggggcgggagaatgattttttggattctttaaaagaggttatgcctaatgcagattggtggatttcatggctcggatcaagaagttccgattcaagatggatttggtctctttttcatcaaaatgaacagcagcttgctgaaacaatgaaaaaagtattctttgcgtttcagtcattgcctggtgagggaaaattcgaaaggctgccgttcttttcacagaggtcaacaggcaatcctcattattttgatatcgctaatattggcggcagattactgattcatacactttcggtctataagaaaatagccgatccggaatttccctttccaaaaagcacggaagaaatcaatgatttgcttgcagactttggcttactaagggatgatctttggaattttgtaacggtaaacggattcgtggcatggacacagaagggggttcatcctgtctgggaggcagctgtccaaacagaaacagtgttaaatgtcccaatgaaagaactcggaaagctggaaaaaatccaacctgcttccggcagcgccgtttggattgtcgaaaattccagtgttgcctcgacgataatggatgcagtaccctacgctcccgtagtatgcacacatggacagctgcgtgcagcaggctggaggcttctcgataaattgaccgcggtcaattgtacgttgttttattccggtgaccttgatcctgaaggtatactgattgccgaccgtttaaaaaaaagataccaaaaccagcttgtattgtggagaatggacgctacggattatgaaaaaagtatttcagaagaggatgttaccgaacgtatttcaaaactagcaagtgttgatccgcaaatttggaaggaaatgattcctctattaacggaaaagaaaaaagcgggctatcaggaagcgttggtggatttgctgatcggtgatataaagaaatacagggaataa

SEQ ID NO: 51029 - DNA, 1536 bp, Paenibacillus terrae
gtggacaaaatccctaatttgcaatcgttacgcggaattacggaattaaaatacgttaatgcggaaaacgttacccgttatcgtgctataatgcattatgtctaccaacaatatcaaaaattaaactattggcttaaaccagaacaaatctatgagggtttgttagagtgggacttacataaaaattacacattagaacaatgccaaatagatcttactcaattagcggaatggggtaatttgacagcacagcatgatggagaacgcgcagttaccgttgaagaatatcttcgtaaaaagtttcgctatctactaactccctattccattgagattgaaagaatgcttgagagcttggaatccattcgaggttatggaggctcattggaaccgactctatttgacacaatttcagatacattatttaaaatcagggagaatgcaggtgaatatgaaccggctaaagccttggaatattggagggtgttatttagttcatttcaaactttacatgaggcatctgtggattatatcgcaagtcttcaaacaggaatggctgaagacttgatggccacggatagtttcttattatataaagattcgatcactcattacttacaggattttatacaggcactacagagacgttcatataaaattgaaggaaacctacatcagataacatctggagttcgagatctatttttgggtgcagtagtggatgatgaatggcgcatacctaaattggaacaactagtaaccaaggaacaatacttgaatgaacttctagataaatggaacagtctcagcagatggtttctgggtgatcacgattcaattagtgattctgttttattggagcgtgctacaaaggaagctattgtaaaggtagtacggagtgccgttcgtatccaggaaagaaaacgttctaatattagcaggaagcaagacttggattacttaggtaaatggttttatggaattcaggaccttgatactgcacacaaattatcggcatatgtgtttggtctattttctgctcgtcatctacaaggtgaagattcacgtgagtctgacagtaaagaaatgtcaatgtggaaagagagagcaattccacgaacgatccgtccacgaaatagaaaaagaagtgaacgacatgacataaaggcagttattgataacagtacattaaaagaacaattcagagatgcatttttgattaagcaaaagcaagagttagaatttttaattcgtatggttgatactgggagtatttctatttctgaatttgaaaccataagggaattgactaggctacaattgttagcatggattagtcgctgtaatgcttcctccaccaattcgtttcagacttcagaaggagtaaaaatagagttgagtcatcctcctgataaagaacgtgctctacttcattgcgaagatggcacgcttgagcttataaattaccgtttcagattcgtggttattaatcgtaaagcttggactgaccaggtagcttggtttaatgaattgtaa

SEQ ID NO: 51030 - DNA, 1182 bp, Paenibacillus terrae
atgaaccgtccagatcgtaacgagattgaggaaagaaaacaaatttgtatgaatgctttattgaatcgtccgtggattgataaggaaaagaatgccgaaatttattattggattaaagatcaatattttgaaataaaagaatggttcatgaattatacgggctattccgttataatgaacagaaacttcattaaactggaaaaagttccagcagaggtcttcccgtggatggggtttcaagagtttcgtgaaccaatggattatgccttatttacatatagtctgtggtatttagagaataaaacagagggcgaccagtttttgctaacccaactggtaattgagattcgacagtacatggtggagcaagggttggatgtggattggaagaattactaccatcgtttatccatggcgagagcgttaaaaaaattaaaaaatttgaatgttgttcgttccgtagatggtgaggaggcgaattgggcgtcaaatcatgaacatcatgatgtgttgtatgaatgtactctttattcgcgttatatgttaagaagtttcccagcggagttatccagctataccaatatggctgagttaaaggaaacaatgacttatgggtgggaagctgctgagatagatataaaaaagagacatgaattatatcggcgttttctactggaacctatactattagattaccagtggcatggtgatccgtcatatctgcatcgagaagcaaattttttaatgaaaaatatgaagacgatgtttggttgggaaggtagtcgttacagagaaggaattcttttgttcgaaaccaatacgatgtctgaatcagaggtgtttccaacacaacttgctttgtctgatttggcaatgcttttgtgtggagaagtgcgaaagatggctgtaaacgcagaattggatctaaaggttgatttgagtggttttgtgcgtttaacaaaaaatgaaattgaacgtatacttattcatttgaaatcatcttttagcgagttttggactaatgaacatacaaaaaagaaatcaactgagttggctgaacaaatatgtgaccatctcgctgaatggggatttggatattgggaagaccacatgttttttgtactgaatggagcagcaggaagatgggaagttaagtatggatcaacagagcaggacgattag

SEQ ID NO: 51031 - DNA, 4095 bp, Paenibacillus terrae
atgaacagggctggaatcctgaatttttggtattacgatgatgaagaatttctatttgaagaaggtagattaattttacgggggaccaatggttctggcaaatcggtcactatgcagagtttgattcctctcgtactcgacggagataagagacccgaacgtctggatccatttgggtcacgcgatagacgtattgaatattatctgttaggtgatgggaatcaagttcacacagacagaacaggttatctttggcttgaattttatcacccaataaaaaatctgtataaaacaatcggtattggcattagggctcgtcgtggtgtaacacagcttggcttttggggatttctaattgaagataatcgaagaattaatgaagatttttatctgtatgatcgaaatttgtggctggaagaggggaataagatacctctcaataagaaagttttagaagaaaaaataggttctggtggacaagttgttcaggaacaaaatgcatatcgagatatggtgaacaaggcgatatttggattcagagaaacggagtcctataaagatctattaaagctattattggaactacggagcccaaagttatccaaagatttaaaaccttcatcaatctatgaaattcttaataaatctttgcctccacttatggaagaagacttaagctcattatcagatgttcttgaggatatggaccaaattactgaccgtttggatgaacttcaattacatgtgcgggaacttactaatcttgagcaaagttatgctcgctacaataaatttttattacaccagacatcaaataatgttgtcaataagtggaaatcttgcaatcaaaatctgagccaattgaaacaagcagaaaagcagatccaattgttagaagagaagaaggataaagttgttcagaacttaaaagattgtaaacaacgtcttggaattgtagaagggtaccttgaagttttaacccaaggagaggctatggggaaacaaaaagaattggaactttatgaagaacaattaaaggaaattcacaagcaaattaatatacttacagagaaaattacttctaataaggctaaaatagttcaactaattggggagatttcaaaattatctgattcattaagccaaaatgaaaaggaacaagaaggagcgattggtgatttggaagacctggcgcgagtgattgaattccatgagcatgacatttatcatggcatttggagccgggggattcctgaagaaaatcaatggcgtagaaattgggaacaagatctgaattctcataagaaacggctgttagctgctcgggaaactgctaggaaagagggggagacatcaagagccgcaaaagaaatggaaatacagcttggagaagttcttcaacagcgccaccaagcggaagaggaacagaatatacaagtgaagaagttcgagacaataaaagaacatatgagagagaatttagtctcctggtatcaggaactaaagtttctgcctgtgcagggggagcaactgagagaaagtctgcgtgctttaactgaactggatgttactgatcgtcagtatgagcctgtaaggcaaccggctctgcaagtttatgagcaacaaaaagagtcgtatatacagcaaagagtgcgcttgaaccaagaagcagtttctattgaaaatgagaaacttaaacttgaacaggaacttaaggaatggaaagttgcaaaggaacctgagcctagaagaacagaaaagagaaagtcagcacgggaaaataggaaaccaggctccggcgcgccattatatgcagtatgtgactttagtgaaactttaacggaaattcaacaggcacaactggaagaaacactagatcaggctggattgctggatgcttggatcttacccggggggcaagtatcaataatcgaacagccaaataatgaagaagtatggattcaaattcaaccttcgagtcagataaatggtaagacactctgttcggttctacatgcgacacctacagaaaaaagtgggttatcagtagaagatattaattatgcactgaattctattaattggaaagatcagagtactctattggataactgccgtgaacagcatggagcgttaattacagaaacagggcgttttagcttaggacctctttccggaagtaataattcaaagtcacgctctgaatttattggagaggccaatcgtttacggacaaaacaattggaaatggccaagctggaagtagaaatacagcatctacaaaaacaattgaataacattgatcagcagttgcatgagttaactatgaagcagcaaaatatggaccttgaaattaaatctttccctcaagatgccgaactgcaaaaccaactggaaatggtactaaaagcaacaattcgattggaacattcaatggaacaagaacaaaaagtagaggaacgatacaagttaaaaatatcagaatggagagccatacaggtagaattgatggaacaaacagcagattggtctctacttaaaaatgaatcacagatcaacgaggcaatagatcgttgctctgtgtattacggttatatctccgagttgcattcacaatggcttcaataccgaaacacctcagaaattaaggctaatcgagaagaacaatactcaactttacttatgttagtagaagatgatcaaatagaattagaggataagctaagtcgtaaagtgaaacggacagagcaagttaagctacttcgtgaaatcgttaaaaagttaggaattgaagatattcatagacggatttcggattttaaagaggaaaaagagttgttaggaaaagagctatctcatttgcatgagattcgagaagagcagagcactcaattaggtaaagctgaagggcatcttgaaaactgttatgtaaagctaagtgaaagccaagaactgctcaacgatggaattgaaaaatggaaaaaggagatacatttaggtctactacccttatcaaaagaaatcaatgagtcaattacaaaggaaatgcttatagaggacatcgttaactattgtaagcagattgtaagagagtatggagaaatgttctttaatgtgactcaagagcgaatcgttaatgatctaactaaagaatttcataaatctaaagccaatttgcaggagtatgccattgatatggaatatggagctactgactccagcagaattactattctctctaaaagagatcgcgtacatccccttaccccaaacattttattaaatgagttaaatcaactgatgggagaacaagaaattctattaactgctaaagacagagaactctatgaagaaattattattggaagtgtaggcaaaacaattcgtaaacgaattcaccgtgccaaagcttgggttgttcagatggatgatttaatgaagcagagagatacttcaagtggtctaaagctttcattaaaatggcttccgttacaacgtaaaaatgaagatgaactagacacggaaaaactggtcagtctattaatgttagaacaacatcggatggatgacgaacaagttgagcaagtcataactcattttcggacgagaattctacaagcaaaacaggaggcctatagagaggatggagttttgcgcaattatatctactcacaattggattatcgtatgtggtttgagtttaaattggaacacataaaaggagatagaacaaattatacagaactgactgactcgaagtttaatgttctaagcggtggtgagaaggctatggcgatgtatattcctttattcgcagctacgtattcaagatacagtgaggcaaaccaggatgcaccaaaaataatctcattagatgaagcgtttgcgggtgtagatgatgctaacatgcgagacatgtttcatttgctcactgatatgggctttgattatatcatgacatcccaagtgctatggggctgttacgatactgtgccgagtctgtccatctatgaaatctatagaccaaaagatacagagtttgttagcttgttccactatcgttggaatggagaaagtaaagtcttagttaattag

SEQ ID NO: 51032 - DNA, 1410 bp, Paenibacillus terrae
atggaactgttaaatcgtaaaacggcgaagcaatactattcagacccttcacttgaaaatctgttgaaagcagtgtttaccaaatacaaagggcagaatggtgtaaaaggcaatgctcgtattattgtgagatcaaagactgaagctgaaaagttgcaaaattactttggtagccgagtaactcagttgatatttcctggttctgaagtagaagttcatttagctattttttctgaagaattagaacgggggtatgaattaaccatacctgaactttacgaagtgttgtataacagtcagttactcacaaatcgggaacaaaaagagttgaaattatcagcgtggattcagctttttgagaaagtcgaacacgattttataaatgaatttaacattactacagtagaacttgaacagttttctcaaaagacgtttaactggtttggtaggttgaagaacggagagggcgaaggttatagagttttaaaaaatatttctaataaaggggaggacgcatatttggatttatttgtctgtgtgagtgcattatggtaccttcttatgagaaagaaagaaatgcttgtgaaacaaggcatctctactggaaagatcagattacctacttttgcagctcatgtcacagaagatcctcatgcatttgataaaaaaagggcgggaggaaggctattatggcatgctcttcatgacatagataaccataaatcagtatttgataagattcaaaaaaatgagaaaacagttgttcctgaatatctatttgaacgacagatttataggaatttcgatgtattggatgatgatcttagttctatttcgcatattttcgtacccaaccttgttagagggacttctcctcgcacaatcaacttgagagaggttgaggaaattcagcagcttcctaagtattcagcattatatattattgagaatccgtctattatctcttatctcgcggatgaaaccattcactttctaaataaaaatgacctttcgctagaacaacttccaataaacttcccagttcttctctgtactattggacaagctagaactgcttctaaattattcatagaaaaatgtcttgcctcaaatccaaattgtgctatctattattctggtgatattgatgtacctggtattcaaatgttatacggaatgaaagagcaattcacagcacaatttaatgcctggcgcatggattcttttatataccgtaagtatgttgctcccaagagtaaaactttatctgaagaggacttgagactgcttagaagtgatgaaggtttgttggaaagagagatggtacagattggagccaaagtttatcaggaatcgtttggtaaagagttgggtaaagattggattgaagttatatgtggggctatataa

SEQ ID NO: 51033 - DNA, 1542 bp, Frankia sp. CpI1-S
atgagcgacgccgggaccgccgggtcgagcagtaccacgggcgcgagccgaggcgaggtgcacgcctcggtgttcgcctacgtgaccgagagcccggactaccgggtgatcctcggaatcttcgcgggaaccttcttcgccgagctcaccccggacgacatcaccgcccggctcgccgaggcgggcgtgatcctcccgatcgagacggtcaccggtcggctggagaagctgcgcgagtggggcaacctcgacgtgtcggcgtcggtcggcacggtcggcaccgtcgccgactactaccggcgccgcaaccggtatctcatcacccggatcgggcaggaggtgcacgaactcgtcgagggcgtactcgcccaggtcgacgacgtccgcgacgtctccctcggccggctcgacgcgctcgccgccgcgctggacgcgttgctgcggcttgacctcgaacgtgccgacccggcggtgctcgccgaccacgtgcgggccgtcttcgacccgcaccgcgccttctccgccgagatcacccagttcttcgccgcgatcaaccagtggcagtcgcggttcgacctcgacgagaccgagttcgcgttcttctccgaggtgctcgtcggctatgtcggcgagcggctggaggcgctggaacgccgggcccggccaatcgccgcgctgctcgcggtgctggccccggacgtgggtgtgctggtggcccgggcccgggacggcctggccgcgcgggtcgccgaggcggggctgaccggggtgcgggttcgcgccgagcatggcagcagcgcggcggactgggagaacctcaccgcctggttcctcggacggccgggcactccgagccgggtcgcgaccctcggccacgatgcggtgaacgcggtgcgcaccctgacccagaatctcacccggctgtcccgctccggcgtcggcggcacctcccggcgggccgactacctgcgcctcgccgcctggttcgagcaggccggccgcgacagcccgcaggagtcgcaccggctcgcggcggccgccttcggcctgttcggcgcccggcacctcgccgcggcggccggcgacgagaccgatcccgtcccgtccgccacgtcgtggtggaacgcaccggtggcgcgggtgccggtcagcctgcgccagcgcggcgacaccaccaaccggggccgctccgggcagatcctcgaccgttcgcgggaacgggcgcacctgctggcccgacgccgggcggcgcaggagcgggaggccgcggcgcgccaggagctgctggccgccgccggccccgacggcgccctcggcgacggcaccccgctgtccgaggcggcgctggcccgcctgcaacgcctgctgggaccggccgtcgcggcgatggggccgagccggtcgaagggcgagtccgaggccgacgggttgcgctgcgtcgtcgaacgtcgaccggggcagccgaccacgctacgcaccccggtgggcaccctgacggtgcacgacctggccctgaccctgctcccgctgcgggaggcgtga

SEQ ID NO: 51034 - DNA, 1149 bp, Frankia sp. CpI1-S
atgacgcgcgacgatccgcagcggcccggcgagctgacggccgccgcacgggcgctgctcgcccggccctggcgcccggccgaggccgaccggtcgctgttcgtcctgatccgccggcatgccgacgtgctcgaccgctggttcacccagcggctgggctaccggctcgtcgtcggcgccgacacggcgcggctggtcaagtccggctacgttccgcccgaccggccgctgcgcacccacaccgaccatccgttcaccacccgccagtacgtcgtgctcgccctggtcctggccgcgacggcggcgggccccgaccggatcagcctgcgcgacctcgtgctgcaggtgcgatccgcggcggccgacgcggagatcaccctggacggtgccgcgggggaacggcgggccctcgtcaccgcgttgcggttcctcatcgagcacggcgtggtgcgtgagctggaccggtcggtcagcggctacgagacggacgagggtgcggacgccctgctggagatccgcaacgaccggttggcgatgctgcccgcgccggcgctggtgggggcacgatcggccgccgacctgctggaacgggccgggggcgaggggcgcggtcgggcggcgctgcgccggcggctggtggaggacccggtgttgtacgccgacgacgtggcgcccgaggactgggcggagctgcgccgccgcttcggcgaggaggcccgctactgcgaggagatgttcggtctgctcgtcgaggcccgggccgaaggggtcgccgccatcgatatcgacgggggatgcagcgacgtggtgttccccgcgggcgggacgacggcgcacgcggcgctgctgctcgtcgaggcgctcgtcgcccgccaccgcggcggcgccaccacggacgacgtcgacgacgagctcgacgatctgctcgaacgttacggccggtactggcgcaaggacgccgtggccgagccggcgcggctgcgcgacgaggccgtggcgctgctcgcctcgatggggctggtccggtgggagcccgacggccggttgtgcccccgtcccgccgccgcgcggttcgccgcgcgcgtcacggtcagcgaacctcgaagcgagccgccggcggacgagcccgagcaggcaatgctgctgtga

SEQ ID NO: 51035 - DNA, 4173 bp, Frankia sp. CpI1-S
ttggccccgggcccgactcaggcaccggtcgccgccgcgcggtggcggccgtcgcgggcgggaatcctcaacgtctaccagtacggcgatgagacgctgcacttcgcgggcgggcgcctgctgctgcggggggtcaacggttccggcaagtcgacagcgatgaacatgttgctgccgttcctgctggaggccgacactcgccggatcgatgctgccggggagcagaccggcgtcctgcgttcgtggatgctcgccgacaccgaggaaacgcagcgcaccggttacctgtggatcgagttcgcccggccggacgacgaggtccccggcggggtgcgctaccactgcttcggctgcggcatccgggcgaaccgcagcaccgaccgggtcacctcctggtggttctccaccccccgacgtgcccggatcgacttctccctcaccgccgaccggacccccctcaccatcgatgcgctgcgcgcggaactcggggcggaggccgtgttcgccagggccgcggactaccaggacgaggtgtcccggcggctgttcggtggcgcgaacccggccggctacctcgcgctgctccaccagatccgcaacccacgggtcggtgaccgcatcgacgccgacctgccgcaacgcctgcgggaggcgctcccgccggtgccccaggacgccatcgccgacgccgcccagccgctggaggacctcgaggaccaccggcgcaacgtcaccgcgctggagcagaccgaccgcgccctgggcagcctgctcgacacctaccggcactacggtcgccgggtgctgctcgccgcggcgacgcaggcggtgaccgtggtcagcgcggcccgctcggcggcccagcagcgggggcggctacgcaccgctgccgagacggcggtcgagaccgagcgccggctcggtgcccaggtcgacgcactggtgaaggagcagtccacgacgcaggcgcgcctgaccgggctgcgcaactccgccgcctaccgcgaccaccaggccctgctcgcccgcgagcagcacgtggcggacctgcgcacgcaggcgacgcggatggcggcgcagcgaacggacgcccagcgtcgcgtcggcgtggccgcgacgacggtgaccgcccggcgggcccgcgtcgatggcgatctggaccggatccgactcgggttggccgaggtcgctcggcgggctctgcccgcggccgtcccgctgcgcctgccggacccaccggtgctgcgggtcgagccccacgccggtggggtggagggaccgcggtcgggcgtcgacccgctggccgaactctccctgcggtccgccgcagacgcgctgcgtcgacgccgccaggacgtgcgcgaggtgagcgacctgctacggggcgcggaaagggccgacagcgcggccgcgacggcgaacggcgtcgccgagacggctggcgtcgacgccgaccgggcgcgcgagcacgcggcgaaggcccgtgacgaggccgcgacggccggagagcgccatcgcgccgccgtgctggactgggccgggcgcttcgccgagctgctgcgggcggtgccgccggccgagccggccggccccgcgggctggctgcccgtgccacccgcgcctgaccccggcggcgacgagctgcgggccgtcgcccgcgcccgcgtcgacgccgcggccgcccttgccgccgatgccacggaggcgctggccgcggccgtggcggcggcgggggtccgcgtcgaggcggccacgttcgaggccactgggctggccgcggagctggccgcggtgcgggccgccgccgagctaccgctgccgcggggtggttggcgcgccgcggaaccggcggacgccgccctgttcgcctcgctcgtcgactttgcccccggtctcgacgacgccgcccgggccggtctggaggcggcgtgcgaggcggtcgggctgctgacggcacgggtgctcgacgacggcagcgtgttggcggcgacgggcgagctgctcgtcgtcccgggacccgcggtggcgccgaacctcgccgccgcgctcgtcccggcgttgccggtcggggcggcggtcggcgcggacgccgtgcgccgcgtcctcgagcatgtcgggctgggcgccgcggccgggaccgcgctgtgggtggacgtcgacggcgccttcgccgcgggaccgctgcgcggccggcacgccaagaccggtgccgagcatgtcggcgcgggcgcgcgggccgcggcccggcagcgccggatcgccgagctcgccgcggcgctggacgtcgccgagcggcgccgcgacgtccagcgggagacgcacggcacgctgcggcggcacgccgaggcgctgcgcacccacgcccgcaccgtgccgtccaccgcgccggtcgacgacgcggcggcggccgccctcggcgccaccggtgacgcccggcgcgccgccggccgggccgccgaggcgcgcgaggctgcggtcagcgccgaacgcgcggccgagcagacctgggcacgggcccagaccggcgcggcggccgcccggctccccctcgacgacgacgcactgaccagcgccgcagccgcggtcaccgacgcccaggcggagctggaccggatgccggggcgagtggaggctgccaggcgttccctcgacgactgggcggcggccgtcgcggcctttgtcgcggagtccgacaccctgaccagggccgccgaggaggccgccgagacggggctggccgccgagacggccaccgaggagctggccgcggcccgcgcggcgctcggtgaggaaccgcgccgggttgccgagcagatcatccagctggaggccaggtgtggccggatcgacggtgagctggctgccgcccgccgcgcccacaccgaggcgttcggcctgtcggtgtcggcgcgggagagggcggacagcgccgcggacgccgcggaccgggccgagcgggcatgccgcgaccagcggacggagctgctcgccgtggccacggtcgacggcctgctcgcggcgtccgcccgggaacgtccgagcggcaccgagaaccacagcgacgccgaggaccacagcggaccggcagaccaggacgaacaggctgcacaggacgggcaggtgcgaccgccgtccacgccggacaccatcgaggggacgtcccggctggtctcctggctgcgcgaacgcgtgccggagccggagcgcgacgtcaacgaggacgcactgcaccgctcgctgcgcgccatccgggacggcctgggcgccggctgggacgccgagtcccgccgcggcgcggacggcgcgccgctggccgtggaggtgtccggcccctacggccgccgcgtgctgcccgacgccaccatccaggtcgcggccgacctgcgccgcgcccgcgggctgctcaccgcccagcaggatcaggcgctgcgcaacctgctgcacggccgggtcgcccaggaggtcgcccgcgcgctgttcgacgcgcgggagctgatcgaccggatgaacgcggtcctcacagcggtgacgaccagccagggcatcggcgtccggctcgactggcgaacccgcggcgatctcgacccggccaccgccaccgcgctgcggctgctggccaaggacccggacgcgcgcaccgccgaggaggacgccgccgtgcgcgccgcggtcgccggcctcgtcgacgaggcccgcgccgagcgtcccgaggcgtcctaccgagacgtcatcggcgtggtgctcgattaccggaactggtacgaactgcggatctacctgtgccggccggggcgcgccgacgagctgctcggccggcggacccggctgtcggagggagagaagaagctcgtcacctacctgccgatggcggcggcggcctccgcgtcggcggccgcccacgatccccacggcgtcggcgcgccgcgactgatcctgctcgacgatgccttcgcgaaggtgtcggaggacaaccacgctcggttgttcggcctgctggtgagcctggatctcgacttcgtcgtgacgagcgagcgattgttcggcacccacgcggacgtacccgaactgtcgatcatcgaggtgctgcgcgacccggacctgcgcacgatcgcgctggtccactaccactgggacggccgggcgcgcaccgagctggcggtcgcgtcccgatga

SEQ ID NO: 51036 - DNA, 1302 bp, Frankia sp. CpI1-S
gtgaggccaccgacggttccgggcaatgccgagaccggcgcccagacctccgacgcgcacccgttcctggccgatccggcgctgcgcccgctgtggcagtccgtcgcggcggcgctggaccgcaacggcctggactggcgcggccggctcgcgctgcccgctctgccggccgagggacgccgccgcctcggggtcatggtggaacggcccgtgcccgcgggacgccgggcgctgccgctcaccgacgtggccgccgcggtcgaacggctgaccgggaccgggctcgtcgaggcgctcaccgcccttggctacgcgccgcgagggcgccacgaggcggcgctggtacggcgcgaggagtcccggcgacgccgggccgccctcgacatggcggtcgagacccatctcgcggccctcccgcggccggaccgggataccggttcggcgaccggctgggcgaccggctggcgggacgcggcctggtccgacgggttgttcgccggccgcgcgccggacgaggtcgcggccctggtccgcacggtggcggcggtgctcgcgcacaccggctcggggctgagccgtggggagatcgccgccagggaatgcggcgacgcccacgcgctggacagctccacccggctgaccgccctggtcactcgggccctggtggcccgggacggcccggcgggcgagcgggccgcctgggagcgcgccggcatcccgctcgacctcgtctccgcgccggtcctgacctgggcactgccgctactcggcgactcggccgcggccttggccgcccgcgcgatgaccgccgccgggctgcctgtgcacctgaccgtgctggcgctgcgcgcggcgccgatcgccgtcgtcgcgggcacgcccgtgctcgtggtcgagaacccacgcctggtcgaggccgcggcccgccgccggctgcccgcggcggtgctgtgcacgggcggcaacccggcgaccgccccgtcggaggcgatcgcgcggctgcgggcgagcggcgcacagctgcgctaccacggcgacttcgacgccgccggcctggcgatgacggcgcgggcccgggcggccggctgcacaccgttccacatgtcggccgccgactacaccgcggccctcgccgcggcccgcgccgaaaacgtcgacctcccccgcgactcggccccggccccacccaccccgtgggatcccgatctcgcgacggcgttcgacgacacccgggcgatcgtgcacgaggagcgggtgatggacgaggtactcaccgcccacggcggcacattcccgcggtga

SEQ ID NO: 51037 - DNA, 1509 bp, Rhodococcus sp. AD45
atggtgaatgaaacgcatatcgcgggcgtagcgacggcgtacgcggatacccatcgactgaaattgttttcgttcacggtcgccgagaagcgcgccgagtacctgtgggtgcttcgcgcattcgaccacgcccgcgccaattacacagtcctgctccatgcggggacggtcgctcagatcctcgagaagatcggtggctcggatcccgccgctcagctgtcgtcgaccgagattgcgcctctgctggaccagttgcacgtgtgggagattctcgaacgcagctacgacggcacacgcgccgcgtcgttggccgagtatcggaaccgccattttgtgtaccagttcggccaggccgggtatcaggtgtaccggtccgtcgaggacgttcttgccgccaggctcgacaattcgtccctctcacgactggcgctggcggaccttctggccgacatgtcggaactggccgaagccaatcgaacggcagacggcgacctcatcttccgcaaactcaaacgcctcgactcgacactgtccgacatggccgatcgtgccgcgcacttctatctcacgctcggcgatctggttcggacgacggaagtgacgccgcaggcattcctgaaccacaaggacgccctgctgacgcacatgcgcgaattcagctccgacctcgcgcggtacgccccgaaactcaaggaagccatcgagcacgtcgaatcgacgggggtcgaccggatgatccggctcgctgccgccagcgacgagcgagtgttcgttccgatcgccgaacgcgaagatgactggatggctcgctggcgcggtttgaccgcgtggttcgtctccgccgagaccggaatcagtgagtccgagcgactgcgcgaaggaacgatgagcgcgattgccgcagtgctcgcgctgttgcgccgcgtcaccgaaacccgacggggcggtgtcagccgcgaaagccagctgcgccatctcgccgggtggtttgccgccacaccgtccgaggacgcggctcatgcactgttccaggccgtgttcgacctcggtcgcccgcgccacctgtcgatggttcacccagacgccgacattatttcccaccaccgatcctggtgggaggcaccgcccgtcgagatcgcccgcaccctggcggaaacagggcgcccaccgtcgcccggcctgcccggcaaggtcgcccgcaacgacggaagtatccgacggctgcgcgaagaacagctcgcggcgcagcgaacccgcagtgccgcagcacaatccctggccaccaacggtgtgtatcaacgtgagctcaacgagcaggagaccgaagttttgctgagtttgctcaatgccgcactcacggcccgcgtgccggtggtcggccgcgtcaagagttccaccggtagcgagaacggggtgaaattgacgctgagcccgtcggacggttccaccaccatcaccaccgcgcgtggccggatgcacctcgacggcatcgaggtcagcgttcgatga

SEQ ID NO: 51038 - DNA, 1431 bp, Rhodococcus sp. AD45
atgagagctcgcgagatcactccccttgcgctcgattcgtatcaacgcgcggcaagggtcatcctgtcgaatcacctggtcaccacgtcgtatccggatcgggcggcgttgccactgctacgccggtgggccaccgaactgcgagatgacctcctcgacctcttcggttaccgcctcgaggtcaccgagacaacggctcggttgttcacggtctccgatcgcctcaacccgtcggcacccgcccagacggcaaccgagcgcacgttcgaccgcacccgctattcgtacctggccctgtgcctcgccgccttgggccgcgccggcaaccagatcacgttgtcggagttggcagatcacgtggccgccgacgccgcacaggtggacggcgtcgaactgtccaccgatcgcggcgccgatcgcgacgcgtttgtcgacgccgtcggctggctcggtgtgcgcggcgccatcgcactcgccgacggtgacgccaacggctgggcatccaatcccgaagcgggagaagcgctctacgacatcgaccgatccgtcgtcgtggcactgttccgcccaccgcgcgcgctgcagcacctgcattccattcgcggactcctcgctgccgaaacatcccaggcggctgaggaagacggggttcccgtggacgccaaggcaatcgggcggcgagtgcgtcgggctctcgtcgaacgcccagtggtgttggccggtgaactcgatcagcatgaactgatcgcgttggcccaacccaagaccgcgtccgacgtcgaaatgttgaccggactggttgccgagcgccgggccgagggaatcgcgatgatcgaccccaccgggcgcctgtctgacgtgcgttttcccagcaccggcacgatcgcccaggtcgcactgctgctggccggcgaaatcgccgaccggatactcgacgtcgacgcgccggaactgccgaaactcccgcttcctcccgagtccgacgaccacctcatcgagcaactcgatgcagcgatccccgaggccggaatcttcgaggatcttgccgacgaggatgccgaaccggtcgaacctgctgcggagcctgccgatcccgaggaaccgccgacatatcccctgatcgacgacacgtggctggctgacaagatcaccgaattggtggatcagttcggccgaacgtttgcggcccagtggcaggcagaccacaacggactgcgtaaacagtcactcggactgctgcagcgactgcgcctgacacacgcggtacccggcggagtgctcgttctgcccgtactcgcgcgctaccgcgacgttgtggtcaatgtccgcgaacgcgatcccctcatcgactttgcggtcgacaactccgcacccgagcccagttccgaattttccggcagcacagaagaaccagaggtagaaaacgcatga

SEQ ID NO: 51039 - DNA, 4176 bp, Rhodococcus sp. AD45
atgaacagcgcccgtttccgacctacccgggccggcatcatcaacctctgggattaccgcgaccaggaattctctttcgccgacggccgcctggtccttcgcggacccaacggatccggcaagaccaaggcactcgaggtgctgttcccgtttgtcttcgacggccgcatcgaaccgcgtcgcctcaatccgtttgccggcgaagaacgcaccatgaagtcgaacctgctctatcgcgggcaggacaccgcacactcctatgtgtggatggagttctgccgcggctcactcgacgaccccgaagccgtcaccgtcggcatcggcatgcgtgcgagccgaaccaacgacaaggtcacacgctggtacttcgtcgccgacggccgagttggtgtcgacttctcgctgatcggcgccgacgatcgcccgctgacaaagaagcagttggccgagcaactgggcagtgacgcgatcacggaccgtcccctcgactaccgcaccgccatcgacgcgcgcatgttcggcctcggcgtgcagcgttacgaccagctgatcaacctgatcctgacgctgcgccgtccgcagctagcgaagaaccttgacccgaagggtctttcgcaggcgctcaccgacggactgcgccccctcgacgatcaattggtgctcgaagctgcccgctcgttcagcgacatggaagaagtgggccgcgcgctcgaggggctggccgctgccgacggcgcggcccagactttcatcggcgtctacaccaagtatctgcgccagcagtcgcggggcgagatcgaacaggtcggggcccgcctggccgcggtcaccaaaggtgttgccgccatggacgaatcggctgttgcccagctgcggagccgagaagcgcgcacagcagccgaagaacggttcaatgccgccgaacaggcactcgatcacgcccgcgccaatgtcgaagcgctgcaacgctcgagcgcgtacgaaggcaagcagcagctcgacgacctcgcccaggccgtcgcaacgctgaaactgtccaccgagcagcaggccgacaagtcccgcaaggcgcaggcaacattggcgcagcgcggcgacgaagccgaaaaggccaccgcgtcggtacgccgcggtgccgaagcactctcgcgggccgaggacgaactgcgcgtcgccgccgaagacgccggtatcgtctggacaccgctgccggacggttcccgcagcgatcagatcaccgctgccgtgcgtggccacgccgaagagcgcgacggagacgttcgtgttgtgcgcgccgccctcgccaccgtggagaaagccaccaccgagcggacccgcgccgagaattcgtcgcgtcgtggccaagaactgctggaatcagccaaagctgcggtcctcgagggcgaagccgccgtcgaattggctcgcagtgaatgtgcgaccggccttcgctcgtggtggaccgggcattcggagcgctacgccgctgccggcgccgatacctcactgttcgaggcactggacagtgcactgtcggcagtcggtgacgaagacgctccgacgctggctgccgtactcgccgaacacaccgaggccggaatcgaagccttgcgggagcggcgacgcagtgcggaagcggaaatctcagccgcccgcgcctcagtcaccgcactgaaagccgaacgcaaggccgtctcggccgagcacgacgatgctccgcccgcattccacgcccgcaccgacagccgcaaggacctaccaggtgcgcccttctggagccttgttcggttcgccgagtctgtcgaacccgacgtggccacgggaatcgaatccgcactacaagcggcaaacatgttggacggctgggtagtgcccggcgagcaactgcccgaattcgtcagcgagcaattcctcacagcactcccgacaaagcagcggcccaagggacgcaccctcgccgatgttctcgaggtcgagggcaactccgacgtccccgacgcacaggtcaggggaattctcgcctcgatcagcctggtcgagaacgcggacaccaccaccgccgcagttgctatcggcgtcgacggccgattctggcagggtgttgtccacggacggcacgtcaagaccgatgccgagtacatcggtacaacggcccgcgcgcgtcgtcgcgctgcccggatcgccgaaatcgacgttgccctcgacgaacttgccacggcaatcgacaccggcacagcactcgtggcgcacacaaacgagcagttggctcaacttgccgcggccgcaaaggaactccccaagaccggctcgattctgcgcgcgctcaaagccgtcgccgaatcggcgggcgctctgcgcacacggtccgaagcaacagacagcgcgcagcgtgaactcgacgcggcgatagcggatctcgcggccaaggaaaagcagttgcgctcgacggcgtcgacgcatcgcaccccgcacgccggccgggaactcgactcgttggcggcggcgatccgtcacttcgagaagcaaggcgacgtcgccctgcgatgccgacgcgagtacgccaaagaagtggaactcgaacgcgaatcgatcgaccgcctcgacgagtcacgcaccaatgccgaggaatttgccgaagaagcggccatcgcggaggagagtctgctccagcaggtccaacgcctggaaaccctgcgcgacaccctcggcgcgagtgccgagcaaatcgatctcgacctcgccaaggcgcgcgcaaagatcgaggaatgcaaagtcgaccaacgcgccgcccgtaaggcctacgacgcggccgtgcttcacatcggcaccgcggagggcgcttacaacactgccgtcgagaccttgcggcacactctcaccgaaacgcgtagcgacgcagagcaactcgcgccgtacgcgcgacccgatctgctcgagctgctcggcatcaccgaaccgctgagttggcctgccagttccgcggcgtggatgagccccgatcaactcgtctaccggatccagaacgaggaccgcaccgacgacgccccgcacccgccggtactgcccgaagacgtggacaagctgtaccgggcactcgacgcggcaacctcgacggttcgcgtcaccgacggtgcgcgcaaggcaacccgcacggccctgacgtccgcgctgcaggaattcgacgcccaactcgctgccgccggccaggattaccgcctgcagtgggacgcaccggacgggctcaccgtcgtccgcgtgcaggacgaacagggacactcctcgatcggcgagttcgcaacccggatccacgaagctcgcggagatcaggagcagctgctcaccgaatccgagcgtcgcattctcgaagacgcactgctcaccggactggcccaacagatccacgagcgtaccgtcgacgcccgcgaactcatcgcgcagatgggcaccgagatgcgcgagcggcacatgtcgtccggcaacaccatcggcgtccactgggttctggccgacaacctcgacgacagctcccgcgccatctccaaactgctcgatcgagacgcgtcggcgctgggcgtggacgagttggcgacactgcgcgcacattttgcgacgcagattcgcactgcccgggcggcgcatcccgagcggtcgtacccggagatcctgtcgtcggcactcgactaccggcagtggcggttcttctccttcaccctcatcagcggcgaaggcaaggaagatcgactcaccgtcgcccggcacagcgcgctgtccggcggcgagcagtcggtgtcgctgcatctgccactcttcgcggcagcgcacgtcatgctcgattcagccgatccgcatgcgccgcggctacttgcactcgacgaggcatttgccggcgtcgacgacaacggtcgaagcgagttgttgggattgagcgtccagttcgacctcgacctcttcatgacgggatacgacctctggatcacgtacgccgacgtccccgggtgcgcgcactacgacctggctcactcgacggccgagcaagccgtcagcgccgcgctgctggtgtggtcgaacggtgaactgctcgccgaacacgacggaacggacttggccagagcgcttggatctccgctgcgccgtagggtgcccaccccggccgaaggtgcgctcgactacgcctaa

SEQ ID NO: 51040 - DNA, 1560 bp, Streptomyces lydicus A02
gtgcactcaggcacggccgagtcgttcgaccttgatgcgtggacggtgggagaccggctgaggctgttcaacttcactcagcgcgacaaccacgtggcgtacttatggcttctccgggcgatgaacgtgctgcgggctggtcatcaggtccaggtgcacacggatgatgtggcgaaggccttgagcgaactcgcggcggcacacgacgacgtaccgaacgccgctgaattgaacctgcgggccatgctcgacaaccttgcggctgatgacgagcaggtcctgtacaaggtggaggacgcgacgcggtgcggcagcctggccgcctaccggaaccggcagtcggtgtatcagttcacggagatcggctaccgcgtgtactccgcggtagaagaggtcatcggctcgcgggtgcaagacgcgaacctgtcgcggctggtcttcgccgacatccttgccgacttcaaggcgctggccgccgcgaaccggcagggcgatcaggaggaggtgcaccgcaagctcgcccggctggacagcgtgctggaggacatgactcagcgagcggcgcgcttctatctgacgctcaacgacgtggtgcgtacgacggacatctctcccgagacgttcctgcgctacaagcatgccttgctcgcgcacatgagcgagttcacggctgagttggagcgttatgcgccccggctggccgaggccgtgctcgacgtggaggacacgggggtggcgacactgctggagagagcggctgcggcggacgaacggccgatgatgcggccgaccgtgcggctggaggactggcggcggcgctggaccgggctgcggcagtggttcttggccgatgcggcaggcgggtccagggcagatcaattgcagggggccacgcggaccgcgatctcgggggtcatcgcgctgctgcgtcaggtcacggagtcgcggagagggggcgtgagccgtacgactcagctccggcatctcgcggcgtgggttgctgcggcacctgacgaacaggcggcgaacgctttggcggcggctgccttcgaccttcgttctgtccggcacctgtcgggcgcccacgacgacagtgacgagatctcacctcgttcgacttggtgggatgcgccgggtgtggaggtcagcgtcagcctgttcaagcacggcaagagacccgcacaaggcggtccacagccggtacgcaggtcccggggcgcgcacgcccgcttgcgggaggcccagttggcagaacgagcgggcgaacggagtgcggcagagagcctgttggagcacggacctcatgaccgggtgctgagccacgcggaagctcgcgccgtactcaaactgctgacccgtgccctggaagcaaggacgatggtcgccggacgagtgcggtcgggtaccggtagcagcgatgtgatgacgctgcgcctcgtccctgatggccgcggcagccggttgcgcaccgaagccggaacgctgcacctgccggggttcgcgctggagatcgcacctcacggtgtgatgcgccgccgtcgtggatcggagaatccctga

SEQ ID NO: 51041 - DNA, 1419 bp, Streptomyces lydicus A02
atggccgtgcatcgtgtggccgcggccgtggagccggcggacctcagctcttaccagcaggcggcgcggctcatgctcctgcacagtgtggtcaccgagacgcatccgcacccgaaggcccttgccttggtcctgcagtgggccgacgaactgaccaatgacttccggtacctcttcggatacaccctgtctacgacggcccgtcatgcgcgcctcctgcggcggctggacgccttcgacgggactcaggcgtttctcacagtaaagagcaagaagccgttcgaccgacgacggctggcttacctgtgcctgattttggcaagcctgaaccgatcaaggatcgagatcaccctcgccgatcttgtcaagctgctcgccccatccgccaactccatcgagcacctgggcttcgacgcgacggccccgggacacaaggacgcggtggtcgacgtgatggactggctcgtcgaccgaggggcactgcggatctcggatggctccaccgaggactgggctcgtgaccacaatcgtggggacgcgctgttcgacatcgaccacgacacctgcgcggctctcttccgccccaacaagcctttgcagcacctcacgagtgctgcgggtctccaggacactccgactgcgggcgtcggccgggatccccgtcggcgtctggccgcccagcgggctcggcggatgctcatcgagcagccggtggtctacttcgccgacaccgatgcggaaaccgccatagcgctgcgtcagcccaccctggccgaagacatcacgcggctgaccggtctgccagtcgaacgccgagccgaaggaatcatgctcgttgacaccacggggcggttcacggacaagcagttccccggacgaggcggtgcggtcaatcggaccgctgggctcatgctcgcgaagatcgctgacctgcgggaagactcggagcgagccagcagccttcagtacctcttcccgcccgatccaggggaggagcaagccgacctgctgaaccgcatcgacatgggcttgccccatgcgggcatgcttgacgctctcgctgaagaccttccggtcggcgacggccgaaggacgtacggggagggcacgaagtccgacgaagttgaggcgcgcgcgtgcctgcctttcgtggcgcaaggcgtactggaacagctgatcaacgagttgttcgaggagttcggcccgtcatcgttcaccaacaagtggcagggcgattccagaggtctcctggccgaggcgctcatcctgctggccgacttgcgcctggtccatctcgcccccggcggaatcctggtgcggccagccgcggcccgctaccgcaacatcaccgccgtactgccgcgacctgcgcaggacgggcagttcgccttcgatttccctgttgaggaccctcactga

SEQ ID NO: 51042 - DNA, 4269 bp, Streptomyces lydicus A02
gtgattggcctctgggactacgttgacgaggagttcgtcttcgccgacggccgtctggtgctgcgcgggcacaacgggtctggcaagaccaaggctcttgaagtgctgttcccgctcgtactggacggtgtcctcgacgcgcggcggctcgatccgttcagcggtgaagaacgcaccatgaagtcgaacctgctctataagaagcaggagtccgcctacggttacgtgtggatggagttcgcccgcaccgcacccgacggtgacatcatcgaagccgccaccgtcggcatcggaatgcggatcacgaaggcgatgcccgcgccggcccgtttctacttcgtcactgacggacgtgtgggccgcgacttcggcctcttggacagctcctcacggccgttgcgggagagcgccctgaagaaactcctgggcgacgacgccacccacgagacggccgaggcataccgcgacgccgtcgatgcgcgcctgttcggcctgggtcgcgaacgctacagccaattagtcaatctgttgctccagttgcgacgccctctgctggccaaggaccttgaccccgtcaaagtctccgcgaccctcaccgctgggcttcggcccgtcgacgacgacctgatcaaacaggccgcccgggacttcgagaaccttgccgagatccaggcgctcctcaatgccctcgtcggggccgactcagcagtgcagaacttcttgcgcgaatacaccagttacctgcaggtgcacgcccgcaaccgggtggaccagatcaaggagcgcatcggggccacggctgaagagtgcaacaagatcatccaggcggccattgaccagcgaaccgctgaggacctgctcgctgaggcccggcaacgccgggagacggccgaccgcgagcgcaaggagaccagcacccgcatcgccacctacaggaatcacgaagcagtcacacagcagaaggaccttcaggacctgagcgaccgtgtccgcgacgagggcaagaccatccgcaaaagcgacgacctcctcaacagttcttggggccacctggccaggctcaagggcgaggccaagaaggtcggcgagaagtgcagggaactgaacgcggcggcatcacgccacacccagaacctcctggatgcggcaaggcgctccggcatcgtcctcgacgacgacgccttgaacccggactccgagcccatggtgcacatcaagagctgtatggccgtccgtgaggccgaactcgacgacgtgcgcagtcatctcgcggcattcgaacgggcggccgacgaccaggtccgtgagcagaagcgcgtggacgcagcggccgacgagctcaaggaaacggaggagaagtcagccgcagcggccgaccaactcagccaggctcgcgcagtggccagccgggatcttgacgaggtcatcagacgttggactagcgagggggaaactgcagtcttccaaccggccgaccgggcacccctgacggccgcactcgccgctgcgggggagcccgcagccgccccattggcggaggtcttccgctccctcaccgacgagcgccgaaccgcagccctgacccgtgtcgaagcgctcaagagacagtgcggcgacatcgcgaaagccttgcacaaggtccaaggcgaacgggaccgagtcgcggctgagcaagacgaagcaccgcccttgagcgatctgcgccccgccgagagggagggacggccgggggctccgctctggcagctcgtacgtttcgccgatcacgtctccgacgaccaggccgctgctgtagagggtgcactgtacgcggccggcctgctcacggcctggctgcatcccgatcccaaggccacggaccaggcgctgcgcgaccaggttgctgacgcctacctgctcccgctgcccagtgcacagcgacccgccggtcggacgttggccgacctcttggtcgtcgaagaccaggagcacgtggacgccggcgtggtgtgcgccgtccttgaatccatcagcgtcatcgacggtcctccagcagcagatcttgggagcggcggggagacagccccgtacatcaccactgcctctcagttctcccttggcgtgcagatcggcgcccaccccaaggggcagccggagtacatcggagccacggcgcgaactgcgcgtcgacaggagcgtctgcggcacctcggggattccatcgccgcctttgaaacccagctcgccgaagccgacgagcagcgtgaacacgccgaggacgtgttcgtcgacttcgatcgtgcacgttccgaacttcccagcactcatgcgatcgacaaggctgccagggacgtcgctgtgatcgccggtgatctcgctggagcgcgacgtcgtctcaaggaggcacgcggggagctcgacggggcagtcgcccgggcacacgagaagaagaggctcctcaggcatgccgccacagctgtacggcttcccaccacccgtgagcagttggacgacgtcgcccaggcggtcacggacttcggtgccgcgggcaaggagctcgcctcgtgccagaagcagatcaaggagaaagagcaagatctcgccggccgcgaagagagcatcgaaggtctcatgacgtcccttatggagcaagccgaggaactgcaggagcgcaaggacgctctcacggctctggaagaagagctgcgtacccggcaagagacgcttgaagcaccgctgcaggcgatcctccagaagatcaagaatgcagagacgcagctcgacgcagcggaaacggcatacagggccgccgacaaggacgccgaacagcagcgtgagcgcctcatgaaggccaagcacaccttggagttcgtcggcggggccctcgtgaccgctgttcgcgagcagatgcgtactgctggcgctctcgagccgtacgctcgaccggatctgctggggctcctcaatgcccctgtggacgccatctgggtgccgcatgaagtatggccaaccgccgaagaaaccgcgcggacactcatggacacgctgacagtgcgcgacatctcgaatatccccctcgaggcagcgcgcagcgcgatccccgcagccgtcgtcaccctcgtcgacgccctggacgaggccacccaaggccgccgcatcaccgagagcttgctgaaggccacgacgaccaagatcaccacggccatcaccgcgttggaagcagccttgctggatgcggatcagggctatctcttcgcatgggagccggcaggcgatctcatcttggccaaagtcaccgacagcgaaggtcccgcgccagttgcggacttcgggcgccgattggcagagcaactcgcggaccagcaggtgctgctggaagacaaggagcgcacagtcctggaagacgggctgctgaccgggctcgcccaacagatccacagccgcaccatcgcggcccgcgatctggtcaggagcatggatgctgacacccgggcccggccgatgtcctccggcacgaccgtcggcatccactgggtggcatccgacgatctgtccgattctcagaaggctgtcagcaagctgctggagaaggatgcctctgggctcgaccctgtgagcctggcagagctccgctcccacctgcgcggccagatccgtgccaaggctgcagccgacaagaagcagagctaccagcaggtgatcaccgaggtcctggactaccgctcctggcacaagttcgaactacgactgttccgcccgggcatgggcgaagaggagcggaagaagggagaactcctcaccaaggccaagcacagcgtgatgtccggaggggagaagtccgcttcgattcacctgccgctcttcgccgccgctcacgcacagtacggctccgcctaccccacctgtccccgcctgatcgcactcgacgaggcgtttgcgggcatcgatgagaagtaccgtcccgacctgctcgccctcaccgccaagttcgacctcgacctcttcatgaccggttatgacctgtggatcacgtatcccgacgtgccacagatctcgcactacgacatgaagcacgacgaggcctcgcacaccgtctccgcgatgctgctggtctgggacggcgagcagatcctcgacgacgtcgggtaccccggatccgaggacctggctgccgaactcctcggcttccggccgaaccgtcacgttccgtctcatgcggggctgctacccgacctgcccgacgtggtgccagcggatcccgaggtcgaggaagacgaggaggcgcagtga

SEQ ID NO: 51043 - DNA, 1176 bp, Streptomyces lydicus A02
atggagcgcaatggaggtcagatcaccggatccatcggggtgacaaaaccgaccgcggaggagcgcaaggcgatcatcggtatcactggcacgtatcgctcggccgatgtcggccgcctctcacttccgctcgcggcactggaccagagcgtccgcaacgtaaccggatcctctcttcgtgacctcctggaacacattggtcctccactgcgcttccgagctgacgaaaagaccgccctcgtacaggctcggcaggtgctgatagccgaaggggaagccagtccgctccatgacgaccatccctggtacaaggaatggctgcggggcctcgcatcagacgggtcactcaccgggctgatcaacaagcagagcacgcgtctactaagtcaggccattcgcgtactggaatacctcgacacccgtccaggcggctcgcctccagtcatgctcccggccctcgctgatgccaccacgggagacaccaaagccctcaactcgggccagagcacgttgccgaccctcgtcctgcgcgccctggcgaccgcacgcggcatcccgctcccggccgacgccgaggcccgacgcgaactgtgggacgccttcgacgtcattgttgatgaccttgccagccgcgtcctcgtgctcaatctgcccgcgacaggtcgaggactgggggagtggctcactgacgccgctctctatggcacccctttccacgtcacgctccaccagctcgtgaccttgccgatcacggtggatctgccgctggtgtatgtctgcgagaacccggcagtgctccgtcgtgccgcgggagaactcggcacgagcagcccgccgctgatctgcgccgaaggccgcccttccacggctttccaccggctggcccgcctggtcgtcaacggcggtggccgccttctttatcacggggatttcgactggccgggaatcgacatgacgaatcagctcatcggccgctacggcgccgaaccctggaggatgagcgctgaagactacctggaggcgctaagagctgaagacgatcatgtggccctgagcggcaaggcgcgcagcaccccatgggacccgggcctgagcagtgcgatgcgtaagtatcaaagtgctgtctatgaagaaggcgttgctgacatcctcttggcggagtggagcgccttatag

SEQ ID NO: 51044 - DNA, 1476 bp, Rhodococcus sp. B7740
gtggaggaagatcgtctcggtctgttctccttcgccgttgccgagaagcgatccgagtacctggccgttcttcgggcattcgacaccgcacgagccaactacgtcgtcctgctgcactcaggagacgtggccgacctcatcgcacgcagcccgggtcggcacgacgcactgaccaccctcgacatcgcacccctgctcgatcagctccacgcctggggtctgctcgaacgcagctacgacggcacccgcgccgcgacactcgccgagtaccgcaaccgtcacttcgtctaccagttcggtcaagccggctacaaggcctaccgcgcggtcgaggacgtgctcggagcccgcctggacgacgccgcgttgtcgcggctggtgctgcccgagctgctggccgacatgcacgagctggccgaggcgaaccgtcaggccgacggcgatcgcatctaccgcaagctcagccgactcgattcgacgctgtcggagatggcgacccgcgctgcccacttctatctcgtcctcggtgacctcgtgcgcaccaccgagatcacgccggagtcgtttctggtccacaaggacgccctgctgacgcacatgcgtgagttcagctccgatctgacccgctacgcaccgaagctcgccgaggcgatcgcactcgtcgagagcaccgggatcgaggaactggtcgagcgagccgcgatcagcgacgaacgagtcttcctcaccgtcgccgaacgccgcgccgactggaccgatcgctgggcgggcctgtcgcactggttcgtctcggccgagtccgaactcagcgagtccgagcgactccgcgagggcacgatgagcgctattgccgccgtgctgtcgctgctgcgccgcgtcaccgaaacccgcaggggtggcgtgagcagggaaagccaactgcggcatctggccggctggttcgctgccacgcctaccgaggacagcgcgcacgccctgttccatgccgtgttcggtctcggcaggcccagacacctgtcgatggtgcatcccgacgccgacatcatctccacgtcccgatcgtggtgggaggcaccgccggtcgagatttcgcgcaccctggccgagaccggacgcacccccacgcccggtgttccgggtcgggtacagcgcaacgacggcggcatcagacggctcagggaacagcagctcgaatcgcagcgatcacgcagtgccgcagcgcagtcgcttgcgtcgaccggaatccacgaccgaattctgaacgagcaggaaaccgaggtgctcttgagcctgctcaacgctgcgttgaccgcgcgggtgcgcgtgagcggtcgcacctccgactcgtccggatcggacagcggcgtgcgcctgacgctcagcgacagcgaccgttcgacgatcgtgcggaccagcagaggccgattgcatctggaccgcctcgcgctcgaggtcagcgaggtggcacgccgatga

SEQ ID NO: 51045 - DNA, 1452 bp, Rhodococcus sp. B7740
atgagagctcgtgagatctccactctcgcactggattcctaccagcgggccgcccgagtcgcgctgtcgaaccacctggtgaccacgacgtatcccgacaggattgcgctgcctctgctgcgtcgatgggcgaccgaactgcgcgaggacctgctcgaactgttcggatatcgattcgaggtcaccgagaccacggcacgtctgtacccggtgatcgatcggctcgacgacagccagcccgcgcgaacgtccaccgaccgaatcttcgatcgccgcagatacgcgtatctggcactggcactggcggccctcggccgggcgggcaaccagatcaccctctccgagctggccgatcatgttgcggcagaagcaagtcaagtagacggagtagagctgacgaccgaccgagcaagcgaccgagacgcgttcgtcgacgcgatcgggtggctcgctacacgcggagccatcgcgttggccgacggtgatgcgaccggctgggcgaacaacccgtccgcaggcgaggccctttacgacatcgaccgtcccgtcgtcgtcgccatgttccggccgccgcgcgccgtgcagcacctgcgatcgattcgtggtctactggccggctcggactccccgatcgatcccgaggattcggacccgggacagaccgactccgggcgtgaggcagatccgaaggaaacgctgcgcgcggtccgccgagcgttggtcgagcaaccggtcgtctatcacgacgatctcgaccggaacggccgagccgccctggccgcgtcacgcactgttgcggacgtcgagttgctgaccggcctcgttgccgagcgtcgcgccgagggagtcgccctcatcgacacctcgggacgactgtcggaccaccggttccccagcaccggaaccattgcccaggtcgcactgctgattgcgggcgagatctcggaccgagtgatcgatccggatgcacccgcgctggcaacccaccccctacccgacggcgacgccctgatcgagcagctggacggcgccatacccgacggcgggatcttcggcgatctcgccgaattcgggttcggttccgatgcaacggcattcgaagatgcggacgagaaaaagctgtatccgttgatcgaggacagttggctgacaacggtcgtcgacgatctcgtcgaacgcttcggccgcaccttcgcagctcagtggcagaccgatcgggatggactgcgagtgcgggcgatcgcgctgctgcaccgacttcgactgatacacagcgtttctggcggcgtactggtgctgccggtgatcgcgcgctaccgcgacgtgatggtcagcgtgcgtgatcgaactccacaggactcactgttcggcaccgaacgaatcaccagcaccgcagaagcacccagaaccgcacagtccgtcagtaacgaatcgtccgaagtagaggcctga

SEQ ID NO: 51046 - DNA, 4185 bp, Rhodococcus sp. B7740
atgaccgcacactcgacacgctttcggccgacacgagcagggatcgtcaacctgtgggactaccgcgatcaggagttctcgttcgccgacggtcgcctggtactgcgcggccccaacggatccggcaagaccaaggcactcgaagtgctgtttcccttcgtcctggacggccgcatcgaaccacgccgactcaatccctttgcgggagaggagcggacgatgaagtccaacctgctctaccgggggcaggaaagcgcgcattcgtacgtgtggatggagttcggccgcggatctcgtgaggatcccgaatcggtgacggtcggaatcggaatgcgggcgagccgccacaacgacaaggtgacccgctggtacttcgtggccgacggccgagtgggcgtggacttctcgttgttgggttccgacgaccggccgttgacgaagaagcagctcggtgagcaactgggtaccgacgccttgaccgatcgcccggtggactatcgcgccgcgatcgatgcccgtatgttcgggttgggcgcgcagcgatacgaccagctgatcaatctcattctgacgcttcgccgcccgcaattggcgaagaacctcgatcccaagggactctcgcaggcgttgaccgacggactgcgtccgttggacgagcagctggtactcgaggctgctcgctccttcagcgacatggaggaggtgggccgggcgctcgaaggattggcgcaggccgatcacgccgccaggaacttcgtttcggtgtactccaaataccttcgggtacagactcgatcggacatcgagcaggtctcacgccggctggaggcggtgactcacgcgaccaccgcacacttcgccgctgccgccctgaaggaccggcgcctgctggaacgggcggctgcggaaacccgattcgacgaggccgaacgcgcactggatcaggccgttgcggaccgcgagactctgcagcgctcgagcgcatacgagggcaagcagcaactggacgacctggccgaatccgccgcgaagctggagatctcgaccgcccagcaggccgaccgcgcccgcaaggcgcacgccgaactggaacagcgcaccaccgaggcggcgcgtgccgatgccgcactccgggactccgtcgccggggttacccgtgccgaagaggaactgcagaccgccgccgaggacgcgggtatcgcctggacaccactgcccggaacagcccgcagcgatcagatcggcaccgctctgcgcggccatgccgaggaacgcgacggcgacgtgcgggcggttcgcgaggcgctgggaaccgtcgagaaggcgtcgaccgagcgcgcccgtgcggagaaggccgcatcgaaggctcgcgagatgctcgaggcggcgtcggctgcggtcaccgaggccgaggcgaccgtcgacctggagaaggcgcagttcgcatcgggactgcgggcctggtggtcgaacaattcggcgctgtactcctcggcgggtatcacctccgcagcgttcgaggccctcgatgccgcgttggcgggcatcggcgacgacgatgccccgagcctggaatcggtgctggccgaccagaccgcagacgcggtcgacacccttcgtgcccgccaggcccaggcgcacgtggatgtgtcgacccgcacggccgagctgaactcgctgcgtgacgaactgtctctggtgcgggccgaacacgacgacgcgccgccgccgttcgcggcacgaaccgactctcgcgccgacctcgccggtgcgcctctgtggcagctggttcggtttgccgactcggtctcccccgccgatgcggcagggatcgaatccgcactgcaggcggcgaatctgctcgacggctggatccacccgatcgcggacttccccgtcgactcgagctcggagcagtatctgtcgccgctgccggaggcctcgaggccggccggaaccacgctggcgtccgtcctcgaacccgagcccggcaccgccgtttccgaatcgcggatcctggacgtcctgaattcggttgcactgcagcaggatcgaggtgccgactcgagtggtgccgtctcgatgagcatggacggtcggtaccggcagggggtgcagcagggccgacacatcaagaccgatgccgagtacatcggcgcgacggcccgtgcacgacgccgagagcaacggatcaccgaactcggtgccgcgatcgataccgcgacagccgcactggatgccgcggcggccgacgagcgaactgcccgcgaatcggtacaggcgctggccgcggccgccaagcaactgcctcgtgtctcggccatcgtgaaagcgcaacgcgccgtcaccgccgccgcaggggcgctgcgcacctcgacgcagagttcggcagcagcggaccgagagttcgaccaggcgatcgcagacctgtccgcgaaggagaagcagctgcgtaccgtcgccgtggctcaccgcaccccacacatcggtcgagacatcgatgccctcgccgcggcgatcaggcatttcgagcaccagggctcggtggtgatccgcaagcgcggcgatcacacgcgcgaagcagaacgcgcccgcgaagcaaccaaccgactcgaagaagcgagtggcctggccgaggagctcgccgaggaagccgcgatcgccgacgagaactaccgacagcaggtgcaacgcctcgagctcctcagcgagaagctcggtgccaccgccgaacagatcgacaccgatctcgagaacgcacgcgaacgcatcgagaagtgccgcgccgagcagcgggccgcacgcaaagcggacaaggaagcaggcgaagcgatcggcaaggccgagggggcctgcaacacagcactggaaagcctgcgcggtgccgtcaccgaaaccctgggtgacgccgtgcggctcgcgccctacgctcgcaaggaccttctcggcattctcggcgtccacgaggcatacacctggccggcgagcgactcggcgtggttgagcgtggagcagattctgtatcgagtgcagcaggccgagggtcccgacgacgaggttccggtgcttccgcccgtcgtgcgcgctctgcattcggcgctcgacgcagcgacggcgtcggtgaaggtcagtgactcgagccgaaagtcgacccggacagccctgacgagtgcgctgcaggagttcgactcgcaactcgctgcgtcgggtcaggactatcgactgcagtgggatgcgccggacggtttgaccgtcgtccgtgtgcaggacgagcagggctactcgtcggtcggagatttcgccgaccgaatcggtgcggcgagagccgatcaggagttgttgctgaccgagcaggagcgccgaattctcgaagatgcgttgctgaccggcctggcgcagcagattcacgagcggaccgccgatgcgcgcgagctgatcgcgcagatgtccgccgaaatgaagcagcgccgcatgtcctcgggcaacacgatcggtgtgcactgggtgctcgcggacaacctcgacgacggtgccagggcggtgtccaaactgctcgaccgcgacgcctcggcgttgaaccaggacgatctggccgcgatgcgagcccacttcgcgtcggagatcaggatcgctcgcgcggcgcatccggaacggtcctaccccgagatcctctccacgacactggactatcgccgctggcgcgtgttcgccttcaccctcatcagcggcgacggcaacgaggatcgtctcaccgtcgcacgccacagtgcgctctcgggcggtgagcagtcggtgtcgctgcatctgcccctgttcgccgctgcgcacgtgatgctctcgtccgccgatccacattcacctcggctcctggcgctggacgaggcattcgccggagtagacgacaacggccgcagcgaattgctcggcctgagtgtgcaattcgatctcgatctgttcatgaccggatacgacctgtggatcacctacggtgacgtgcccggttgcgcgcactacgacctggcgcattcggcagccgagaacaccgtcagcgcagctcttctggtgtgggagaacggcgaactgttcgccgagcacgacggcaccgacctcgcggccgcactcgggtcaccgctgacacgccgtgtgccgacccgaaccgaaggtgggctggagtttgaccggtaa

SEQ ID NO: 51047 - DNA, 1251 bp, Rhodococcus sp. B7740
gtgggctggagtttgaccggtaacagcgaatggcgaggcagcgccgaactggctgcactgctcgatgcggcacgaaagaagttggagtccaactggcttcgcgtcggtggcaacatcaccgtcgacctgagcgaggccccggaactgtggcgtctgtgcagcgcgatctctcggtccaattccagtctgcattcgcgagcgcgtagcgccagactcgacctcgagcggttcgacgcgtggctgagccatccgctcaacggtggcctcggactgatcgacaccctctctcggcaggctccgttgcatgacaagaagcagatcgcagccgacaaggctcgggtacgtgccgaggcactcgagcgggccagggaggttctcggtggcgggaccgatcgcgagtgggtcgagtactggatcgcctccttgctcaatcaggacggcactctcgggggccgcgtcgccgtcgatgcgctcgcggtggcgacacaggtcctggcgctgcttccggtcgacgggatgtcgctgaccgaactcgcggaactggcctgcggtgatacgaaggcgctctcgggcggcggtgccccgaagctcgtcctcgacgctctgtcgttgcgcgagaacgtgcctcggcccgtcgatccggtgggcatcagggcattgtgggagaccgcgggcgtgtcggtcgactcggtctccagccgggtgctggtgctcggctaccgcgtcgacgaggcccacacggtggctcgttggctgaacgacgcagcggacgtgggcatccccttccccgtcaccgtggacatgctctcgcgcggcccgctcaccaacagctcgtccacagtgttcgtctgcgagaacgtcgccgtgctcgccgccgcagcccgcaccctcgggtcgaactgcgcgagcctgatctgcaccgacggtcaaccctccgcagcggtgcaccggctgctggcctcccgagcgcccggcaccacgattcggtggcgagccgacttcgactgggccggagtgcagatggtgacccgagccatctcccgatacgacgcggtgccgtggcggatggacgtcgattcctatcgacgcgcactcgatgcacgcaattccgaaccgctgaagggccatcgaacggacagcccgtgggatccggaactcgctgccgcactgcgcgactcgggccgagcagtcacggaggatcgactgatcccggatctgctgacggatctgcggctgggacgtgcgacctag

SEQ ID NO: 51048 - DNA, 1359 bp, Lechevalieria aerocolonigenes
ctgttccgcttcaccacggccgagggcgcggagctgcacactgcggttttgcgcgctttcggcctggcgaacgagcgcctggagacgtcgctggccctcgacgacgtgcagctacgactgaaagacgtcggctgggccgagcaggtgacggacgaggagctgacgaaatctctcagtgcgctacggcagtggggcctggtcgagagcactcagcaccggtacggactcaccaagcacggtgaggcggcatacgcaggcgttcagcacgcgatacaaaccctgaccagcagcggggcgttgcaaacggcagtactcgacgccatcgcggaccgcctcaccgagctccaaacgccaacaaaaagggcgttcgcggcgttgatggagctcgaaggccacgtcgaaacgctgcagaccaacaccgcgcggttcaacgcggacctgcagcggctgctcaaggaggagcacgacctcgccacgttccaggacgtcaagcgcaccacgatcacgtatctcaaggacttcatcgcgggcctggacgcgcgcaagcaccggatccgcgacgccatcggcaagatccccacgaacgtccacgagcaggcgaaagaaggcgcgggcctcttccaggacgaagactggctgcggcagcgaaccgagcggtggctcaacctcaaggcctggttccacgacacgccgtccaaggccgacgagctgcaggacgtggcgcgcaaggcgatagtccagctcctccgagtcctcgaccggatcagtgaacagaaaaagcgaccgacgaacaccgcggccgacttcaaggcgttggcgcactggttcgccaagagcaccgaggacgaggcgcacgagctgttcaacgcggccttcgggctgtggcccgcaaggcacgcccacctcgcgcacgccgacggggagctgatcccgagcggtgagccgtgggccaacacaccgccggtcgaggtctcgccgcagctccggacgacgggcaagcaggagcacatcgggagcacgggcaagatccgcgacgtcgaacacatccgccgcaaccgccgcgagcaggccgagaaggaacgcgccgagctcgagcacgcgtggcggcagatccagaccgacggcccggtccggatctccacactgaccagcctcgaccacgacaccttccaccggctgatcgacctggtcgggcgggcgctcggcagcgatccggacagcacgggcacgcgcgtggccggcacgaccgacgggcggatgcagatcaacctgcgcaacgcccgcggctgggccacgatcaccacccagaagggcacgctgagcggacccgactacgtgatcgacgtacagagccgatga

SEQ ID NO: 51049 - DNA, 1080 bp, Lechevalieria aerocolonigenes
atgagcaggacggggaaccagctcgcccggctggagagcgaggaggtggcgcgtggcatccggctgctgctcgcccgtcctctgctgtcggccgcgaacgatcccgacgggttcgacctcatccgcagaaggcgcgaaccgatcgtgaagtggttcgactactactgcggctggcgcgtcacggtcgaaccgcgcgccgggtacgcgcgcctgttcaagacgacgcagaaccccgatcgcaccaggcccgcaccggacttcgaccgccggcgctacatcctgctgtgcctcacgtgcgcggagttgctcaccgccgcaacaacaaccatcgacgcattggccaagagcgttcaacaagcggccacgctggaaaacctcccgccgttcgaccccgcaaagcgctcggaccgctccgcgttcgccgacgtgctgaactacctgcaacagcagggcgcgctcgagagcgacgagaccgagctccgcagcgacccggtcgtgatcacccgcctgctggcggcgccgaatccaccctccacagtggacacgatcgaggatctcaccaaagagtcacggtacgaccaagcgcaccgcagcctccaccaacggcactccaccatgcgcaggctcatcgacgatcccgtggtgtacaaggaagatctgaccgagagtcagcgagcgttcctgacgagccccaccggacgcaagatcgtccagaccggcgtcggactggccggctgcacgctggaggagcgcgccgagggctatctcgtggtcgacgccgacgcgatcgccacggacaccaggttcccggacgacgacagccacgcgaaggtcgccgcattgttgttgctcgaccggttggcacaaggtcccacacgaacagaggacctggtcgaagaagcacgcgaactgctcaccaggttccgcaactgggccaaggcctaccagtcggacggcggcgcgagcaggcttgcaaacgacgggctcgcgctgctcgaggcgttcgggctcgcgcgcacggagaacggcaccgttcgcaggctgcccgccgcggccaggtacgaggagctgcatgactga

SEQ ID NO: 51050 - DNA, 3783 bp, Lechevalieria aerocolonigenes
atgactgaccggtggcaacccagccgcgccgggatcatcaacgtctggcgctactacgacgagatcttcacgttccaccagggaagactgctgctcagaggcccgaacggcaccggcaagtcgaaggccctcgagctgctgctgccgtacctcttcgacgcgaacctgcgcccgcaccgcctgtcgacgttcggcagcgcggaccgcaccatgcactggaacctcatgggcgagggcaaccagggcagcacccgcgtcggctacgtgtggctggagttcgagcacgacgacgagtggttcacctgtggcgcaaggcttcaggccaccacgaacacgtccaacgtcacggccacgtacttcaccaccacgcaacgcatcggggatctgcagctcgtcaacgaggccggtcgcccgttgaccaagaccgacctcactgcggcgatcggtgagcacggcgttgtgcacgcctcaccggccgactaccgccacacggtgcggacgacgttgttccccggcgtgagcgaacaacggtacgactccctgatcaccgcactgttgcagctgcgcacgccgaagctgtccgaacggctcgacccgagcgtgctgtcgtcgttgctttccaaggcacttccgccgctggaccagtcggacctcaccgagatcgccgagggtttcgaacggctcgaccggcaacgcgaggagctgcaccggctcgacgaggagatcgccaccgccgaacggctcgcggacgtccaacgcacctatgcgcaacgtgtgctcggtgcatcggcatgggcgttgtcgtcgtcgaccgagcaactggaagacctcacgcgcgccgcccgcatgagcgaacggcgataccagcgccaggtcacgctgaccgacgaggctttcgagcagctcgcggcgctgggacgagaggcgagcgcggtcgacgccgagatcgccgggatctccgacctgcccgcctaccaggaaggcaagcagctcgacctgttgcggcagcagcattccgctgctgttcaccgggccgcggaagccgccgcgcacgccgcgaaactgcgtgcgcgcgccgttgcggacgaagaacaagccgcgcagaccaaggccgacgccgccgcacgcgctgatgaggtgcggcactcgacgcacgaagcccgcgaggccgccgaacgggcaggcatgccgtcggtgttcgaggagatcgaagaaggaacagacgcgcgaacaggccgtcagctgctcagcgccgccgtggactcgcgcacggccgagatcaacgctgtcctgcgagccgtggcactccacgagagggcagtcgacgcacgagacgcggcacgcctacggctcgacgagacccgtgaggaactcgacctcgccacggacgcggaaacggccgcgcagcaagcgttcgagcaagcgtttgcgaagttcggtgccgacttcgagacgtgggcgcacggctgtgctgagctgcacgtttccgaacacggtgaggtcgtcgaagccgcagctctcgcccgcgaggagttcgcggcgatcgaggcaaggctccacgagacgcgcaccgcgctcaacggccaactctcgcagtacaactccatccgcgagaagctcgccaaccaggtcgatgtcccaccaccggcgccgtacacccgtgacgccaactaccgctcatcggccgtgggcgctcctttgtggcgcctggtgaacttccgccccggaacaccacccgacgtgtgcaccgccgtcgaagccgccctcgaagcgtcaggactgctcgacgcgtggctcacaccgggcaactcgttcggcctctccgaccaggaccgcttcgccgaaccactgctcgccggccccgcacccggccgcacgttgctcgaagtgctcatcacggacgacgaccgcgcctaccggttcttggaaggcatcgcgttcggtgagaccgccacgggccacacggcagcgatcggcgccgacggcacgtggcgcctcgcgaacgcgcacggccggtggaccaagccctcccccacctacatcggcgccgactcacgcaaacgcgcgcgggcaggccgaatcgccgagctcaccggcctgatcgagcagctcgccaccgatctctccggagtggacgccgcgctgtcgcagatcgccgtccgccgtgcgaccctcgccggtgagctggccaggcagccatcgaccgacccgctggagatcgccgaggaacagcgcaccaaggcgcagttgcgttgtgcggcgcgaaaagacgccgtcgccgccgcagcccgccgagtgtccgaagtggacgcactggtagccgagacgctccgcatggcaggcagcgacgtcccggtgaacctggacgccgtcgccgcgttcagcaccgcgggccaccgctggctggacgaccgccacgacgctcaagcggccgaagcgctcgccgtcgaagcgatgaaccgctcctcggtgagcagtgcgctggcggacgaagccgaggaagccgcctccgcccgtcagcaggaggcggccgacgtcgccatcaccctggaaaccgtcgaacgttccgccggttccgagttccacgccctcgaccagcagctcatctcgttgcgcaccaaggcactcgaactggccgagcagcgcgagacgttgcaggacaagcaaacctcgctggcgcgcaccctcggtacgttggaagagaagcgcaaggtcgacaccgcacgtgccgccgaggccgcagcggtcagggaaacagcggaagaacgccaccgccacctgagcaacagccacctgcccgccgacgcaggcgacctgcccgacggtccggtcgacaccaggctgatccgggacgccgagtcccgcctcggtctggccgtgcacgaggcccagcaaaaactcgcgggccgcatcgacctgtcactcgaccccgacgacaacgtcaccctcctcagcgcaacgctggacggcgcgcgcatgggcgcccacgcgctgttggaagcgctgcaggccgaacgcgaccgcatgcgcacacacatcaccgacgccgagcgcgacctcttcgaccagaccctcaccggcgacacccgaaggcacatcgcccagcgcatccagggcgcctccgagctcgtcgacacgatgaaccaacgcttggagcgcgtccaaaccgcgtccaacatccgcgtgcaactcgactggcaggtcgatccccaactcccgccaggcacccgcgaggcccgcgacctactgctgcgctccgacctggacgacgcggaacgcactgtgctgcaccagttcttccgcgagcgcgtagaggaagcacgcgcacacgacacggcaacgggctgggaacaacaactcgcccaggtgctcgactacacgacgtggcaccagttcgtcgtgaaggtggaccgcggcgacggctgggtccccgtcaccaaacgcgtgcacggcgcgttgtccggcggtgagaaggccatcgtgctgcacctgccgttgttcgccgcagcagcagcgcactaccacgccacgccgcactcacctcggctgatcctgctggacgaggtgttcgtgggcgtcgacgcgaccaaccgcggccagctcctggaactgctcgtcgcgttcgacctggacctcgtgctcacctcggaccacgagtggtgcgactaccgcgagctgaccggcatcgccatccaccagctcaccaccggaaccgacggcgacgacgccgtgacgaccgttcgcttcacctgggacggccacagcctcaaggccgatgactga

SEQ ID NO: 51051 - DNA, 1566 bp, Saccharothrix sp. ST-888
atcggcgccgccgcccgcgggaacggttcgtaccagcccttcgcccatctcacgacggagcactcggctctctaccgccaggtcatgggtgcgttcgtccgagccaaacaggagttcaccgtccacctccggccggaggacgttcaccttggtctgccggccgacggccggccgccggtggagagtgtggcgacggcgctggagcggctcgcccggtggggaaatcttcgggcggaccctgacaccggccgggtcaccgcgctggaggatttttaccgctcccgctacatctaccagttgacccgggagggtgaggccgccgaggaggcactggcggcttacgacgaggcgctgggaaggcgcggcgaactccaggcggtggcgctcgctgacatcgccgtacagctgcgggcgctgctcgcgctggctgggcagcccgtgccggatccgggggtggcccaccttgccctgctcgccctggtggaccgcttctccggcctggccgagaacgcgcgggcgttcatgagttcgctgcaacgcacggtcgacctgcacgatgccgaggtcgaggtgttcctcgcctacaagcagcggctgatcgagtacctggagcgtttcatcgaggatctggtcacccgaggcgccgagatcgcggggctgttggagcgcctggggacaccgcacgagggctcggccggcccgctgctgcggctggccgccgcccgtgaggcgtccgacacggctccggacgcctcggccgaggcactgaccgccgccgagcagcgctggtacgggcggtgggaggggctgcgggcgtggttcctcagcgtgccgggccgcagttcccaggcgaagctgctgcgctcggcggcccgccaggcggtcccgcaactgctgggtgtggtgcaggcgctgaacgagagaaggtccggtcggtcggaccgctccgcagactttcgggagctggcccgctggttcgctgaagcgcccgacgaccaggccaggcaccggttgtggcgctcggcgttcgggttgtactcggcccggcacctgaccatcgacccggaggcactggccgtccgcggggccgacccggtgcccgcctcggcctcgtggtacgacgcgccgggcgtacggatcagtccgcagctgcgccgcaccggctcgtacgagcggcgtggccgggcacgggccgtccaggaccgcggcgaggccaaggcgtacctggcggaactggcccgcaagcaggccgagcagacggcggcggctagggcgcggctggcgaccgacggcgaggtgcggctgagcgatctgggagagctcgacccggcggccttccggctgttcctgcgactgctcggagacgccctgtccgcatggcggcccggtacggacacggtcgctgtcaccatcagcgacgggacgatggagatcagactcaccaggctgccgggcggcgctgccgcggagatccacaccctcgacggtgtactgcacgggccggagcacctggtcgagatcacggacctggcggcggaccgcgagagcgccgggagcccgcgatga

SEQ ID NO: 51052 - DNA, 4131 bp, Saccharothrix sp. ST-888
atgagcaccaacgtctccacaccgttgcccgtgccgggccgcacccgctggcagccactccgcaccggcctggtcgacctcttctactacgacgtcgaggagttccacttccgcgacggccgtctgctgctgcgtggcaacaacggcaccggcaagtccaaggtgctcgccctcaccctgcccttcctgctggacggcgacctctccccgcaccgggtcgagccggacgccgaccccaagaagcggatggagtggaacctgctgctcggcggcgagcacccgcaccccgagcgcctcggctacacctggatcgagttcggccgactcgacgaggacggtaccgcccgctacaccaccctcggctgcgggctcaaggcggtggccggccggggcatcgcacggcactggtacttcgtcaccgaccggcgcgtcggcgcggaccctggcgacggcggcctcgggctgctcgactccaccggcgcagcgatcggccgcgaccggttgaccgaggcgatggacgggcgcggcctggtgtacgactccgcccggacctaccggcgcgcggtggacgaggcgctgttcggtctcggtgagcagcgttacgcggccctggtggacctgctggtgcagctgcgccagccgcagctgtccaagcggccgagcgagaaggccctttcccaggcgctcaccgagtcgctgccgccgatggaccaggctgtggtcgccgacgtcgccgaggcgttccgctcgctggacgaggagaaggagcagctggcggtgatggtcgcggccgaacgcgccgccaccgccttcctccagcactaccgccgctacgcccaggtggccgcccggcgcaaggcccgcgcgccgcgagcccagcactcccggtacgagtcgctgcgtgccgaactgaacaccgccgaggtggacttcgaggctgctggcaccgccctggaggacgccgaggcccggttggaggaactggaccgcagtcgcactggtctgcgggccagagacgaggcgctgcgggccggccccgagatgcgcagtgcccgcgagctggagcaggcggccgagctggctgagcgcaccgcgcgggacgccgagcgcgcggaggctgaccgcacccgggccgacggcgagttggcccggtacgcggcccggctgggcgccgcacgttcgcgggccgatgcggccgggcgggcgcagcagaccgggctgacccgggccggcgaggcagcgacgaaggcccggttggagcggcagcaccacgacctgatcgcggacccgctcgccgccggggacaccctggaggccgccgggcaggccgccgacgagatcaccgaccgccggctgcgctccgtcgccctggtcgaggggcagctggcctccgcccaggaagccactcggacgcttgaccgggcccgcaggcggctggaagacgcggacgccgagctggcccgccgggcggaccttggggccgaggccgtggagagcgcggttcaggccggcgaggaccatctcgccagggcccgcgcccatttcgcgtcctgcacgctgctgcgcccggacgacccggaaggcatgctggacgaactcgcccagtgggtcgagactctggacgggcccgatccggccaggatcgcagcccagcagaccgccgccaccaccggcagcgaactcgcccgccgccgggccgccctcgcactcgggcgtaccgagacccggcaagggatcgacaagctccaggccgagctggccgagctgcgctccggtgcccgacgcgggcccaagccgccgtacacccgctcagcaggggaccgtcgggacaggcccggtgccccgctctggcgcttggtggacttcaccgacgactccggtctgacggacagcgcgcgggccggtctggaagcggccctggaggcgtccgggctgctcgacgcatgggtcggccccgacggaacggtcgcctccgccgacaccggggacaccctgctgaccgccggcgcacccgtggacgggccgtcgctcgctgccgtcctgcaccccgccgtcgaccgggaggactccgcggcttcattcgtaccggacgaagcggtgtcccggctgttggccggaatcggcctgctcggcccggtcgaggagcttccgcacagcgggagctggattgcttccgacggccgtttccggctcggcgtgctcaccggagcctggtccaagcccgccgctgagtaccttggggagggcgcccgcgagcaggcccggcgcgccaggatcgccgccgtggaagccgaactcgccgaatatgcggctcagctgggtgccctggcagaccaggacgaggctctggaggccgacgagcaccggctcgccgccgagcaggccgggctgccggacgactccgccctgcgcgccgcccacgccgcgtcgacggcagcccgcgtcgaatacgcccggaccgtcgaacggcgtcaggcagccgatcaggaagccgcggacgcttccgccgaggtggaccaggtcgtcggcgaactgcacagcctcgccgacgaactcgttctccccgtcaccggtggggagctgcgcgaggcgcgcgaggccgtgagcgcctaccgggaagcccttgccgcgctctggcccgccgtccgcgaggcgcgcgccgcgcggtccgcgctggcggtcgaggaggccgaccacgaacgggccgccgagcacggcgcggagctggccgagcgttcccgcgcggcggcccgggaatccgtcgccgccggcgagcgccaccagacgctccaggccaccgtcggcacggccgtcgccgaactgcagcgccaactcgccgccgtggtggtgaccctgcgggacatcgacgagcgcgagcgggccacccgccgcgagcagaacacggccaccggccgccaggccgctgccgacgccctgcgcacccgggtacgtgccgagatcgaggacaccgccggtacccgtgccgaggccatcgacgcgctgcgccgcttcgcggccaccggtctgctcggcgtcgccctgcccgacctcgaccaccccggggactcctgggcccccgaacccgccgtccgcctcgcccgcgccgtcgaacgcgagctggagtccgtcgacgactccgacccggcctgggaacgggtccagcgccggatcaccgaggagctcaaggacctctccgacgccctctcccggcacggccacacggcagcggcccgaatgctggaggacggcctggtggtcgacatcctcttccagggccgcgaacgctccgtccccgagctggccggcgccctcgctgccgaagtcgccgaccggcaacggctgctctccgcccgcgagcaggagatcctggagaaccacctggtcaccgaggtcgcgggaaccctccaggaactggtcggtgccgccgagcaccaggtcctccggatgaacgcggagctgaaggaccgcccgaccagcaccggcatgctgctacgcctggtctggcgaccggcccgcaacgcccccggtggcctggccgcagcccgcgaccgcctgctgcgccagtcgtccgacgcctggaccgcctccgatcggacggccctcggcgagttcctccaggcccagatcgaccgggcccgcaccgacaatcccgccggcacgtggctggagcacctcaccaccgcgttggactaccgctcgtggcacgagttcggcatcgagcggcaccagcacgggaagtggcagcccgccaccgggccggcctcgggcggcgaacgcgtcctggccgtctcgttgccgctgttcgccgccgcgtcctcgcactacgcctcggccggcagcccgcacgccccgcgcctggtcaccctggacgaggccttcgcgggcgtcgacgacgactcccgggccaagtccctgggtctgctcgccgccttcgacctggacgtggtgatgacctccgaacgcgagtggggctgctacccgcaggtcccgggcctggcgatcgcgcagctctcccgggtggacgagatcgccgccgtcctggtgacccgctgggagtgggacggccgccagcgcacacgtacacccgatccggtcgttccggcccagcgccgggatggtccgggcgagtga

SEQ ID NO: 51053 - DNA, 1251 bp, Saccharothrix sp. ST-888
gtgaccgccgacctgccgcgtctacgccgcctgctcggcacgcccgagacggcctggctggtcgaccgggtccgtcgacgcctcgaagccgggcagccgctggacaccacgctcacccgcagtggcgccgacgacgccgaacgcgccgccgtcgcccgtctcctgggacgcgctcccaggcccggacggtcgttgtcggtgccgctgccggccgtggacgggatactccgggccagtggtgcctgctcggacggactcgccgccgccgtcgtcgccctcaccgggcccgtgacctcgcgtcggggggccgccgaggagctgagccgagcctgggaccacgccttcgccgccctggcggatgcggtcgccgcccggcccgagctggccgactggtaccgggagctacacgccaccggcctggtccgccgcctcgcccgcaccccggaggaggccgcaccgctcctcaccgcgctcgcccggatcctcccccgactgccgctgtcacccccgcagtcgctgagcaccttcgccgccaggaccatcggtgacgcccacgccctcgaccacgggccgctcgccaccctcaccctcgacgccgtccgcgccctcaccggggcgctggccgggcccggtgccggtcggcgccgcgacacctgggccgctgccgggctcctcctggacgagctctcctcccaggctcttgtgctcaatctgcccggtggcgatcacaccgccaccggccgcgcgctgaccgctctggccgccgccggccagcccgccgtgctgaccctccgccagctcctcggggacgctccgcaaccgcctcgcggcggggtggcgtacgtttgcgagaaccccgccgtcatgctcgccgccgccaacctgctgggcgcccgctgcccgcccctggtctgcctccagggccagcccagcacggctgccctgcacctgctccgcctctacgctgacgccgactggaccttgcggtaccacggcgacttcgactggggcggcgtccgtatcgccacacgcctcctggcccacgtgccgtggactccgtggcggtacaccgccgacgactaccgggcggccctcaccgcccacccgcacaccgggcccctggcaggcagcgctgccgagaccccgtgggaccccgctctcgcggccgaactcagtcgggccggccgccggatcgaggaggaactggtgctcgccgccctcctcggcgacttggcggacctcgcgccctga

SEQ ID NO: 51054 - DNA, 1512 bp, Desulfosporosinus sp. I2
atgaatgaacaacttcttaagcctattcaagaagcaacctatttgacggttttgaacgcttggcgttatcgctctattttgcgttacatttatctacaacacgaacgactacgttactacatagttctcgaagagattttgcagtatttgaagcaggatccgcattttcgagagtacactgaggagcagctcctgcaggatttagatcaactggttagctggaagaatcttataccgcgacaagacacaggacgagtagctagtatcgaggaatttaagaagcgaaaatttcgttatcagttgacaccctacacaattgaaatcgaacggatggttttaggccttgagcaattgggttcaggctttggaggatcactggaacgaaccctttttgatcgcttattgggtaatttaatggacctgaccgtcgcctgggtgaaatcagacgctgtttttagtaaaacgaatgaagaaatttatcttctctggcaagacctgtatgagaactttcatcgtctgacagataatgcggctgactacttggcccacctgcatagtgaaaaagtagaggaacaaatgatgactgacgcctttctggtctataaagaggcgttaacagagtacctccgtaattttatgacgagcttacagagaacctcctttcggattgaaggcttacttgaggaagcccccttgaccttctctcaaaaactcacggaatgtgtcgcagactatgaactgtctattccccgtctggacgtccgtcccagcaaagagcaactgatggaacgttttcaaaatcaatgggaaagtcttagaacctggttcctgggagatggcggcagcgaaagcgatctgctctatctccagaatgcaaccaatgatactatccgccgtctaacccgctttgcccagcgtcttggcgaaactcatcacaatctgcgcaaccgacgcttggattatttacacttggctaagtggttttccaacttagataccgtacaagaggctcatgaactctcagcctgtgtttttggcgtcttccatacgcgccacttatgggtcgatcgccccaagcagacggaaagtttcgaagtcgagatctgggatgaaccaccctccgaaatcgagattcggcctaaggtaagaaactacagagaaaaaggcagaccgaatgcggttgttgatcaatcggaacgcaaaaaagctgccttagagacctatttaagggaaaaggaaattgaacaacaattacttgataatctcattcaaaataattgtattgtcctgcgcaaccttcctgagctgacgacgtttatccgtaaaacgttgctcacttggatcagtaaatgcatggccaaccctaatcgccaaggaaaaacggaaaccggacgcactttttcccttgagaaagccagtgaccgccaaatcaatttacattgcgaggatggtctcttagcaatgcccgattacatcttcttgtttgatgatctggcggaggcagcccgatga

SEQ ID NO: 51055 - DNA, 1224 bp, Desulfosporosinus sp. I2
atgagcgaaaagcgaggtttcgacgaagtggccagagaggccttgataactctacttgagaacttttggattctccgtgaacacgatccggaagcctatcaaatcatccgggatcgggaaaatgcactaaaggattatgtgctggacaaattgggctaccatttgatcgttcaccggcatttcgctaaactagaaaaaatccctgctgtaccggaagcgtggatggggattgagcattttcaacaccccagggattacgctcttttgtgttgcgtgctcgcctacttagagagcatcacagggtatgaacaatttctgctctccgatctctgttccgaggtccaggcactttacccgggagagctggccctcgattggcgcaattatgagcatcgtaaatccttggttagagttctgcagttcgtgacagaactcaaaatgctgaccgtcgttgacggcgaacttggcacctttgggaagaatgaaagctcagaggttctctacgaagtttcagtcgtcagccggtatttcatgcgttcctatcccaaggatttcttccaatttaacagcaaagaagacattttggctgcggagacatttgagggagaagatgaactgctaggcgcacgccgacgctaccgaatctaccggcaactcttgctgtccccgtctatgtaccgcagcaattctgaggacgcagattttctttacttgcgcaactaccgcgctcgcttacaggaggacctagaaagacacaccggcttacaattagagctctaccgtaacacggcgcttttaatagcacccgaaccgaaatccgccttgaccctctttcccaatcagaaaggcatctcggacatcgccttgcaattcggctccgccttgcgacaacaattaaacgaggggcattgcaaggcggattctcttggtcgggtggctctaactcctcttcagtttgagcaaactgtaagacactgtaaagaactttatagttacggctggagcaaagaatttcgggagggcctgattaaacataccgctgatgaactgctggcgtttctcatggactggacgtttgcccaacgtagtgatgaaggagattcaatttattttcaaccagcgcttggccgcttgactggggattatccgcaggattacaagaacaaacaacaaacccaggctgatcgtgacgatggtgattggataagggaggataacaattaa

SEQ ID NO: 51056 - DNA, 4221 bp, Desulfosporosinus sp. I2
atgcgatggcagttaaaccgagctggcttattcaacttttggtactacgatgaggaagaatttcactttgcggacggtaaactgcttttgcgtggaagcaacggctctggaaaatcggtgacgatgcaaagcctgattcccgtccttttggacgggcgcaagacacccgatcgtcttgacccctttggttctcgtgctcgtcgtatggaagattatctgctcggagaaaaggatgtaacggatctcgatgagcggacaggatacctctatctggaatatcatcgacccggtacgcaggaacatatcaccacgggcatcggtttaaaggccaaacgtcagggtgccctggagttttggggatttattcttctggataaccgccgaatcgggattgacatccaactctacaaaactgaacgagccctggatggtaaactggaaaaaattccgctcactcgacgggaactggaaaatcggatcgctgagggcggcgaggtggtcaaaactcaaaaggattacctggaacgggtaaatcgctacctttttggctttaaaaccgttgacgactatgacgatttaatcaagcttttgattcaattgcgcagccctaaactttccaaggattttcgacccaccgtagtttacgagatcttaaacgaggccctgccgtctttgtcggacgatgaactacgtcctctttcggataccattgaaaatatggaccagattaaaagccaattagatcagctacagaaggaagagcaagcgctgaaacggctccttcggtactatgatcagtataaccagaaagtaagggccgaaaaagccgaagctttcttgcgcactcaccaacgtcttcttcagaccaccaaggcgttggaacgcttacacctcgagcgagaaaacgctaaaatcgccctagtcagtcagcaggaaacagagacgatccttaaacgggaacagcaagttttagatgtagaacgagaggccctgggggaacatgatgttttcaaggcagaaaaagagagagaaaggctcctgaaagagcaacaaaagaaccaggagatcctagctagtaaaaacaaacaactgacgaacaacgtgtctaaggaaggtgcgcttaaggatcaaatcggccaattagagctcaaggagcagcacgctttagccacgatccaggaagaacttgaggaactcgacagtttagccgaggaatcagcctttctaaatcatgagatggcagctgacgaattcaaccgagaaattgatcagacattttccttcgccctttggaagaaggaggctctcgattatcaaaggttattagagaacgttatgaagctccttcgccaagaatccggagccaaagagaggtaccaagaagccgatctggcgcttagcgagactaaaaaagcctgggacgaggagcaatatcaggaaaagaagtgggtggatctacttcaagaggaacagtcctcctgggtggctcagttgtttgaatggcagcctatgaatcaagaattacgcttccaggatatcgagctgcaaacccttgccctgcgagccaggtcgtttccggaaagcgttaaccaaagcacgctgcgagaaccgctcttgcaagcgacggatagagctcgcgacaagatccgaagagagctgcttaaagtcaaacacgagcaagaacaggttctgaaagaagttaaagtcaaatccgaagcgattgaagtttggcgtcaacgccaggaccctgagcccgcaagacatgacttgacaaatcaggcccgaaaaatcttgcaagacattaaggtcccgtttgtctccttttacagcgcagtggaattccacgatcatgttccacaggcgactcgggaacgattagagagtgccttgaaagagatgggtattctagatgctttaattcttcctgaacatgttgtcaaaacatccgagcaagaacaagccttgcaaaatcttcccgtgcatgaccgggtacttaaaccagccccccaaattctcgcgcataccttagcagactacctttatccaactcccgtagagggaagtaaagtgcaggctggggacattgagaacattctccggaccatcctcgttgctgatagtcagggagagagcaacaccagtttaaatacctgcggttcctaccggattggcgcactaaagggacatgctcccctggcggaatctgccttatatataggaaaggaagctcgacggcaactgcgcttgcgggagatcaagaaactggaggatgaacgagaacttctgaaccaacaagtccttgagcaagagaaccggctgaagagtctgaaccaaaagagtgacaagttggaagaggaatatcaaacctttcccagcgagcagtctatgcaagaagcttgggatattatctataaagcccgccaaaagctggaaattctaggaaaagacgtccagcgaaaaaatgaagtccttcttaaagcgctggaaatttggagaaatcttaaagctcaggtcaaagaactgagtcgaaccttaaccttaccactcgatgagctttcctatgggaaggcccatgcagaaatttcttcttatcgagagggcttaaccaggattgaatctctatatcagcaggtgcattcaactcggagagagcgaagtgcggttctagctcatctggaaaacacctctgaggccgtagatgaactccggggggaaatcaacgaacttagagatcaagcccaaacttgccaagatttattaattcaggtggaacagcgcctgcaagatctgggcgccgacgagattcgcgagcgcattcacaatgtgatcaagcggcttaatgctctgcccagtgaaatagaaacttgtattcaacagattagcacactcactagagatctaaaagattacgaccaaaaaatgctcgagaatgagcgtgaccttaggttagctacccaactgcaacaaggctgggccaatgtttttcaagcggaggaaaccctccaaacctcgtttgatcatatttcagaagacgagcggaactcaaactctcagccaaacccctcaacactcgctagctcacccttaccaccaagtcaccaagggatattaattcaaacagcggagggaattattagcgttcaggactcaaaggagacaaaatcgccggaccgggagaccctgcgggaacggattaatgaggccttcaccagggaaatgggtaatctcgtcgagtaccgtttaacgcaaaacaccctcttcgaaaccctggccggactcaatcttcccacggaagactcgccggaattatggcttaaactctgggaggaactccgccagaaagcccgtcgagttcagctgatgctggaatacgatggcaagagggttaatccctattacctacgcgcccagttagaaaaaaacatggccttgcaacgccaacttctcaatgagaaggaccgtgaattgtatgaagaaatcattatgaatagtgtaggccggattatcaggggacgaattcaacgtgccgagcactgggtggaagaaatgaatcgactcatggatgaacgggatacctcgagtggtctccgttttagaatccgctggaagccacggactgctgaccatgaagatgaaatcgatacccaggacttagtcgagttgctcaaatctgatccacggctcttaaaagaaagcgatatgtcacgaatcaccaaccattttcgagttaaaattgaacgggctaaacaacaattagaagtcaaagggttcggagaaagctttcaccaaatcatcaaagaaatgcttgattatcgtcattggttcgaattccgactgcttttccaaaaagaagggcaaatttggaaggaactaacagatcgtgccttcttccagtttagtggaggagagaaagcaatggcaatgtacattcctcttttctcagccgcctattcccggtactcggatgctcgggaagatgccccgcgcattatttctctcgatgaagcctttgccggagtcgatgaaaataacatccgagatatgtttgacttgctagagaaactgggctttaactatatcatgaactcccaggccctctggggtgactatgataccgtatctcatttggctatcgcagaactggtacggcctaagaatgcttcctacgtgaccgtgatccgctatagttgggatggtaaagttcggcgcttgataggctaa

SEQ ID NO: 51057 - DNA, 1374 bp, Desulfosporosinus sp. I2
ttgaaatcggatgagctgcaaaagctacaaaaagctaaagactacttctcctcaaccaaggggtttgcccggctcttcaaggccatggcccaaaagtatcagagtttaggccgctgggctggttcggtaaccctaacctcatttaaagacgaggagcgtgacgccctctcaaccctgttccgggcagacttttcccgacgaaaatcaatcacgatttctctggagcgctttgctaaggctttagaactcacaaaattcagcggcatctctgcattaagtctactcgaagaaattcagggacagtcgctgctctccaattcagaccgactagctcataaggaacgagccaaagcaacattctttaatgacttggcagtccaatatcctgaaccctattgtcagctttggctagaggctatcagcaaaaagcagccaggaacccgctcaattcagacaacttatgatacgcgatttgaccagttaagagtccaaatgcatcacgtgcttagtgccctggcagccatcaacaagcgtcatccgaataaaatcgagcgcttgccaatgtttgcccgccgtatcacaaaagacccccacggttttgaccccaacagcgatactggtcgaatcctccttcaggcccttaagattttgagcagccaactgcgagcaagcgatccgctcaccctcgccttatccggtgctgaagcattgacggagctgtatttttcttttggcattttacgagatgatctctggaattttgtcacctgtacaggaatcactggaagtgcagctgataatcagctccttggttatttaaccgaggcttaccgacaacaagtaaccttgaacctgcccctccgggaagttgtccgaattgacaaggcttacgcagctggccaggtggtctatgtcgtcgagaattcgggcgtttactcagccctcttagatctctgtcgagatttttgtgaggaagagggacttatggagatgacccccaatccccctctcgtctgtacacatggccaattcaaactcgccagtttgctattgctcgataaattagccgccagcggtacactaatttactactcgggggacttcgaccctgaaggcttatccatggcagaacggcttttactgcgctaccccgggcaagcaaaagcttggcattacaccctcgaagattatcagctttcgcgctcggaccaggtcctaagtcctcagcgcttgaaacaactcgacagagtctcctctcctgaactcgctcctctcaaagaaaaacttcttaaaactggtctagcgggttatcaagaagggattctaagtgacttgtggtgtgatgtgaaacagtctatgcaggaaagaatttga

SEQ ID NO: 51058 - DNA, 1476 bp, Clostridiaceae bacterium BRH_c20a
atggacgatcaacaattaaaacccattaccgaagcggcctatttaaccgctaataacgcttggcggtatcgtgctgttttacgatatttttatttacagcatgaaaagttgagatactatcttttccctgatgaaatatttcagtacttaaaagaaaagctacattttgcaagctatactgaagaacagctgcagcaagatttagaccaattggttgaatggaaaaatttaatacctagacaagatacagggaaagtaacaacaatacaggaatttaaaaagaagaaatttcgctatcaatgtacaccttatactgtggaatttgagcggatggtcaagcgtctagaactaaaaggtgattcctttggcggctctttagagaaaaatctttttgatcgacttttagaagtacttgttaagtttacagatagcgaaatagctaatggggacactgaaaatctttattccctttgggatgagctttttggctattttaaaaaactaactgagaatgccactgactatttagcccatttagagagtgaaaaaatcgaagaaatgatgatgactgaggcatttttagtttacaaagatgcactcacggaatatttgagaaatttcatgacagccttacaaagaacatcattaaaaatagaagcagtgttagaacaaacatctcttgattacattcataggactgcccaagttttagctcaatattacttaagtatcccaagattagatcaagttgctaccatcgaagaacttaccgagaaatactctaatcagtggcaggggttaagggcttggtttttaggtcatgaaggcagggatagtgatttaatttttttacaaaatacaacaaatgaaactgtgcgccgtatgacgcggtttgctcagcgcttaggcgaaaaacaccataattttaaaagcaggaaaaaggattatgtacatttagctaagattttttctaattgttctgatattaatgaggctcataagctttcagcatgtgcttttggcctttttcatactcgtcatctttgtgccctcgaaaaagatacagaggatatatatacagaaatctgggatcttcaaccatcggaggttattttaaatcctcgagttcgcacatatcgggaaaaaactagacctcaagcggtcatcagttatcctaaggaaaaggctaaaatgctgcaggaatatctattagaaaaagaggcggaacaacatttaattaatgaaataattgaaaacagaagaatagtattaaataaaataactatgactgatccctatattaggaagacattacttaactggatcgcaaaaagtatgggtaataaaatgggatttgctaaaacacaaaccggtcataaatttaaactgagtaagttagataatcaatctataataattaattgggaagatggtaccttaaagctgcctaattttatcattgagttcttagaatag

SEQ ID NO: 51059 - DNA, 1194 bp, Clostridiaceae bacterium BRH_c20a
atggaagaaaagtccaaagttatttttgatgaagcagctaaagaaagtgctcaatatattttagaaaatttctggattttacgggaaaaggagccggaaatctatcaacaaataagacagcgggaaaatgtacttaaaaactttttcttagaaaaaatgggattaaatttaattgttcatcggcaatttgttaaattagaaaaattccctattgagccggagacttggatgggtatagagaaattcacgcaggttcgcgattatgttttgttttcttgtttgatggcttttttggaaggtaagaatgtggatgaacagtttcttttgtctgatttatgtgaagagctaagttccattcatccctccattgaggggttggactggactcattatgaacatcgcaagtcattagtgagggtgctgcaagcagcagctgacatatatttagtgcgaactgttgatggtgatatcagtgactttaattactcagaaaataacgaagttttatatgaagttccaatagtggctcgttattttttgcgttcctttcctaaagatttaactacctttaaaaatgcaaaagattttcttaatattgaagatttaaactccgaggaacaattaggggtaaaaaggcggcaaagggtttatcgtaagctttttctaactccggtcatgtatattaacgaaaataatgatcctgactttttatatcttcgtaattaccgcaaccgcattagggaagatgtagaaaaacatactgattttagttttgaattatatcgcaatgccgcgttacttactatagaagagaaaaaagccatgtatactttgtttcctgataataaagcaattagcgatattgtgcttcagtttgccaatatggtcagagaagaaaaaaatagtaatgcgatctctttacagcttgatggcactttgcatttgacaccagtagattttcagaaatgggtaagtaaatgtaaggattattatggacatggttggagtaaacaatatcgagaattaatcgtttcagaaactgcccgagaactaatcgctgtcttggtggattggcagatggcagatattcttgatgagactggggttatacgtttgaaacctttattggtaagagtagttggtaaatatcctgtagatttttctaaaggtggagatagtgatgaagaaaactaa

SEQ ID NO: 51060 - DNA, 4185 bp, Clostridiaceae bacterium BRH_c20a
atgaagaaaactaaatggcaaatgcaccgggcaggactcttaaacttctggtactatgatgatgaagaatttaactttgccgatggtaagctgcttttaagaggcaataatggctcgggtaagtcagtaactatgcagagctttattcctgttttgttagatggccgaaaaagccccgatcgtttagatccttttggctctcgggccagaaaaatggaagactatttgttaggagagaaaggtgtcgtcgaccgtgatgaacggacaggctatttatatctcgaatacaagcggcaaggtctggagcaatacattacaactggtattggtttacgggccaaaagaaatagtactatggatttctgggggtttgtaatccttgataaccgtcgtatcgggcaggatattttcttatataaaaatgaatatagtgccgatttaggaaaaaagcaaaagattccttttacaagaatagagttggaaaaccgtcttgctgacgggggtaaagttgttcgaacttctaaagagtacatgaatttagttaataagcatgtgtttggctttgaaaatatagccgattatgaggaattaattaagttattaattcaattacgcagtccgaagctttctaaagattttaagccaactgtaatctatgagattttaaatgaatctttacctgctttatctgatgacgaattgcggccactttctgatacgattgaaaacatggatcagactaaacaacaattagagcagctagagaaagagcaaaaatccctaaataaactatgtaagcagtatgatttgtataatcaattggtattattggaaaaagctcaaggtttacttaaaaccaatgatgatttactaaaattttttactcaagaaaagcaattacaagctgacctaataaattatgaagaagcaaaaaccaatttaagtaagctaaaagctgatttgttactggaaaatgaaatattgcaagatgagaaaagtaaattagagaagcataaagtttttgatattgagaaagaaaagattgctttagaacaaaaggctgcctcggaaaaaagtaagcttaaagttaaagaagatagtgtaagtaagcaaaatactacagagttagaacatcgacaaaaaattgctaaagaagaacaaaaattaagttatttagaagcacacattactgaaatactagctgaacttgattatgatggcgaagaagctgaatttacgagccatcctttagctcgccaagagtttaccaagaagtatgccagcggagaatttatttttgacttatggaaaaaggaaacagatgattaccacaaaaaattagaaagaattttcaagattatcgaaggattagataaaactcggcaagattataaggaggccgattgggaactaggacaagctcgtaaaactgctgatttaaaagaaaaagaagtaaaaaaatggtatgattttttcgaagaagaaaaagaaaacctgttgtcagctgtctatacgtggcggcagaatactcaggaattaatcgtatctgattttgatatgcaaaaaatagcgcgcatctgtaataatatttttgaagactatgccttagaagatttaaatcgaatagttaatcaggcatatatgtctagctttaaacagttagagacaatgtcagtgcagttaaaccaacaaattgctgataaaaatgaggcaataaatagtaaggaagttgaaataagcgactggaaaaataaaaaagatcctgaaccattacggcataaggatacgataatggctagacaagaattggatgaaaagaatattccttgcgtacctttttatcaagccgtagagtttaaagcacaggtaacttcagaacaacgggaacgcctagaaagcgcaataagccaaatgggttttttagatgctttaatagtacctggaaaatacacaaaaagtattcaaaaatcagataaggtattaatacctaatcctcagttttttaagcacactttggcggaactattatatcccaccccggtggagggggtaggggtaacagctgaggaaatagctaatgttttgcagagtattttattagagggttctgatgatggtttagcagtggtcaacgaagacggaacttatcaaatatctttattgcagggacatgcacctaaggaagaagcatctcgatatattggccaagaagcaagaaaactctaccgccaagaaatgattgccaaacttactaaagagttaagagaattggaagagaagttggctgaacttatcaaagctcaagaatacatggtcaaacgtcaagaagtattaaataatgagtcggcaagttttcctttaacaaatgatgtaaaaacagcctatgatacctggcagcgtttaattatggaagtagatatactagaaaaggaagtcgaaattaaaaacactaaagtaaaaaagttgttagaattactaaactctattcaggatagcttacgggaacacgtaaaaaatataaccttacctgttaataaagaggcttacgaagctgcagtaaataatatgcatacttataagaaaaatttgcaccaattagaattacaatataaagactattgtaatagtactatatcatttggcaattaccaacaaaatctactaaatactattgagttaattgatgaacttaagggtgaaataaatattattaatagtgaattgcaaaaattagagttgcaattaaaaaatgcaactgaaagattgaatatcctgggggtggaagaagttcgccgtagaatcaatgaggttgaaaatagaataggtgaattacccgaggaattattaaatactcaagaccaaatcacccaaaatattaacttaataaataatacccgcactgcggtggaccaacttaatataaaacaaaacatttataagaaactggtagaatactggcaaaatacctttcaagctgaattcaaattaggttttgtaaaagaagtggaacaaattaatgaagtttgggaagtatttaagaaagcaaaagaaatcaaagataggttagcggttcactttaaggataatattgatagggagaagttgtcggaaaagctaaatcaggttttttatcaagaacagggtgctttagttgagtaccgactaagtcaggaaaccagcggcaagattgaaatagagatagcttctctagaattgggcgatgaaagccaagtaatagactatttagttaaagagctagaggttaaatctcggagaatacaagttttgctggagtacaccggtaaaagggtcagccccttctttgttttggaacagttagatcgggatattgaattacaacaaactattctcaatgataaggaccgagaactctatgaagaaattattatgaatagtgtggggagaattattagagctcgcataagtagagctgaagaatgggttgaaaaaattgataaattgatggtccagcgcaacacatccagcggtcttacattttctttgcgttggcgtcctctgaccgcagagtgggaggatgagctggatacaaaagaacttgtggaattattacggttaaatcctaaatttttaaaatcacaggatatggataagataacccaacattttcgttctaaaataaccagagccaaagagattatggcggaaaaaggatatggggaaacctttcatcaaattattaaagaaatgttagattaccgcaagtggtttcaatttaccctctattaccaaagggctggggaaaagaaaaaggaattaacaaataatgtattctacacctttagtggtggagaaaaggctatggctatgtatatacccttattttctgctgcctactccagatatctggaggctcgggaggatgcgccatatgttatttccttagatgaagcttttgctggagttgatgaaaacaacattcgggatatgtttgatctggtggaaaagctggactttaactatatcatgaattctcaagctctttggggtgactatgatacagtttcagcattatctatttgtgaattagttcgtccgcaaaatgccccctttgttacagttgtgcgttattggtggaatggtaagcaaaaagaacttattatacccaaagagcatgaatatgaaattctagaagtagccaaatag

SEQ ID NO: 51061 - DNA, 1341 bp, Clostridiaceae bacterium BRH_c20a
atgtctaaagataagttgcaagaagcagctgatttttttcgaaaagagccgggctttaagcggctctttgaaaagtttattaataactacaaaagtttaggacgctttggtggaacagctaaattagtcaagcttaccactttagaaaaggaagccttgagcgggcttatgggaaaagattacagcaagcaatcttcagtaacaatttctgttaaggaatttgaaaaggctttagaaaaaacccgtttctctagtatagatttaaaaacactcttgttttcatatattggtgaaaatatcttaactaagtcagaagaagaagagaaatatgtaagaattaaagaaacgttttttcgagaattattagctaaatatcccgaaaattactgccaacactggctcaagtatctccaagctaatgaaatcgggactagaggagttaattcgtcctataaggaaaatcctgtattacttaaggaacagctaataaaagttctagaggcgatatgcaaattgccacaaaggactaacaataaaccaaatcggtattggcggttaccagtatttgcagatttagtaactaatgacccccacgcttttgatcttaatagtcagcaaggcagactgttaatttttgctttagggtatatccgcacactagaggacactaattatcagctgctaaataatactaattcagaagaaataaccgaacttttaagttattttggcataattcgtgatgatattcttaattttgttaccttttcgggaattatcgcttgtgatgaagctgctaacaaagccccagaatggtggcaaaaatgctgggaagagggtgtagtaatcaatgtccctttacgggaaatactcaaaagagatagcttttatccagccaacggaaaaaaagtagtttttgtagtcgaaaactcgggagttttttcagaaatactcgataaatttcctgatagaaacttaccacctttaatctgtactaatggtcaatttaaattggctgcattaatcctattagatcgacttgccaagaatgatgtaatcatatattactcaggtgattttgacccggaagggcttcttatggctcaacgattaaaaaccaggtatcctgctcaagtcagactatggcactatacagaagaggattataaaaaatcccaatcagaggtagccctatcagaaaataggcttaacaaattgaaaaatttaaatttagaggaattagctaaagtaaaggattatatggaaaaatctaaaatagccggctatcaagaaagattaatcaatgaacttgtgaaagatatagctggacagagattataa

SEQ ID NO: 51062 - DNA, 1536 bp, Streptomyces albulus ZPM; identical to SEQ ID NO: 50484

SEQ ID NO: 51063 - DNA, 1314 bp, Streptomyces albulus ZPM; identical to SEQ ID NO: 50485

SEQ ID NO: 51064 - DNA, 4158 bp, Streptomyces albulus ZPM; identical to SEQ ID NO: 50486

SEQ ID NO: 51065 - DNA, 1362 bp, Streptomyces albulus ZPM; identical to SEQ ID NO: 50487

SEQ ID NO: 51066 - DNA, 1524 bp, Rhodococcus sp. PML026
gtgaccgaatcaggcgaggacgcacggctgggtgccgcgaatgcgttcgtggaggaagaccgtctcggtctcttctcgttcgccgtcgccgagaaaagatccgaatacctggcagtactgcgggcgttcgacaccgctcgcgcgaactacgtggtgttgctgcactcgggcgaggtcgccgatctcatcgctcgtagccccgggcgtcacgacgcgctgaccacactggacatcgcacccctgctcgatcaactccacacctggggtctgctcgaacgcagctacgacggcacccgcgccgcgaccctcgccgaataccgcaaccggcacttcgtctaccagttcggtcaggccggctacaaggcctaccgcgcggtcgaggacgtgctcggtgcgcgcctggacgacgcctcgctgtcccggctggtgctgcccgagctgctggccgacatgcacgagctggccgaggcgaaccgtcaggccgacggcgaccgcatctaccgcaagctcagcagactcgattcgacgttgtcggagatggcgacccgcgccgcccacttctatctggtgctgggcgacctggtgcgcaccaccgagatcacgcccgaatcgttcttggcgcacaaggatgcactgctcacgcacatgcgtgagttcagctccgatctcacccgctatgcccccaagttggcggaagcgatcgcactcgtcgagagcaccggcatcgaggaactcgtcgaccgtgccgcgatcagcgacgaacgagtctttctctccgtcgacgaacggcgagcggactggaccgaccgatgggccgggttgtcgcactggttcgtcgcggccgaatccgagctcagcgaatccgagcgcctccgcgagggcacgatgagcgcgatcgctgctgtgctgtcactgctgcggcgcgtcaccgaaactcggaagggcggtgtgagtcgcgagagccaactgcgtcacctcgccggctggttcgctgctgctcccaccgaggacagcgcacatgctctgtttcacgccgtgttcggcctcggccgaccccggcacctgtcgatggtccatcccgacgccgacatcatccccatgtcccgatcatggtgggaggcaccgccggtcgagatctcgcgcacgctggccgagaccggacgcactccgactcccggcgttccagggcgggtacagcgcaacgacggcggcatcagacgactgcgcgagcagcaactcgagtcgcagcgatcacgcagtgccgcggcgcagtcgctcgcctcggccggaatccacgaccgcattctgaacgagcaggaaaccgaagtgttgctgagcctgctcaacgccgcgttgactgcccgggtacgcgtgagcggacgcacctcggactcgtccggatcggacagtggcgtgcgcctgacgctgagcgacagcgaccgttcgacgatcgtgcgcaccagccgtggccgattgcatctggaccgcctcgccctcgacgtcagtgaggtggcccgccggtga

SEQ ID NO: 51067 - DNA, 1416 bp, Rhodococcus sp. PML026
gtgagagcacgtgaaatctcctcgctcgctctggattcctaccagcgggctgcccgagtcgcgttgtccaaccacctggtcaccgcgacgtaccccgatcgaatcgcgttaccgctgctgcgcaggtgggcaaccgaactgcgtgaggatctcctggagctgttcggctaccgcttcgaggtcaccgagacgaccgcgcgtctgttccccgtgatcgatcgtctcgacgacagtcaacccgcgcgaacgccgtccgagcgggtgttcgaccgccgcaggtacgcgtatctggcgctggcgcttgccgcgctcggtcgggccggaaaccagatcactctgtccgaactcgccgatcacgtggcgacggagtcgagtcaggtggacggcgtcgaactcacgaccgaccgcgcgagcgaccgagacgcattcgtcgacgcgatcggatggctggccacgcgtggtgcgatctcgctggccgacggcgacgccacgggctgggcgaacaatccgacggccggtgaggccctgtacgacatcgaccgatcggtggtcgtcgcgatgtttcggccgccgcgtgccgtgcagcacctgcgttcgattcgtggcctgctggccggctcggatgccccgatcgatcccgaggattccgatctcggacacatcgagtccgggcgtgaggcagacccgaaggaaacgctgcgtgcggtacgccgagcgttggtcgaacaccccgtcgtctatctcgacgatctcgacggagacgcacgcaccgccctgaccgcctcgcgcaccgtcgccgacgtcgagttgctcaccggtctcgttgccgagcgtcgcgccgagggcgtggccctcatcgacacctcgggacggttgtccgaccaccgctttcccagcaccggaacgatcgctcaggtggcgttgctcatcgcgggagaaatctccgatcgggtcgtggatcccgacgctccggcgctcacaacgcatccgctacctgcgagcgacctactcgtcgaacagctggacgacgcgatccccggcggcggaatcttcggcgacctggccgatttcggatttcccgccgatccgacgacggtcgagaactcggctgagcgcacacagtacccgctgatcgaggacagttggctggtctcggtcgtcgacgatctcgtggaccgattcggtcgcacgttcgcggcgcagtggcagaccgaccgggatggtctgcgcatacgagcgatcgcgctgttgcatcgacttcggttgatacacagcgtgtccggcggcgtgctggtactgccggtgatcgctcggtaccgagacgtgatggtcagcgtgcgtgaccgagccccgcaggactcgctgttcggcaccgaacaagcccccagtaccgatccatccgaagtagaggcttga

SEQ ID NO: 51068 - DNA, 4185 bp, Rhodococcus sp. PML026
atgaccgcacactcgaatcgctttcggcccacgcgcgccggaatcgtcaacctgtgggactaccgggatcaggagttctccttcgccgacggtcgattggtactgcgcggacccaacggatccggcaagaccaaagcgctcgaagtgctgtttcccttcgtcctcgacggccggatcgaaccgcgccggctcaatccgttcgccggtgaagaacgaacgatgaagtccaacctgctctaccgagggcaggaaagcgcgcactcgtacgtgtggatggagttcggccgcggctcgcgcgaggaccccgaatcggtgacggtcggaatcggtatgcgggcgagccgtcacaacgacaaggtgacccgctggtacttcgtggccgacggccgagtgggcgtcgacttctcgttgttgggctccgacgaccggccgctcacgaagaagcagttggccgaacaactcggcagcgatgcactgaccgatcgtccggtcgactaccgcgccgcgatcgatgcccggatgttcgggctcggcgcgcaacggtacgaccagttgatcaatttgattctgacacttcgccgtccgcagttggccaagaatctcgatccgaaagggttgtcccaggcgctgaccgacggtctgcgtcccctcgacgagcaactggtgctcgaggcagcacgttccttcagcgacatggaggaagtcggacgcgcgctggagggactggcccaagccgatcaggcggccaggaacttcgtgtcggtctactccaaatacctttgcgtacaaacccgttcggacgtcgaacaagtctcgcgtcggctcgaagccgtgacgcacgcgaccaccgcacacttcgccgccgccgccctgaaggaccggcgtctgctggaacgggcggccgcagagactcgattcgacgaggccgagcgtgcgctcgatcaggccgtcgcggaccgggagaccctgcagcgctcgagcgcgtacgagggcaagcagcaactggacgatctcgccgaatccgctgcgaagctggaggtctcgacggcgcagcaggccgatcgcgcacgcaaagcgcaagcagaactggagcagcgcacggccgaggcggcccgggcggattcggcactccgggactccgttgccggagtgactcgcgcagaggacgagctgcagactgcggccgaggacgcgggcatcgtgtggacaccgctgcccggcacggcgcgcagtgatcagatcagtaccgcgcttcgtgggcacgccgaggaacgggacggcgacgtacgtgcagtgcgtgaggcgctggccaccgtcgagaaggcgtcgacggaacgcgctcgcgcggagaaggccgcaacgaaggcgcgcgagttgctcgaagcagccgcggctgccgtcaccgaggccgaggcgacggtggacctggagaaggcgcagttcgcttcgggcctgcgggcctggtggtcgagcaactcgtcgctctactcctccgcgggcatcacctccgctgtgttcgaggccctcgacgcagccctggcaggcatcggcgacgacgacgccccgagcctggaatccgtgctcgccgagcagacctcggacggtatcgacgcgattcgcgcccggcaggcacaggcacgcgtcgacgtggccgcgcgcgaggccgaggtgaaggcgctgcggggcgaactgtccctggtaagagccgaacacgacgatgccccaccaccgttcgcagcgcgcaccgacagccgagcagatctcccgggcgcaccgctgtggcaactggttcggtttgccgatgcggtctcctctgccgacgcggcggggatcgaatccgcactgcaggccgcgaacctgctcgacgggtggatccacccgaccgcagactcccccgtcgacgcgacgtcggagcaatatctgtcgccgctaccggtggccgcgaggccgaccgggtcgacgctcgcgtccgtgctggaacccgagcccggtactgccgtccaggaatcgcgaattctcgatgtactgaattcgattgcattgcagcaggatcgaaacgacccctcggacagttctgtctcgataggcgtcgacggtcggtactggcagggagtgcagcagggtcgccacgcaaaaccggatgccgagtacatcggtgccacggcgcgggcgcgtcggcgagagcagcgcatcgccgagctcggtgctgcgatcgattccgcgacagccgaactcgcgaccgcgaccgccgccgagctggcggcacgcgagctggtgcaggcgttgaacgcggccgccaagcagctcccccgagtctcggccatcgtgaaggcgcaacgtgccgtcacggcagccgcaggcgcgctgcgcacctcgaaagatgcgtctgcagcggcagacagagaattcgaccaggcgatcgccgacctgtccgcgaaagagaaacaactgcgctccgtcgccgtggcccatcgcaccccatacctgggccgcgatgtcgatgccctcgccgcagcgattcgccatttcgagcatcagggcgcagcggtcatccgtaaacgcagcgaccacgcacgcgagaccgagcgggcgcgcgaggccaccaaccgcctcgaggaggccaccggactggccgaggaactcgccgaggaagccgcgatagccgacgagagctatcggcaacagctgcagcgtctggaattgctgagcgagaaactcggtgccacggccgaacagatcaacaccgatctcgacaacgcgcgcgatcgcatcgagaagtgccgagccgagcagcgagcagcccgaaaggcggacaaggaagccggcgaggcgatcggcaaggccgagggtgcatgcaacacggcgctcgagagcctgcgcgccgccgtgaccgagaccctgggtgatgccgtccgactggcaccgtacgcccgcaaggatctgctgcacatcctcggcgtgcacgagacgtacacgtggccggccagcgactcggcgtggctgacggtcgaacagatcctgtatcgggttcagcaggccgccggccccgacgacgacgtcccggtacttccaccggtggtgctcgcgctgcattcggctctcgacacggcgacggcgtcggtgaaagtgagcgactcgagccggaagtcgacacgaacggcgctgacgagcgcactgcaggagttcgactcgcaactggccgcttccggtcaggactaccgcctgcagtgggacgcaccggacgggttgacggtggtacgcgtgcaggacgagcagggctattcctcggtcggagacttcgccgaccgcatcggtgccgccagggccgaccaggaactgctcttgaccgagcaggaacgccgaattctcgaagacgcgctgctgaccgggttggcacagcagattcacgagcgcaccgtcgacgcacgcgagctgatcgcccagatgtccgccgagatgaagcaacgccgtatgtcctcgggcaacacgatcggcgtgcactgggtgctcgcggacaacctcgacgacggggcgcgggcagtgtccaagctgctcgaccgcgatgcctcggcgctgagccaggacgatctggccgcgatgcgcgcacacttcgcatcggagatcaggatcgctcgtgcggcacatccggaacggtcgtatcccgagatcctgtccgcgacactggactatcgccgctggcgggtgttcgcgttcacgctcatcagcggcgacggcaacgaggatcgtctgaccgtcgctcgtcacagtgcactctcgggcggtgagcaatcggtgtcgctgcatttgccgctgttcgccgcggcgcacgtgatgctctcgtccgccgatccgcattcaccgcggctgctggcgctggacgaggcgttcgccggtgtcgacgacaacggtcgtagcgaattgctcggactgagtgtgcaattcgacctggatctgttcatgaccggttacgacctgtggatcacctacgcggacgtccccggttgcgcacactacgatttggcgcactcgaccgccgagaacaccgtcagcgcagcacttctggtgtgggagaacggtgaattgttcgccgaacacgacggcaccgacctcgcagccgccctcggatcaccgttgacccgccgggtgccgacccgaaccgaaggtgggctggagtttggccggtaa

SEQ ID NO: 51069 - DNA, 1239 bp, Rhodococcus sp. PML026
ttggccggtaacagtgagtggcgaggcagcgtcgaattggcggcgctgttggacgctgcgcgaaagaagttggagtccaactggcttcgtgtcggcggcaacatcaccgtcgacctgagtgatgcgccggaactgtggcgtctgtgcagtgccatctcgaagtccaactccagcctgcactctcgggcacggagcacccggctcgatctcgagcggttcgacgcgtggttgagccatccgctcaacggcggtatcggtctgatcgacacccttgccggtcaggcaccactgcaggacaagaagcgcattgcggccgacaaggctcaggtgcgcgccgatgcgctcgatcgggcgcgtgaggcgctcggcggtggtaccgatcgcgagtggatcgagcactggatcgcgtcgttgctcaatcaggacggcaccctcggtggccgcgtcgccgtcgacgcgctcggggtcgcaacgcaagtcctggcgctgctcccggtggacgggatgtcgctcaccgagctggcggaactggccaccggtgataccaaggccctcacgggcggcggtgccgcgaaactcgtcctcgatgcattgtcgttgcgcgagaacgtgcctcgacccgtcgatccagtggggatcagagcgctgtgggaaacggccggggtgtcggtcgacgccgtgtcgagccgggtactggttctcggctaccgcgtcgtagagacccacacggtggctcgctggctcaacgaagcagccgacgagggcgtgccctttcccgtcaccgtggacatgctcgcgcgcggccctctcaccaacagctcgtcgaccgtgttcgtgtgcgagaacgtcgctgtgctcgcggccgcagcccgctctctcggctcgaactgtgccagcttgatctgcaccgacggtcagccctcggccgcagtgcatcggctgctggctgcgcgcgcccccggcaccacgatcgaatggcgtgccgacttcgactgggccggaatgcacatggtgacccgcgcactcacccggtacgacgcggtgccgtggcgaatggacgtcgactcgtaccgccgcgcactggacgcgcgcaactcggaaccactgaaggggcatcccacggacactccgtgggacccggaactggctgctgcactgcgggattcgggacgagcggtcatggaagaacgcctgatcccggatctgctggcggatctacgcctggggcccgcggactaa

SEQ ID NO: 51070 - DNA, 1629 bp, Streptomyces sp. MUSC164
atgggagcatcagcatccggtgcaggtcaggacgccgacgaggaggcgtggcggcgactgaatgcgtatacctacctcagcgcgcccgagcggctggagcatgtcgcgatcatgcgggtcttctgcggaacgctgctggcggatctggccgtcccggacatcatggcgaagctacgccagagcggtggttccgccgcggggctcgacgccgacactctcacagtccggctggaacagctggtgacctggggaaacctgctgcgcagcagccacaccgtgaaggcgtccagcatcagcgagtaccagcgttcccgctcgcgctaccagctgtcgaaactaggcgaacgcatccagcgggacgccgacggggtcctggccaaggccgacgccgcccgcgaggtgagcagcgaactgctggccatggtcgagcgcggcctgcgggagctggccgacctcgtgaccgcgccgggcggcatcgagccgcaggacgggctggagcggatcagcacgctgttcgtgcagttcagcgagttcgcggactccatacgcgacttctacgcctacctcggccaggtgctgtcccgctacgacctggacagcgccgagtaccagggcttcaaggaactgctcctggactacgtcgaggcgatcaccgaggacgtggcgttccgcgcgccccggatctcggcggcgctggacaccctgtggccgcacatcccggctctgctggaccggctggacgcccacgcccaggggctcaccgggctgtcggcgcagggcgaaggccgcctggaggtccgggtgcagcgcagccggggacgcgagctcgcggactgggagggcctgcgcggctggttcagagacaccgacggtcagggcagccaggtcgagcagttgcgggacgccaccctgcgagcgttgcagtcgctgctcgccaacgccaagcggatgctgcggtcggccaccggggagatgtcccggcgcaaggatctgctgcggctggcccgctggttcgacgaagcggcaccgcaggacgcacacgacatcgccgtcgccgccttcggactgtacggcgcccgccatctgggcatacccccggccaccgaccaggtggtacccgcctacacgagctggtggaccggtccggtggtcgaggtgccggtggccctgcgggagaggggcagccgcgcgcagcggggccgggcctccgcggtggaggaccactccgcgcagaaggagcggctgcgggaggccgcccggcagcgggcgacggccagggcagcggcagcggacgaactgcgcagcgcatcgggtcggttcgccgacgtacgactcacctcggctgcgctcgggctgctcctggagctgctggcgacggcactgggaaacgctcagctcaggaggcgcgccggcgcggacggggaggggacagcggggttcgacctggactcggcgagcagcgaggacgctgaactgggtatccggctcaccgtgcgccggacggagggcacccggacggtgctggactcggcagacggcgacctgctgctggacgacttggagttgaaaatcggtcgtacctcggcggcggccgatggtgaagcggaggcggaggtgagcgtgtcatga

SEQ ID NO: 51071 - DNA, 1326 bp, Streptomyces sp. MUSC164
atgacccttccctccactcacgacgtagccctggcagccgagcgtcgaaccgccgcccggctgctgctcgcccatcccctagtcgcggccgacggcccgcatgccgacctcttccctctgatccgcaggcacgccgactggctgggcaaacggttccagcaggtgctcggctaccgcctgctggtcgacagctccttcgcccggctgttcaaggcggggctgggggcgggatcgggacaccggctggagcgctccaccggcacgcccttcaccccgcacacgtacgcctgcctcgcgctggccctctccgtgctggtgaccgcccccgagcagatgctgctgtcgcacctggtcaccgacatcagggcggctgccgccgacgcggggatcgagctggaggagacgggccgggcggccgggaagcgaaccctggtagcggctctgcgccagctcgtcgagtggggcgtcctcatcgagaccgagggccaggtgaccgcgatcgcgcaggaggcgggcggggaggccctgatcacggtggaccgggagctggcgcgcgtggtcgtcgccggcccgctcgcaccggcccgggacggcgccgacctggtccgacgggcagcggacccggggttcagcgggccgcgtacctatgtgcgccgaatgcttgtcgagacacctgtcgtccacctcgacgagctgaccgacgccgagcgcgactggctgcgcacccggcagcgccgggaaggtcaggctttctccgaactcctgggcctggagatggagatccgcgccgaaggcgtagcgctggtggaccccgaggaggagctgacggatctgcacctgccgggcaccgggacagtcgcacaggccgcgctactgctggtggaacggctcgtggagcggcttcggccccaggaaccggggcatccggcgaccggcggaacgctcgtcatcggggtggctgtccaggacggcctggtggacgaggtgctcgccgggctcatcgccgagtacgggcagcgcagcaactggcagcgcggctacctggaggacctccccgccctgcgggaggccgtgctggacatgctggtccgtatgcggctgatggcccacgccggacggctgcgcgccgagggcgaagggctgccggaggggtacgtcgaagatgtgtcggaaggacgcacggtgaccgatgtccatggcgcacggcccagcggcgacggctgggtgctgctggccgcagcggcgcgctacgccaccctcgtgaccgtgcgccccgctgcgacagcgtgccaaggaaccgacgtgcaagaggagttgccgctatga

SEQ ID NO: 51072 - DNA, 4257 bp, Streptomyces sp. MUSC164
atgaccaccgacgcgcgtggcctcgttccgctgccgcgttccggccctgcgacaaccgccgcccccgcgacgaccaccggcacccgtttccggctgcaccgggcgggcatccagaacgtctggcagtacgacactcaggacttctccttcggcgacggacggctgcttctgcgcggcaagaacggcgcgggcaagtccaaggccctggagatgctgctcccgtatcttctggacggcgactcccgggcactggacgcgaccggcaccggccgcaccactctcgcctggctgatgctggacgggttcgagcagaccaaccgtctcgggtacctgtgggtggagttccggggcacgaccgacgacggcagccaccgttttctgacactcggtgtcgccatccgtgcctcgaagtcgacgcagaaggcgctgccgacgttcttcgtcacctccctgcgggtcggtgaggacctgcacctggtcgagggcggaaagccgctgccggtcgaccggctcaaggagattgtcggctccgacaacacgaccgagcgggcggtcaggcaccgctcccgagtggcccgggacctgttcggcatcaccgacgcgacgcgctaccgcaacctcacccagctcctccaccggctgcggcgccccacggtcggggaccgcatcgagcacgggggcttggcctccctgctcagcgagaccctgccggggctcgacgaggacgtggtcgagcaggtggcacgcaacctccacgacctcgacgccgtacgagacgaactcggccgcctggaacgcaccgacacagcactgcgcacgttcctcaccagttaccgcggctacctggccggcgtcctgcgcgcctccgcgcagcgagtgagccacgagctgggcgtcctcgcacagcggcgccgggcggccggagacgccgcacagcggacgagcgacctgcggacgcaggagcacgagtcaaagggccggttggagaccctgcgcgacgaggaacaggccgcccggaccgacctggccgccctgcacgctagtcacgcctaccgcagcctgcgcgaactgtcggagcgccgcggcacggtggaggcgctgcacaccgccgccgtggccgcgttcaccaccctgcgcaacgcccacgacacggaggagagcacggcggaacggctggccgaaggggtcgaccacctcgggagtcggctggccgaacttggcacagaacacagggagttgctgacgcacgcggagaaggctgggcttcccaccggccatctcggcgagacggtggccctgtcacgcacggtcctcgccccggccaccgagacggagctgacgactccggatggggagacgcgcaccgtacggcaccggtcggcggcccgggcggacacggccaccacacaggaaggactgcggtcctggcagaaccagctggaggatgccgagacggtcgcgagaaaccgggcccggatggtccaggaagtgacccgcctcatctcacgggccgacgcggcccgcgccggagcggctcaggccgatgccgagcgggaacggctggagggcgaggcggaagaggccgccggccgtctcgacgtcagccgccagaaggtcgccgaggagagcggcacctatgcccgccgcgtcgctgagtgggcggcgcacacgcgggccgcgttggggcccgactgcccgccgctggacgccgtccattccacggtcggccacgagacctccgccgacgcgccgttcgcggaccgcacgctgccacccgacatcgacagccaggcgtggcgaaccgctcaggccgcactcgaaccgtacggcgaggaactcaccggacgccgggacgcactggcgctcagcgtcggccgactcgatgaggaacttggccgcctgacggagcagaagcgggactgggagcaacgtaccgaccctgagccgtcggccccgcaccatcgcgtcgccgagaggacgccgggcagcggagcccccttctaccgcctcgtggacttcgcggacgacctggcaccggccgaccgggccagtctcgaaggggcgctggaagcgagcggaatcctggacgcgtgggtaagcgcggacggtgtccttctcgacccccgcacccgggacaccctcctccagcccggtcccgtgctgtcggatggaccgactctcgcttcggccctgcgcccagcccctgaaccggagtgcggcgtgacgtccgcgcgcgtggagcgtctgctggcctcgatcgcgctcacaccggcagcgcacaactccgcacacaacgcggtctaccacgacggcagttggcgtctgggtgtgctcagcggccgtcatgacaagggcgacaccgagtacgtgggcgccgccgtacgcgccgggacccgacggcgcatcctcgctgagctggaggaacggatcacgcagacggaacagcggctggccgacgtccgcgaggaactcgccgtaaccgatgcgatgcgtcgggctctcacactcgcggaacgggacttcccccgggcacaaaatctcgcgaacgcatggagcaggaccgaatcagccgagaggaccctacgtgacctgaccacaatggcgacccgggcggcacggcaggccgaggaagcccgtgctctcgcggtatcggcgcgtgccgaggcggacgccaccgcgaccgctcacgacctgcccagcgaccccgatgccttggaccgcattcgcaccgcactggctgccttgttcagcggtgtcgggcatctacgcagggcggtcggcggcacgggcgagcggctcggcgcgaatcagacggacgccgaacggtacgaacgtgcccgagaggatcgcctggccgcggaggagagctaccgggtccacctcaccggactgcgcaccgctgagcaggacctgcggacccgcgaggaggccatccggtcgtccgaggaggaaattcttacccgtgagcaggaaaccaagctgcgcatcgcgaacgccgtccgcgccctgcctggggcgcaacgagccctcgatgacctccacgacctgcgcgtgcgcgcggaagaggacgagaagcgtctgcgcgggacgctggcggaccaggagacggcggtcatcgacaccggcagcgctcttcgcggtgctctcggccgaccggaggtggtgctcggcgccggccttgaccggtcctcgctgcccgagtacgtgtcggacgatcccagcgtggacgtccgcagccgtctgcgcgcgctgcgggccctcgccggggccgtggagcaggcactcggccgcccgaagggcgaggtatcggacagcaccctgctcaaccggcacaccgatctgcgcgaccaactggccggcgggttcgacgcgcagctggaagaacgcgacgggatcaaggtctgccgactggtcgacgaccacgggtcccatgacgtcgcggccgtcggcgagcggatcgcggtccaggccgcggaagcccggggacggctcaccgaacgcgagcgtgaggtgttccagcggttccttaccggcgaactcggcgaccacctctcggcacaggtcatcactgcggcgaacctggtcgcggctctcaacgacaccctgcggaccgtgcgcacctcccacggtctcggtgtcgagctgctgtggaagctggacgcggacgtggacgcggacgtccgggcagccgtggacctgctgcgcagtccgtcgagcctccggacgcgcgaggagaccgagcagctgcgcgaagtactgcaacgccggatcgaggacgcccgacgcgccgacccatcagccggttacgccgcccatctgcggaccgccctggactaccgcgactggttccgtttccacaccttcgtggttgaggacgcggcccctggccgccgtaggaagctgaccggccggaccgggctcagccagggcgaacagcgtgtcctctcctacctcgtgctcttcgccgcggccgccgcccacttcacgagcctcgccgagtcggcaccgcacgcgccacgcctgatcctcctggacgacgccttcgccaaggtcgacgagccgacccatggccgactgggccgtatcctcgtcgacctcgatctcgacttcgtcctcaccagcgaacggctcatgggcaactggcccgaggtgccgtccctgcacatctacgagtgcctccgcgacccccatgtgcgcggggtggccaccctgcactacacctggaacggtcggcaccggcgtctggtgtccgtatga

SEQ ID NO: 51073 - DNA, 1275 bp, Streptomyces sp. MUSC164
atgaacggactgccccccgcgacccgcgactggctgaccggaccgggactcacccggctctgggagggcatacgcaaacgcctggagagcaacggtgtacaggccaccggttcgctccggctggccgcgctgaacatccaggaacgcaacgacctgtccctcctcctgggcaaacccctcaccggtggcgccgtgaccgtacggctcgacgtgctagacgcacggctgcgcgcctcggccgccggactcggcctcagggacaccctggaggaactcggcccgcccctcaccgaccgccgtgccgtccgcgcggacgcgacggcacggcgggagcaggtgtggtcgtccctcgcgtcgtctctggacgcctccccgctcgccggccaggaatggcccaggcggtggtacgacctgttgcgccgggccggggttccgaggggagtgacgcacgatgcggcgatctggacactccagcaggcggtccaagtcctcgccgttctcctcggtcctgaacgtagcggcaacgccctcggccgaggagaactcgccgccatgacgaccggctcggcgcacggcctggacgacggcacttggctcgcacgcctcgtccaacgcggtgtctccctcgcccatggcaccgagttccccgacgacgcggccggccgacgcactctgtggcggctggtgtccgtaacgccggacgaggtctccagcacagtgctgacctacgggctgcgccccgctggcgagggctggcgggagtgtgccctgcgggagcgggccaagcatcacgccgaaacgcacctgacgccgcgcgacctgcactccctgcggctacgtctccccgccgcaacgctcatccacatctgtgagaatccgcgcgtggtggaagccgcggcagacgcggcctgcgtccggcccctcgtgtgcacgtccggcagcgccgcaacggtggtcgtcacgcttctcgacgccctcgccgccacaggttgtcgcttcgcctaccacggtgacttcgactggccaggaatcgttctggccaaccgggtcatccgcctctacgacgccgtgccgtggcgcatgggcaccgcggattacgagcacctggccgctcgcagccaggctgagggcatccctcaattggcgctcgacggccagccggtcagcgcggactgggacccggatctcgcccctgccatgacggccctcggcgtcgcactccacgaggaggccactctcgaccttctggtggacgacctgtcacgtcacacgtag

SEQ ID NO: 51074 - DNA, 1554 bp, Streptomyces mangrovisoli
gtgcgcagggtgccgccggaaatgttccggttcacgacggtggagaggtccgatctctacggagcggtgctcgacgtcttcggtgtggccggcgagcacctggagacggcgctgggactcgacgcggtacgcgagcgactgcgccaggtgggctgggtggcggtcgtcgaggacgaggatctgcacgaggcgctcaggaagctcgtgcagtgggagctgctggacgtggtgcacaaccacgcggagcactaccgcacggcggaggagtacgagcggcgcaacctgcagtattcgctgacccgccagggtgaggccgcccttgccggtgtgcggcacgcgcttgaggtgctcacttccacgggggcgctgcagacggcggtgctggaggcgatctccgaccgtctggacgagttgtgcgtgctgagcggcgagcccgccgcggcggatcgccgggtcttcaccacgttgcgggaactggaggggcatctggacgccctggtggagaacaccaaggcgttcaacggcgaactgcagcgcctgttgcgcgccgagggagcggatctggaggtgtttcgcgaggtcaaggccgccaccgtggcgtatctgcaggagttcctggtcaacctggaccggcgggggcaggccgtcgccggggccgtggaacgggtggaggaacgggggattgccgtactgcgcgagcgggccctgcgtggggcggagttgccgccggtgaccggggcggatcccgcggccggctggctggagggcagaagggcgcgctgggcgggtctgcgggcatggttcctgccggacgacggcgcccggccccgcatcgagcagctgcacgacatcgcccgtcgggccattgtctcgcttctgcaggtgctggagcggatcaacgagtcgcggcggcggtcgtccagcgccgtgcaggatttccgggaactcgcgcgctggttcgaggcggctcccggcgaagaggatctgcaccggctgtggtcggcggccttcggcctgggtgcggcacgtcatgctcacctcgcccatctggacccggagttgattccgtcgtcccactcgtggcgcgatgcgccgccggtggaggtctcggccctgctgcggaccagtggccgcacggagcggttcacccgcacggccaaggtgcgggacgtcgcggccgtcagggccgagcgcgccgagcgggcccgtgcggagcgaaccgaactcgccctcgcctggcaggtgctggagaccggcggacctgttcgcctgtcgtcgttcggatcgttggaccccgctgttttcgaccgcctgctcgacctgctcggccgcgccctggccgccaggccggacgcgagcgggctcaggcgcgccacgaccggggacggccgcgtcgagatcgtgctggtgccgcctcccgacacgagcagtgccgtgctgcacaccacgaagggctcactgaccggaccggactacgtcgtccagatcacggcggcgggcggaccgagcgccgttccggcgttgcgggccgcctcgcgggaggtggcgggatga

SEQ ID NO: 51075 - DNA, 1353 bp, Streptomyces mangrovisoli
atgagtaccctcgccaatcaactggccgccgcggaaagggaagaggtcgcccgcgccatccggctgctcctggctcatcccctgctcaccgacaccgtcgacccggccggattcgagctggtacggcgtcggcgggaaccgctggcccagtggttcgactacacctgcggctggagcctggtggtggagccccgccgtggctacgcccgcctcggcaaggtccgcgccgacccggacgcctcccgcccggcccgcagggtccgttccggccgggccccgttcgaccggcgacgctacgtgctgctgtgtgtcaccgcggccgagttgctgtcccttccgatgaccaccatcggcatgctggccgaccgcgtcgtgcaggccacggccgccgaccgtgccctggccgcgttcgacccggtccaccggtccgagcggatggcattcgtcgacgtcctcaagctgctggagtcgtacgacgtgctccgtgcggtggacgggacgaccgaaacgtacgtcgagtccgccgaggccaaggtcctctaccgcgtggacaccaccttgctgatgcgccttcccgcggcgcccgtcggcgcctcccgactcgccgtaccgcccgaagaggtgcccgctcgtttcggagagctcctcacggcactggtgagggagcgccgatacggcggcacgaacacggccctcgacgccacggccgacgggacgcacggcgagagaaccgccaccgacgcacagcgcaatctgcggctgcgccactcggtgctgcggcgcctgttcgacgatcccgtgctctaccgggcggatctcggcgaggacgagctggcctacgtcacgtcgctgaccggacgtcagatcctgcgccgctcggtcgagcaagccggcttcctcctggaggagcgcgcggagggcttcctgctcgtggacccggacggcatcgccaccgacgtccgcttccccgacgacacatccaccgccagggtcgccgcactgctcctgctggagccgctgtgcgccgcgcccgccggactgctgcccgagcagctggccgaggccgggacaggactgctgcgccgcttcccgcgatgggccaaggcctatcagtccgacgacggccccctgcggctgtccgccgacgcggtgcgcgtcctgcgcgatgtggggctcgtccgcacggtcgagggacgtgtcgtcgcctgcccggccgcctaccgctatcgcctgacggagatgaagagccgggagccggacgccgggccccagcgggagcgggacgggcgcccgccggacaccgcaggcgaggcagccgccggcgccgatgtgctggaaggggatcagcggtga

SEQ ID NO: 51076 - DNA, 4158 bp, Streptomyces mangrovisoli
gtgagtgtgacggagttgcccttcccgcggcgaccggagcccgcacagccgcccgcggcagcggccggcacggtcgatgcgacgggcagccgctggcagccgcaccgggcgggcatcctcaacgtctggcgttactacgacgagaccttcaccttccaccagggacgcctgctgctgcgcgggcagaacggatcgggcaagtccaaggccctggagctgctgctgcccttcctcttcgacgccagcctgcgccccaaccgcctgtccacgttcggcggttcggaacgcaccatgcactggaacctgctgggcgaaggggcgtccggaaaaacgcgtgtcggttatgtgtggatggagttccgccgcatcgacgatgacggcgcaccacggtggttcggctgcggggcccgcctgcaggccagtgtgcacaccagcggggtgcacgccgactacttcacctccggtgccaggatcgcgcaccccaccggtgtccttctggtcaacgaggccggtcagccgctgacgcgcgcagcgctcgcagagtccctgcgtgaccgcggcgaggtccacgcttcggccgccgactaccgtacggccgtacgacgagagctgttcagggggatgggggagcagcgctacgagtcgctggtgtccgctctgctccagttgcggcagcccaaactgtccgaacggctcgatccgtccctgctctccacgctgctgtcccgcgcccttcctccgctgggcgacggcgagatcgctgaactggccgagggcttcgaacggctggaccgccagcgcgagcacctcaaacggctcgacgacgaggtcgccgcggcggagaccgtcgcatcccgccagcgggcctactcacgacgcgtcctgcgcgccggctcggccgccctgatctcggcgaccaccgagatggacgacctcacccgggccgcccggcagagcgcggaggacctccaacaggcgctggaggaaagagagtccgctcggctccggcacgaggaacagcagcttcgcgcgcacgccctgcaggagaccgtcgacgctctgcgcgagagcgacgcgtacaagcagggtgaggaactcgaccgcctgcggcggcacacggaggaggcggtggccgccgccgggcggcagcgcggcgctgcccgggccgcccggaacggagcaggtgaggaccagaggcaagccgacgaggcagccggccaggcccgctccctcgacgcgcacgcacgcgaaaccgccgaggaggcgcgacgggcggcacgggcggcgggcatggagtcgatccaccgcgaggtgacgacgctgctcgacgcgaaccgggcggcagaacgcgccgaccgtgcgcaggaggacgcgggcggggcccggcccgcggggtcgagcggtgcgcgcagtgcgggtgagtacggggcacggcaggcacgatcgttgctgcggggcgcggtcgccgcgcggcgcgagcaggtgggcctcatcaccgaggcgatggacggccacgaccgcgccgtgcgggacaggggcgctgccgagggcctgctggaagaggcccgcggccggctctcggaggcgatcacgaggcgggacgaggcgtccggggcgtgggacgccgccctggccgaccatacggaacgcctcctcgcctgggccgacgactgcgcggaactgcgtattgccgacctcgacgagctggcggcctcggccgggaccgagtcggaggtgacggcgctggtcgaaggtgctgcccgaccggtggagcaggagatcgccacctcggcggcccttgcgacggccgcgcgtgcacaggtgcgggacgagcggagccgcgtcgaggaggaggtccgacggctgagcggtgagagcgacctgccaccggtgcctccggcgacccgcaccaccgtccgcacggccacggcgggcgcgccgctgtggcgcctggtcgccttccgggaaggtgttccgcttgccgttcaggccgcggtggaggcggcacttgaggcatcgggcctcctggacgcctgggtcagcccctacgacgggatcacgctgccggggcacgacacccgggccgaagcgacgctggccctggccgccgccgggcccagtctgctggacgtgctccaacccgaggacgacattcccgtcccggtcgacaccgtgctgcgcatcctcgccggcgtcgcgtacggctccacgcttcccggaggccatccggcggcggtcggtgccgacggagcctggcgtctcgcgctggccacgggaacgtggagcaagtcggagcccgctcacatcggcgccgtcgcgcggctgcgggcccgccggcgcaggatcggcgagctgtccgaactcatcagcgaggcgaacgcgaggattgccgcgctcgacgaccagctgcgcggcctcgacgcgcgccgggaggggctgaaggcggaccggcaggcccgccccgaccaccgtgagctcgacgcccgccgacgtgcctgggagcgtgccgaggagcacgtggccgcccgtgacgacgccgtacgcgacgcggccgcccatgtggcgcggtgcgagtccacggtgaccgacgccctgcgcacgctcagccgccgggcggcagaacacggtctgcccaccgatcgggtccggttgcacgaactctcccgcgacgtcgaggggttcagggaccgcgccgacctctgggtggatgcccggcttgccgcgaccgccgcggcccaccggtcccgtcagatcaccacgcaggcagaacgcgcgcaccggacggccgagaaggagacggagaaggcggcagccgccgaagccgaggcggtggggctgacagcgcgacttcaggcggtggaggccaccgccggcgaggactaccggcagatcgtcgcacgcgtcgccgaagcgcgggccgaactgacgcgctgccgtgaggaggcgggccgcgcgtccgagctcctcctacgcctggaaggccgtatcggcgggctgcgcgccaccagcggacaggacgccgagcggcgggaacgagccgtcgccgagcgtgaccgtgcggcacaccggttccgacacctgtgtcttgtgggtctcgcggaggacgcgggcctcccgctcgaacccgacgccggtgacggcacgaaggccaccctggaggcggcccgcgccacggcggcgagatggccgacggttccacacgcgccacgcaacctgggggacgccgcgacccgcctgtcggaagccgtccacgaagcccgtcagcgcctgggcgcccgcgccgacctggacctggaacccgacgacgacacccagctgttccacgccaccctggacggcctgcgcgtgggggccaccggcctgctcaccaccctcgcccaggaacgcgaccgcagccgtgacgacatcaccaccgccgagcggagcctcttcgaccagatcctcaccggcgacatccgccgccacctcgccgcccgcatccgccaggccggcgaactcgtcgaccgcatgaacggtcacctggagcgggtgcggaccgcctccaacgtcgccgtccagctcgtctgggatgtccgccccgatctgccggacggcacccgtaccgcccgtcagctgctgctcaaggaccccggccgggtcggcgaagcggaccgggccgcactgcactccttcttccgcgcgcgcatcgaggaggccaagggcagcgacacggcagcgagctgggaggagcagctcggcgaggtactcgactacaccgcctggcaccgcttcaccgtgcgcctggaccgggcgggcggcaccggctggcagccgctgaccaagaaactgcacggcgcgctctccggcggagagaaggccatcgccctgcacctgccgctgttcgccgctgtcgccgcccactacgaggccgtaccgcttgctccgaggcccatcctgctggacgaggtcttcgtcggcgtggacaccgtcaaccggggacaggtcttcgccctgctcaccgctctcgacctcgacctcatgatcacctccgaccacgagtggtgcagctaccgcgagttgccgggcatcgcggtccaccagctgctcaccgacggggacgacgacgccgtcaccagcgcccgcttcgtctggaacggcaccgacctggaggcgcgatga

SEQ ID NO: 51077 - DNA, 1506 bp, Rhodococcus erythropolis
atggtggaagaaacgagtgcgcccgattacgccgcgtacgccgacaccaatcgactgaagctgttttcgttcacgatcgcggaaaaacgggccgagtacctctgggtacttcgtgccttcgaccatgctcgcgccaactacaccgtcctgctgcatgccggagccgtcgcgcaaatcctcgagaagatcggtggatcggatccggcggccgatctgtcggcagcagaggtcactcccctgttggatcagctccatgtgtgggagatcctcgagcgcagctacgacggcacccgcgcggccacgctggccgagtaccgcaatcgccacttcgtctaccagttcggtcaggccggataccaggtctatcgatcagtcgaggacgttctcgccgcacgcctggactcggcctcgctctcgcgtctcgctctgccggacctgctcgcagacatgtccgaactcgccgaggccaaccgaagctccgacggcgatctgatcttccgcaagctcaagcgcctcgactcgacactctccgacatggccgatcgagccgcgcacttctatctgaccctcggcgacctcgtacggaccacggagatcactccgcaggctttcctcacgcacaaggacgctctgctcacgcacatgcgggagttcagctccgatctggcgcgctacgcccccaagctcaaggaagcgatcgagcacgtcgaatccaccggggtcgatcgcatgatccgcctcgccgccgccagtgacgaacgggtgttcgtcccgatcaccgaacgcgaagacgactgggctgcgcgttggcgaggattgaccgcctggttcgtctccgcggaatcggggatcagcgagtccgagcgtctacgtgagggcacgatgagcgcgatcgccgcggttctggcgctccttcgccgcgtcacggaaacccgtcgcggcggcgtcagccgcgagagccagctccggcacctcgccggctggttcgccgccacgccgtccgaagacgcagctcatgctctgttccaggcagtgttcgacctcggccgtccacgccacctctcgatggtgcatccggacgccgacatcatttctcactcacgttcgtggtgggaggcaccgccggtcgagatcgcgcgaacactcgccgaaaccggccgcccgccctcaccaggattgccgagcaaggtcgcccgcaacgacggcagcatccgccgcctacgcgaagagcagttggcagcgcaacgtacgcgcagcgccgcggcgcaatcactcgcgtccaacggcgtctatcagcgtgaactcaacgagcaggagaccgaagttttgctgagtctgctcaatgcagcactgaccgcgcgcgttccggtagtgggacgcgtcaagagctccaccggtagtgagaacggggtgaagctgacgctcagtccctcggacggttcgaccaccatcaagaccgcccgcgggcgtatgcacctcgacggcatcgaggtcagtgttcgatga

SEQ ID NO: 51078 - DNA, 1443 bp, Rhodococcus erythropolis
atgagagctcgcgagatcacgccccttgccctcgactcgtatcaacgcgcggcgcgagtgatcctgtccaaccacctgatcacctcgacgtacccggatcgaattgcgttgccgctcttgcgccggtgggccaccgagctgcgtgacgacctactcgaactgttcggctaccgcctcgaggtgacggagaccaccgcgcgcctgttcacggtgtcggatcgactcaacccgtcggcaccggcccgaactgcctccgagcgaaccttcgatcgcacgcgttacgcctacctggcactgtgcctggccgcgttgggccgcgccgggaaccagatcacgttgtcggagttggccgatcacgtcgcggccgacgctgcacaagtcgacggcgtcgaactctccaccgatcgtgcgtcggaccgcgacgccttcgtcgacgcagtgggctggctcggcgtcagaggcgccatcgcactcgccgacggtgacgcaaacggctgggcgtccaatcccgaagcgggagaagcgctctacgacatcgaccgttccgtcgtcgtagccctgttccgtccgccgcgcgccctgcagcacctgcactccatccgcggactcctggccacggagacctcgagcgctgccgaggacgacggaattcctgtggacgcgaaagagatcggacgccgagtgcgtcgggcactggtcgagcggccggtcgtactggcgggtgaactcgatcagcacgaattgatcgccttggcgcagcccaagaccgcgtcggaagtcgaactactgacggggttggtggccgagcgtcgcgccgagggaatcgcgatgatcgatcccaccggtcgcctctccgacgtccgcttcccgagcaccggaactatcgcccaggtagctctactcctcgccggcgagattgccgaccgcgtactcgacgtcgacgctccggagctgccgaaacttccgatcccgcacgtgtcggacgatcacctgatcgaacaactcgatgccgccatcccggaggccgggatcttcgaggacctcgccgacgaggacgacgacttcgtgttgcctgccggcgaaccggccgagcccccggaacccgtcacgtacccaatgatcgacgacgactggctcgccgacaaggtcagcgagttggtggaccagttcggacgcacgttcgcagcgcaatggcaggccgatcacaacgggctgcgcaagcaggcgctcgggttgctgcaacgtctgcgcctgacgcatgcggtcgacggcggcgtactggtgttgcccgtccttgcccggtaccgcgacgtcgtggtctccgtacgcgaacgcgatcctcagatcgacttcgcggtagacaactccgcaccggatccggtcgacgaattcggccccgaatcttccaccaacggcgaactatcagaggtagagaacgtatga

SEQ ID NO: 51079 - DNA, 4176 bp, Rhodococcus erythropolis
atgagcaacgcccgcttccgacctactcgggctggaatcatcaacctctgggattaccgagaccaggagttctcgttcgccgacggtcgactggtcctacgagggccaaacggatccggtaagaccaaggccctcgaggtcttgttcccgttcgttttcgacggccgcatcgaaccgcggcgcctcaaccccttcgccggtgaagagcgcacgatgaagtccaaccttctctaccggggccaggacagcgcgcactcctacgtgtggatggagttctgccgcggctccctcgaagatcccgagtcggtgaccgtgggaatcggcatgcgggcaacccgcaccaacgacaaggtcacccgctggtacttcgtcgccgacggccgcgtcggagtcgacttctcgctgatcggcaacgacgatcgtcctctcaccaagaagcagttggccgaacaactcggcagcgattccatcaccgaccgtcccctcgactaccgcaccgcgatcgacgcgcgaatgttcggtctcggagtgcagcgctacgaccagctgatcaatctcattctcacgcttcgccgtccccagctcgcgaagaaccttgatccgaagggcctttcgcaagcgctcaccgacggcctccgtccactcgacgaccaactcgttctcgaagctgcgcgttcgttcagcgatatggaagaggtcggccgcgcgctcgaggggctcgcagccgccgatcaggcagcgcagagtttcatcggcgtctacaccaagtacctgcgtcagcagtcgcgcggagagatcgaacaggtcagcacccgcctcgcagcagtcaccagaggcgttgccgccatggacgagtcgtcgctcgcccagacccgcagccgtgaagcccgggcagcagccgaggagcgcttcaaccaggccgagcaggcactcgagaacgcgcgcgccaatgtcgaggcgttgcaacgctcgagcgcctacgaaggcaaacagcagctcgacgatctcgcccaggccgtctcgacgctcaagctctcgaccgagcaacaggcagacaagtcgaggaaggcgcaggctgcactcgcgcagcgcggcgacgaagccgacaaggccgcatcgtcggtcaagcgtgcagccgaggcactctcacgtgccgaggacgaactgcaggcagccgccgaggacgccggcatcgtctggactcccctgcccgacggctcacgcagcgaccagatcaccgcagcagtgcgtggccatgccgaggagcgtgacggcgacgtacgcgtagtccgcactgcgctcgcgaccgtcgagaaggccgctaccgaacgaacccgggccgaaaacagctcgcgccgtggacaagagctgctcgaagcgtccaaggccgctgtgctcgaaggcgaagctgccgtggaactcgcacgcagtcagtgcgccagtgggctgcgcgcttggtggaccgatcactcttccttgttctcagctgtcggcgcagacacgtcgctgttcgaggctctcgacgcggcgctcgccgaagtcggcgacgaggacgctccggcgctgtccgcagttctcaccgagcacaccgaggcaggcaccgagacgctgcgcgagcgacgtcgtgaggccgaagctgaaatatctgcatcgcacgcctccatcgcagctctgaaatccgagcgcaaggccgtctcggcggaacacgacgacgctccgccggccttccacgcacgcaccgacaaccgcagtgatctgggtggggcgccgctgtggcagctggtgcgcttcgccgactccgtcgaaccagacgtggccacgggaatcgaatccgcactccaggcggcaaatctgctggacggctgggtctgcccggacgaaacgattcccgatcacgtcagtgagcagttcctgaccgctctgccggtcaagcagcgcccgaagggacgaacgctggccgacgtcctcgaggtcgaaggcaatgccgacgtacccgacgctcgggtacaggacattctcgcgtcgatcagtctcgtcgaggcaccgggcgactccgatgcaagcgtcgcgatcggcgtcgacggccgcttctggcaaggtgtcgcgcgtggccggcacgtcaaggccgacgccgagtacatcggcacgacagcgcgggcgcgtcgacgcgaagctcggatcaccgagatcgacgcggctctggaagaacttgccgcggcagtcgatgcagccaaggcactggtgacgcagaccaacgagcagctgagccgaatcaactctgcggcaaaggaattgccgaagacaggatcgatcctccgcgcactcaaaaccgtcaccgaatccgccggtgcactccgcactcgctcggaggccacggaaacggcacaacgcgaactcgatgcggcgatcgccgatctggcggcgaaggaaaagcaactccgggcgacggcgtcgcagcaccggaccccgcacgtcggccgtgaactcgactccctcgcggcggcgattcggcatttcgagaagcagggcgaactggcgctgcgctgccgacgcgaacatgccaaggaagtcgaactcgaacgcgagtctcgcgaccgtctcgacgaatcacgcgccaatgcggaggaattcgccgaggaagccgccatcgccgaggagagtctgcttcagcaggtccagcgcctcgagacactgcgcgataccctcggggccagcgccgagcagatcgacctcgacctggcaaaagcccgcgcgaagatcgaagaatgcaaggtcgaacagcgtgctgcgcgaaaggcgtacgacgctgcggtcctccagatcggcacggcagagggtgcgtacaacaccgccgtcgagacgttgcgtcacaccctgaccgaaacccgcagtgatgcagagcgactcgcaccctatgctcgcccggaccttctcgagttgttgggcgtcaaggaacatctgagctggccggcaagttcagcggcgtggatgagccccgatcagttggtctaccgcatccagaacgaagaccgcagcgaggacgcggcccacccgcccgtcctccccgaagacgtcgacaagttgtaccgagcgctcgaggctgcgacctcggcggtacgcgtcaccgacggagcccgcaaggcaacccgcacggcactgacctcggcgttgcaggacttcgacgcccaactcgcggcggccggacaggactaccgcctgcagtgggatgcaccggacggactgaccgtcgtacgagtgcaggacgatcagggctattcgtcgatcggtgaattcgcaacgcggatccacgatgctcgtggcgatcaggagcagttgctcaccgaatccgagcgtcgcattctcgaagatgccctgctgaccggattggctcagcagatccacgagcgcacggtcgatgcacgcgtgttgatcgcacagatgggcacggagatgcgtgagcgtcggatgtcctcgggcaacaccatcggcgttcactgggtgctcgccgacaacctcgacgacagctcgcgggcgatctccaagctgctggatcgagacgcgtcggccctcggcgtcgatgaactggctactctgcgagctcatttcgcgacccagatccgtaccgcccgcgcggcgcaccccgaacgctcgtacccggaaatcctgtcctcggcgctcgactacaggcagtggcgcgtgttctcgttcaccctcatcagcggtgagggcaaggaagaccgccttaccgtcgcgcggcacagcgcgctgtccggtggcgagcagtcggtttcgctgcaccttcctttgttcgccgcggcgcacgtcatgctggactcggccgacccgcacgccccgcgtctgctggcactggacgaggccttcgccggtgtcgacgacaacggtcgcagcgagctgctcggcttgagcgttcagttcgacctggatctcttcatgaccggctacgacctgtggatcacgtacgcagacgtcccaggctgtgcgcactacgacctcgcgcactccacggccgaacaagctgtcagcgccgcgctgctggtgtggtcgaacggtgagctgctcgccgagcacgacggaacggatctggcgcgggcattgggctcgccgctacggcgccgggtgccgacaccagccgaaggtgcgttggactacgcctag

SEQ ID NO: 51080 - DNA, 1467 bp, Rhodococcus aetherivorans; identical to SEQ ID NO: 50461

SEQ ID NO: 51081 - DNA, 1371 bp, Rhodococcus aetherivorans; identical to SEQ ID NO: 50462

SEQ ID NO: 51082 - DNA, 4158 bp, Rhodococcus aetherivorans
gtgagcagtgcccgtttccggccgacacgtgccgggatcatcaatctgtgggactaccgggaccaggagttctcgttcgcggacggccggctggtgctgcgcgggcccaacgggtcgggcaagaccaaggcgctcgaggtgctgttcccgttcgtgttcgacgggcgtatcgagccgcggcggctgaacccgttcgccggcgaggagcgcacgatgcggtccaacctgctgtaccaggggcaggacagcgcgtattcgtatgtgtggatggagttctgccgcggccgccgggacgatccggaggcggtgaccgtgggggtcgggatgcgggcggcgcgcggcaacgacaaggtcacgcggtggtatttcgtcgtcgacggccgggtcggtgtggacttctcgctgctggatgcggccgatcgcccgctgacgcgacggcagctgatcgaggaggtcggggccgacgcggtcacggaccggccggtggactaccgggcggcgatcgatgcgcggttgttcgggctcgggatcgagcggtacgaccagctgatcaacctgatcctgacgctgcgccggccgcagctggccaagaacctggacccgaaggggttatcgcaggcgctgaccgacgggttgcggccgctggacgagcagctggtgctcgaggcggcgcggtcgttcgccgacatggaggaggtctcgcgcgcgctggagtcgctggcggcggcggacgaggcggcgcagcggttcgtcgcggtgtatgcgacctacctgggtcagcaggcccgcgccgacgtcgaccggctcggggcgcggttggcggcggtcgagagcgggagtgcggagtggacggcgtcggtgacggcgttcgaccgggccggcgcggagcgggcgcaggcccacgagcggctcgagctcgcggagcgggacctcgagcaggcccgggcgactctcgaggcgctgcagcggtcgagcgcgtacgagggcaagcagcagctcgacgatctggcgcaggtggtggcggacctcgagcgcaccacggccgggcaggcggagcaggcgcagcgcgcgagggcggagctggcgcagcgcgacgaggaggcgcggcgggccgcggccgcggcgacggacgcggcggccgcggtgggccgcgccgaggacgcactcgccgcggcggcgcgggatgcgggtgtggagtgggcgccgccggccgaggacgcgccgggcgagcagatcgcggcgacggtggcggcgtgtgcggaggagcgggccgcggatgtgcgggcggtgcgggcggcggtggcggccgcggagggcgcggcggcggcgcgggtgcgggccgagacgaccgccgagcggggccgggcgcagctcgagtcggcccgggcggcggtggccacggcggacgcggtggtggagctggcccgcgcggaggcgtcgaacctgttgcgggagtggtgggtcggtcaccgggacacgtggtcggtgctcggcctgccggaggagctggtcgaggcgctggccgcggcgatcgcggcggccggcgacgacgaggccgcgacgccggcggcggcgctggccgagcgcacggccccggtggtcgaggagttgcggttccgcggccgcggcctggaggcggagatcacgcacgcgcgggagcggatcgcggtgttgcgggccgaacgggacctggtcgaggccgagcgcgacgacgctcccccgtcgttcccgatgcggccgaccgggtcgtcggacccgtcgggggcgccgctgtggcggctggtgcggttcgcggacgacgtgagcgcggaggcggccgcgggactcgaggccgcgctggaggcggcgaacctgctgacgggctgggtgtgcggcggtgcgggggacgtgcccgcgggggcggtcgcgctgatgccggtgccgccggcgcagcgccccaccggccggacgttggccgacgtgctggtggtggagccggacaccggggtgccggccgagcgggtgcgggcggtgctggcgtccgtcgcggtgcgggatgcggtgacggacgagaccggcccggccgtcgacgagcggggcggctaccgccagggggtgcagctgggtcggcacacgaaggcggaggtcgagtacatcggggccaccgcgcgggcccgtcgccgtcgcctgcgggtgaccgagctcgacgcggagatcgccgcggcgcagaaccggatggcgggcgcggaggcggagcgggcggagctcgacggacggctcgcgcagctggagcgggccgcggcggcggtgccgcgcaccggcgcggtgctggcggcgctgcggaaggtcagcgagtgcgcgggtgcgctgcgcactgccggggaggcggcggccgcggcggaccgggacctcgatcaggtgatcgccgagtgcgccgtgaaggagcagcgggtgcgctcggtcgcggcccggcaccgggcgccgcacacggcccgcgagctcgagcatctggcggcggcgatccggttcttcgagtcgcagggccaggcggtgctgcgcgcccggcgtgagcacgtcgccgcggccgagcgggcgcgggaggcgcaggtgcggcgcgacgacgcccggctggcggcggaggagtccgccgagcgggcggtgacggccgaggagtcgctggggcagcaacagcagcggctggggacgctgcgcgaggcgttgggtgccgacgcgcagcagatcgacgcgcagctcgcgcaggcgcgcgagcggatcgaggcggcgcgggtggagcagcgcgccgcgcgccgcgcgcacgacgacgcggtcgagcggctcgggaaggcggaggcggcgcacgtcgcggcggagcaggcgctgcggtcggcgctgaccgagacgcgggccgacgccgcacagctggcgccgtatgcgcggccggacgtgctgtcgctgctgggaatctcggaggagctgcggtggccgtcggcggcggcgtggccggcgccggagcaggtggtggaccggctcgcccgggcgggcggggacgtgcctgcggtgcccgcggaggtgggggcgctgtacgcggcgctggcggcggcgacggcgacggcgacgatcaagggcggggacggtgcccgcaaggcggcccggtcggcgttgacgtcggcgttacaggagttcgacgggcagctcgcggcggccggtcaggactatcggctgcagtgggacgcgccggacgggttgacggtggtgcgggtgcaggacgagcaggggttttcgtcggtggcggagttcgcggtgcggatctcggcggcgcggcgggatcaggagctactgctgaccgacgcggagcggcgcatcctcgaggatgcgctgctggcggggctggcgcagcagatccacgagcgcaccgaggacgcgcgggatctcattgcccggatgggggcggagatgcggcagcggcgcatgtcgtcgggtacgacggtgggggtgcggtgggtgccggccgatcatctcgacgatcaggcgcgggcggtgtgccggctgctggaccgggaggtctcggcgctggggccggtggagctggcgagcgtccgggcgcatttcgcggcgcggatccgggcggagcgggcggcgcatccggagcggtcgtatccggagatcctggcgacgacgctggattaccggcggtggcgggtgttcgcgttcgggttgatcggggcggacggcgcggaggaccggctgacggtggcgcggcattcggcgttgtcggggggtgagcagtcggtgtcgctgcatctgccgttgttcgcggcggcgcatgtgatgctggattcggcggatccgcaggcgccgcggctgctggcgctggacgaggcgttcgccggggtggacgacaacggccgggcggagctgctcgggttgagcgtgcagttcgacctggatctgttcatgacgggctacgacctgtggatcacgtatgccggggtgccggcgtgtgcgcactacgatctggcgcattcggtggccgagcacacggtcggggcgacgctgctggtgtggtcggagggcgggttgctcgccgagcacgacgggtcggatctggcggcggcgctggggtcgccgggcacgcggcgggtgccggtgccggtggagggggcgctcgagttcgcgtag

SEQ ID NO: 51083 - DNA, 1491 bp, Clostridiales bacterium PH28_bin88
atggcccaccggcgtgctgtaaccgatgagatgcccgaagcgaattacctcatcggccatcaggacggcccttattaccggttgctggtacgctgcttctatgaacggcaccgggcacatgcaaactacgtgcgcagcgatgaactgcttgcctttgtgcggcagtacatgccttacgaagaggcggactgccggcggcacctggagatgatggaacgatggggactgatcaccctcctgcctgagcaaagcaagcccaccaacctgatggagctgcggcagaagccccgcgtgtatcaggccgagcgcattgccctgcgcctggaggcactgcgggttgagttggaggaaggggaaaaggccgcggcgctggacccggccgcactggacctcctggtggagcgggtgaaggagctgttggcctgggtggagcagggcggccttttccggcaggaatctgaggctgcccaccagacctaccggctctggtcggcggcttacgacgcattcaccaatttctctcgccgggtggaggagtacttgagcgacctgccccgccaccggccccgtgaagtgctggattacacctcgttcatgaactaccgggatctgatcacgcgctacctctctgattacgcccggcggctttttgaccggagggaacagttacgcgtcttactccacccgctggcgcctcatgccgagctgatcgccgtcacgctggcttcggtggaggtagagcaggtacgagctgacgggtcacggcccgagttcggccggcagaaggagcgctacctgcgggcggtgcggggcttgattgactatttcgccgaagagggtgacgtggacgtcctgctggagagggcccagacctgggtggcggaaatcacccgccatgccaggcgcctgtccgagcagcacctgggtggttcggttcgtgagcagacgcttttggacatggcctgccgctttgccgacgcgcccagccttgctcatgccgaagcgctgtcccaggtggtttttgccgccacgctgccgctaaactggcggggggaggcgccaccgccggaggaagtcccggcctggcagtccgagccggtcacagtcaccttacactcagtcaagcggggttcccgccagcggcagcggcctgaggcgactgccgaccggagtagcctggccctgcaacggatgctctccgcggccatggagcgcgagcgagatgcacggaaacttgcggaactgttcgggcctgaaggtgtggtggacctgggcaacctggcggtgcaagagccggcccagcgccaggtgctgctgcaccttctttacaaggcgctttcgcagcagggacgggccggcgtgggctataagaattggagcgtctcggtctcgatacctgacgacgccggcctggggcagctccagggacccgatggatggaccgtactacctcatgtccggctgtgtttgcacaaggggggcggccgatga

SEQ ID NO: 51084 - DNA, 1287 bp, Clostridiales bacterium PH28_bin88
atgactatacccggcgccgcggaacagcggcagatggccctgcacgacctcctggaccggtatttgatcagcagggaagacgaacccgaggcttaccgccggattactttgcatgagggctacttgaaggggtggtttgcggaacgtccccagtggcggatcctgaacggcaggggcatctaccgcctggagcggatgccctccctggtggtaccggagcgcgggctgccccggctgcgttcacccctggcttacgcctgtctttgctgggtgttgtggtttgcggagaccatgacatccaccgcccgtgactggtttgttatttccgagctggccgagcgggttgccactgcggctaaagggcgcttcacactggcggaacgctcccaccgtgaggcgctggtccaggcgttacagctgctggtggacctgggaggcctgctattgagagacggtgacgcggaccgctgggttgcgggtcagggaagcatcggggaggagccggaagtgatgtatgagttcgccgagaatgcaccccgtctgctggcgaactttacgtatgaaagtctcgctgttctggctgcaggggatccgggggctaaaaccgcaatgcccacaggtgagacggcgcctcccctggctcgcgcctggcgggcggttctccttggtcccgtattctggcggggagatgaccccgaggcgtttgccctccttgaggaaaggcaggagcaggtgcagcgggacttggaggcagctctgggctggcagctccagttgaacccggagtacgcccggatctggcggatgacgaccgcccggcatgccggcagcgtgctgctgaacctgtacccggatccgggcatgcccatggaggaccagcacacccggtacctttatcacccaatcctcctgttgctggaccggtgccgggagagagtggcggcgggccggtggcgcccggacgaagcaggggccgtacccgtccctttcggcgaactgcacgatttgatggcggacctgcgcggtgaataccggcggtactgggggagcgagcttggcgccgtatccctgacggacctggtcagggcggttctgaccgagatgagacgaatggccttactccgagggccggaccagttgcagcgctgctatttgctgccggccggggccgggatcaggggccggtatgggacccaggctaacggcggtgcgggtgatgatgcggaagagtctaaggaaggaacacctggccctgtacaaagcacgctattccagggactggggtaa

SEQ ID NO: 51085 - DNA, 4167 bp, Clostridiales bacterium PH28_bin88
atggaactctggcagcggtttgaaacggaactggagcaggcaagacgcgcgattcccggaggccccgcagggtggcgcccggagcgcttgatcctgcgcgactggtggtactggcgcaaccaggagttcggtttcgcccacggcaggctggcactgaccgggcagaacgcgggcggcaaatcatcgatcctggcccttacgatacccatgctcctggacgggcgtacggatcccgtccggctggacccggcccagagcagggaccggttcattcactattacctcctgggcgccgacgatgcggagcccggcaacccggaggccttccggtacgaggcgcggacgggatatatcgccctggagttctaccacccggtggaggagcggtttctcaccatcgggatgggtctttccgcatcgcgcaccagccccaggcggatcagcgactggtggggtttcctgctcctgcgggggcagcgccttggccggggatttgacgtccgtggggctgacgatacctgcctggcgcggcgcgaatttacccggatgctgggggacggagggatcgtggttacggagcgggcagagtaccagcggcaggtgaacaaccatctttttggcctggagagcgacgattaccacgcgctgatcgagatgctcctgcaggcacgccggcccaagctgggagaacagtcggggccggacaaggtatgtgacctcctgcgcagtgccctgcccggggtgcccgccgaccgcctgagcagggtgggagaggtggtcaacaacatcgaggaatacagccgcaacatggctgacgtaactaccaaggccggggcggtaggccggattgacgccgccctggcggcgctggcggaggtactggtgcaggaatccgtccagcagtacatggagacgcagggccggctgggctctgtggccggaggtctcaagcgggcccgggagagcatggaggcggcctccaggggtttggccatgctggatgaacaggcccggcggcgcggggtggagcaggctgccctgcaggcggaggttgacgaactccgccagggtgacggggccgacctgcaggcgcggctggaggaagccaaagggaagctggccacggcaaagagtaaagtcaaggacctggagcagcgggtagctgacgggcgggaagcggcggaagcggcgcaaaaggagcaggaacaggccggtgaacagttcgccgccaaacggcgcgccctggccggcttgatggaccggctcacccgggacgcggaccggatggcctggaaggatgccgtgagggagctgcgggaggcgaccagggcggtggaggtactggccatcaccgatccgccggaggtgattgagggggccgggctggacctttcgctggctgcgcaggcgcgccgcctcaaagaggaattccacgcggcggcagccgcccgcaagagcctggacgaagccgagaccgcttacagtctggtgcaggacagggtagatgtcctccgaaagaccatgagcgggctggccgatcaagtggaggatgccaaggacaacgcagtagaccgggcggaagatgtggttgcggccctgcaagcctggcaggagcggtgccctgtgctgcagcccagcgacgtcgacttggcccgggtggccgcgaaggtacgggaaatggtggaacctccacctgccgggtttcgtgaactgatcgagccgctggaggaactggcggagcggcgccgccgcgaactgaaggaccggctggccgcagccgcggaaaaggagcgcaccgcccaggtccgggtcgaccggctggctgagcgcctggctgaggtggaggctgatcccggcgaccccgggcgttccgtcatccgcggcaaggcccgcgccgctctgcccgccggcctgcagccccttttccgcctggcccggttcaggcctggtatacccgcggagaccgccgccctggtggaggcggctattctggaagcgggctggctggacctgctgattccggcagagtcacatcacgtggagctggccgatgcctacctggcgcccgaacaggtggacgggccgtccttgctggaggtgctggagcctgaacccggggcgccgccggaagtgacgcaagcactggcttccatcgggtggggtgaggggaccggctcccgctgggtcacgccggacgggcgctggcgaaacgccgccgcccacggccgggtggcgccttgggcggaagaagaagctggctactttggcgccggtaaccgcgaccgccgcaaggaacggcgtgtcgctcaagcgcaggcggctctccgggaggcacgtgttgaactggatgcgctggcggcggagcgggcgggagtggccaccggcatcgaagacctcgcggccgaaatccgccaactggaccggattccctggcagccgctttttgacgccctgggtgacataaggaccctggagggccaactggccctggcaaagtcccaactggaacaggaaaagcccaggcttacccaggccgagtcggtactgaggacggcaacgcgggcgtttgacgatgccgtttacggtctccccggcgcggcggggatgggctatgcggcgctcaatgagcgggagatggattttgccctcctggcggagcgtgtggaatccctggccaccccggcggcggagcttgccgggcttgcccgttcctaccgttcccgggcggagtcgatgcgccagggccaaaaggctttggccgatctggagcgggatgaggagatggcggtccgcgacatttccgcgggtgaagccgcggtcgccgcgctggagcgccagctcgccgatccggacgtccgggagcggcagaagcggctggagcaagccgtcaaccgccttaaggagcttgaccgagcggacgaagaggctcgcggcaagaagggagaccttgaggttcagcgtagaacggctgatcaccagatccaggacttggagccccaggagctggccctccgccaggaactggggcggctgctcgagtgggtccgggggcgcctgcagctccacccccaactccttcccttcctggaagccctggatcgggaggggccggtggcggtcatgcggcgcctgccacgtccggcaacggatgacgactgcgagtcgttgaagacgcaacgacaggctgatctgattagtatcgttcacactgagcaggacttgttgcgggattaccgtccaacgtggaatgcggagcgaaccagcctcaccttctgcgacgagcgccttcccctggccgcccagcagttgcgggagcgactggagcggcgggtccaggagtacaaggggctgatggaagaggagcagcgcaagctgttcgaagacattatctacgaagggatcctggacgagctgcgccggctgattcgccaggcccaggagtttacccgccgcaccaacgaaaagctgaaagccctgcgcttgagcaatgaggaacagctttcgctccgcttcagtcccctctcgccggagcaaatgccaggcgcgcggattgcccacgaactcacgcagatggagcaggggagccggtggctggaggagagtaaacgggacgtactgctcagcaccatcaaggaagaggtggagcgggtgcggctatccgccagtgccgcgggagaggagattgcctacaacgaggcggtggcacgggccttagactatcgcaactggtaccaataccagttgctcagcaagatgccgggcatgtccggcccggtccccatccggaccagggggtttggccgccggtccacctcggccaaggcgtgggcgctggccgtacccgtgctggctgccgtggcagcccgttacgatgcttccccgaaggttgatgtaccccggttgattgggctggacgaggccttcgccggtttggatcctaacaaccaggaaaattacctcggttttcttacccagcttggcttctgctggatcatcaccgctccggacgaactgccctacagccattccctctccgctgccatggcctaccggatgagcctggagggcaatttccacacggccttcccgatcctctggaatggtcaggtcgcctgggagcccatggctgagtggagctgggagacaggggaggagtcgcggccatga

SEQ ID NO: 51086 - DNA, 1302 bp, Clostridiales bacterium PH28_bin88
atgagggttagggacgcttttgcggaactgaaacgggccggcctggagcctttgctcgtggcggcccgccggaagatctatgaacaggacggggtccggggaaaggtggccgtgaggctggggaaaactgaacgggaggaactggccaacctgctcggccgtccggcccacagtgcggagggcatccacgtagatttgcgggaactggatgcggccctggggaggagccgttttcgcacaggcttgattgatgtgctggaagcgggctatggcccgatggtcacccggcgccaggagcgggaacatgcagacgcccgctggcaagcgtggctggccgggcttggacgtgcgattcccgtcgaccccgcggtaagcgcctggtttgatgctctggctgcgggaacatcacccagcgggcgatgggcccgccgggcatatgcagtagatccggaccgggcggccagggccgttacggctgttgggcgggcgctggcagcccttccggcgctgaaggagcggcacgagttgctggcaatctttgccgcggagatcaccggggacccgcatgcctttgatagtggtgaacccgccgggacgctgttggaccacgctctggcggaacggtttgagccacctcccgcgggactgcgccgcggggaagagagggcccttttgctggaccaggcagggctgggggtggaccaggtttcctcgaccgtgctggcagcctacctggcaactgcttcagtccagggacgattccacccggtgatcgagacgatgacggaatacggaggtggttggccgttaacgctgggagaggtacgaaggtggagcgccgtccgggctcgcgggcattgtgcatatgttgtggagaacccgccggtttttgagtacctgctcaggcgtgttgccggcgaagccccggaacgccgtcctacgttaatatgcaccgggggtttcctcagcgcggcagcggtccggttgctggatctactggcggcaggaggagcggaactttgttacggcggtgactttgatcggaacggcctggtaattgcctcctggttggctgctcgctaccagggccgcttccgtgcctggcgactgggaccggacgactatcgccaggcggtgacagctggggggaagaagttgcccgcggaagataaggagtttttaaacgggatggagggccccctggcagacacggcacgtgttgtagcccaggacggattgacggcttaccaggagcgcctggttggtatgctgaccgcagacatccttctggctcgttcctga

SEQ ID NO: 51087 - DNA, 1461 bp, Clostridiales bacterium PH28_bin88
gtgtccgagtccttattgcatcctgttgtggagacaagttacctgaccgttcaaaatgcctcccgctaccgtctcatcatgcgtcatttttaccgacagcaccagcgttcccgctactggctgaggaaagaggaagtgtttgaggcggtagtggcaacaggtttcttccccgattataccattgaacaatgcgagcaggatctggaggccctccggaagtgggaaaacctggttgccattcacgacggtagcaacgctacctcggttgaagagtacttgcgtaagcgttttcgctacgagattacccagtattctgtggaaatagagcgcatgctggaaaacctggaaaaggcaaaaggctactcgggtgtccttgaccctaagcggtttgatgagattgagtgggttttgagggagttaatgggccaaggcgaatggggtcccggtacagccttggagctttgggagaggttggtggagtcttttgaccggctggtggagaacggggttgattatctccaccacttgcagagcgcccgtgctgaagaactcatgtctactgttcaatttttgatctacaaggacaagcttaccgagtacttgcagaaatttgtggttcagggcctgcagcgtagcgggcggagggttcaggcccttttggttaaactcgaccaatctcacgtggacaaatggattcatgcagttgcccgtgactatgctgaaatccccaggcttgacgaacccttgacaatggaagaccggttggcgcgtgtacaggataagtggtcggctatcgtgcagtggtttttgggcagcgggtatggcgaggccgacatcgacctgatggagaaagaggcaaaaaacacgatcaccagggtggtccggtacgttgcgcgtatccaagaaaaacagcgctccggagtaagccgacgacgggaacttgactacctgggccggtggttccttagtcttgacagtgtagaggaagcccacaagttggccgcatgcgtttttggcctctacagaacccggcattatcaaggtgctgatgaaaagggttcagataatccagatctctcaatgtggcaggtcgcgccgagtatccgggttctttcttcccgcggtcggagaaggcgtgaaagctcaggtcagccgatcatcagccgcaaggccgaagccgcgaaggctgatgaggtgtacctggcgaaaagggcggaggaagaacaaatcgtccagtccttggttggaagggggcgtcttatcatgtctcaactggagtatttgcccgcacccgccatggactatctccttgactggatcgggcagtgccagtcaaatgagtcacggcacgcgcatacacccgagggggttctggttaagctttttgatcctccggcgtccgacagcaggcgcaaatcctcgtcagaaaggggtgccaaggccaaagtcaggatctcgtaa

SEQ ID NO: 51088 - DNA, 528 bp, Clostridiales bacterium PH28_bin88
gtggtaaaaagtgaggacggcgaacttgatatgcccgactatactttggaattcgtggacatctccggcatacttaatttctggttctacgaagacgaggagatctattttgccgatggaaggctccttctaagaggagctaacggggcaggcaaaaccgtcaccatgcagagccttattccacttgtgcttgatggggataaacgcccgtggtgccttgacccttttggctcaaaggaccgcaagattgagtactacctgctgggtgagggcgatggcgcccacatcaaccggaccggctatttgtacctggagttttatcatccccagcatcgccgttatgtgaccatcggtatcggtctacgggcgagaaagaatgccaggcctttgttctgggggtttgccgtcacggataaccgccgggtgggcaaggattttaacctttttgacacggactatgagggcaaaaggcttctttcagaaagagcggttgcaggaattgcttgggtctggcgggtgggtggttga

SEQ ID NO: 51089 - DNA, 1314 bp, Clostridiales bacterium PH28_bin88
atggctgtcgaccaatcgctgataaaccatctgaaccgacctgcattgtcacggctctggcgggaagttaagaaaaaatatgagtcgctggggagggtgggcggccgggtgcgcctgtccgaactcacccctgtcgaacaggaggccgtttcaggtcttttaaagaccaatctcaccagcggttcggtgtccatttcccttgaaactctagaccgggccttgcagcagagccgtttcgggcacggcctggaggatttccttaaagccacctatgggagttcattacgtacccgtcaagagcggtctgattattcaaagaggcgctgggaaaattttttcattcacctgcatggctatgccgtctcggagcctgtgaaggcgtggctttcagaactccagtccggcagggggagcggctaccggtcgtttatcatgctttataacgaggattaccacggcgccttggagaccatgagggtttgcctgactgttcttaatgatttgcctgtaatcagcagtaataatcttcggctaccggtgttttctgccgccgtgacaggagaccctcatgcctttgacagggatacgccgctgggtcgccttctctactacggggtctgcgcagtcttaaagatcaccccggcagactacagcgcggctgagttgggagacgtgctcgaaaaggccggcctaaaaaacgacggcatttcatccactgtggtagcatacgggcttttgtgtgacccggcagacctacgcgccccgatgctttttagtgctaaggagaaccgcatcccgttaatcctcccgctccgtttttttgatcgggaggtgccctggctgaaggaaccggcagtgtacgtggtggaaaacccggccgtgttgagcgctctcctggacatggcatcaggtcggagtctacccccggtgatctgtgttagcgggcaaccgagccttgccgccgtggaactattagatggactggccaggcgggaagtagcgatgtattacagcggtgactttgacctggcgggactcactatcggacttaatcttcatgaaaggtataaagacctgtttcggccctggtttttcgacagcgcagcgtacttgtcggctaagcccgggtcgcccattgacgaaaaagacatgcggcacatctccgcacttgaggtcccctgggatttgcatctgccaacaaccatcgtcaacaatggatataaggtcttccaggaggtttttgtagccaggatggcagataaactcaagttagcaagctcgaaaagcgattacggtagattaaaactgtattga

SEQ ID NO: 51090 - DNA, 1599 bp, Streptomyces sp. CNQ-509
atgagtgcacccgaatccgcgcgacacgaggccgggcgcggcccgttcgctcacctcacggttccccatgccgcccgctaccggcaggtgatggccgtcttcaccgcggccaaggagcgcttcgcggtgcacctgcggccggaggacgtgcacgccgcgctgccgccggaggagcggccggccgaggtggaggccgtggccaaggcgctggacagcctcgtgcagtggggcaacctgcgggccgacccggacacctcgcgcgtgaccgcggtcgaggacttctaccgcaagcggttcatctaccagctcaccccggccggcgaggcggtggagctggcgatcgcggcgtacgacgaggcgctggggcggcgcggcgcacttcaggccgtcgcactgcatgacatcgttacccagctgcgggcgctgctggtgctcgcggcggacgacgagccggacgcggcgaaggcgcatctggcactggccgcgctcgcggaccggttcgcggcgctggcggagaacgcgcgggccttcatgggttccctgcagcgcaccatcgacctgcacggcgtcgaggtcgaggtcttcctcgcgtacaaggaccggctgatccagtatctggagcggttcatccaggatctcatcgccctcggtgggcggatcgcccggctgatcggggagctggagcagcagggccgggtggagacgctgctgcggctcgcggctgcccgcgaatcggccgacgccgcaccggaggagaccgagaccgcgcaggcgcgggcgtacgagcgctgggcggcccggtggtcggggctggcctcctggttcgtctccgcggacggccgcgagtcgcaggcccggctgctgcgcggccgggcgctcggcgcgatcccgcaactactggccgtggtacggcagctcaacgagcggcgggccggacgcaccgaccgctccgcggacttccgcaccctggcccgctggtttgccgaggcgcccgacgacgccgcccggcaccggctgtggcgcgccgccttcggtctctatccggcccggcacctgaccatcgacgccgacaccctggcggcgcgggccgcggagccggtgccgcccgccacgccgtgggcggcggcggagccgctgaggatcagcccgcagctgcgccggacgggcagctacgagcggcggggcaagccgcggcgggtgcgggaccgctccgccgagcggcggcggctggccgagtacgcgggcaggcaggcggccgaggtcgccgcggcccgcgcccggctggccaccggcggcgaggtccggctgtcacaggtcggcgaactcgacccgctggccttcggcctgttcctgcggctgctcggggatgcgctggccacctggcgcccggataccctgaccactaccgtgaccagcaccgacggcacgatggagatccgcctcaccgcgctgcgggacggcgggcgggcggaagtgcgcacgcccgccggcgtgttccgagggccggatcacctggtggagatcatcacccgggcgggcaccgtccaggccgtggacatgtccgcggacatgccggtggacacgggggtccgtgcgtga

SEQ ID NO: 51091 - DNA, 1248 bp, Streptomyces sp. CNQ-509
gtgagcagccctctcggcgagttcctggacgcccaccgcagtgccgagctgcagagggcggctcgcgcgctgctgaaggagccgctgctgctcgcccgcggcccgcaggcggacagcttccggctggttcggcgccatgccgccgagctgcgcgagtggttcgaccgcaacaccggctggccgctgcgggtggacgccgagtccgcccggctgctgcgcacccccggcactctggcggaccccacgcatccggcgcgcgaagtgagccggtcgcgggcgccgttcacccggcgccgctacgtgctgctgtgcctggcgctggcggcgctggagcgcagtgaggcgcagatcgcgctcggccggcttgccgagcaggtcgttctcgacgccgctgacgagcaactggcggcggccgggctggagttcaccctggagcggcgcgacgagcgcctcgacctcgcggccgtggtccggctgctgctgcacctcggggtgctgcgccgggtcgccggggacgaggacgcgtacgtctccggttccggcgatgtgctgtacgacgtggagcggcgggtgctggccgggctgctggccgcccggcgcggcccgtcgctcgtcaccgcggccgggttcgccgagcggctggccgaactcaccgccgagaccgcgctggacagcgacgagctgcgcttccgcgccatccgctaccgcctgaccaggcggctgctcgacgacccggtgctgtactacgacgagctgaccgacgaggagctggcgtatctgacccggcagcgggccttcctcacgtcccgtatcaccgaactgaccgggctggtcgcggaggtgagggccgaaggtatcgccatggtggaccctcccggcgacctgcgcccgggcggtgccacctacgacctgaccgacgtacgtatgcccgagcagggtacgtacggacacgtcacgctgctcctggccgagcatctggccgccgcggacgggcccgtgaccgaggccgcgctcggcgccaaggtgcgggagctggcccggcagcacgccgggttctgggccaagagcgcccggcagccgggcgccgaggcggagctgaccggccaggctctgaaccggctcaccgcgctgggcctggtggtccgtacggcagaaggagtcgtcccgcggcccgcactcgcccggtacgcggtgggagaacccgtcgtgcgtcccgtgcccgacccccgaaaggcccccgagcagtga

SEQ ID NO: 51092 - DNA, 4164 bp, Streptomyces sp. CNQ-509
gtgaccgttctcccgcaccccgcgcccggccggtggcgccctctgcgcatcggcctggtcgacctcttctactacgacaccgaggagttctggttccgcgacggccgcctgctcctgcgcggcaacaacggcaccgggaagtccaaggtcctcgccctcaccctgccgttcctgctggacggcgacctgtccgcgcgccgcgtggagcccgacgccgacccgggcaagcgcatggagtggaacctgctgctcggcggtgagcacccgcaccccgagcggctcggctacacctggatcgagttcggcagacgcgacaccggcaccggtcagacgcacttcgtcactctgctgtgcgggctgaaggcggtcgcgggccgcggcatcgcccgccactggtacgcggtcaccgaccagcggatcggcgcggagctgagcctggtcgacgccaccggcaccgcgctgtcccgcgaccggctcacggaggccgtcgcgggccgcggcatggtctacgaccaggcgaaggcgtaccgcagagcggtcgacgaggcgcttttcgggctcggcgaacggcgctacgccgccctcgtcgacctgctcatccagctccgccagccgcagctctcgaaacggcccagcgaggccgcgctgtcgcgggcgctgacggaggcgctgccgccgctggatcaggcggtgatcgcggacgttgcggaggcgttccgctcgctggacgaggagaaggaggagctgcggcaggcggccgaggcagagcgggcctcctccgcgttcctcgatcactaccgccgctacgcccgcgtcgcggcccgccgccgcgcgcggctgccgcgtaccgagcacgcccgctacgagcggctgggccgcgacctcggcgccgcgcgggaggagctggcgcaggcggaggcggaccggcaggtggccgcggcccggatcgcggagctggaggagacggccgtacggctgaaggcgcaggaggaggcgctgcgggcagggccggagatgcgcagcgcccgcgagctggagcaggccgcggacgacgcccggcgcacggaggcggagctgcggcgtgccgaggccgaccgggagcaggcggcgcaggaccacacccgggcgctgggccggctcgcggatgccgtcgcccggctcggggaagcggaggaccagcttgcgcggatcgtggagcaggagcgggaggtggcccggaccgcccggctcaccggcggcctgcggacggacggcgccccggaagcggagctgcgccgggcggccgaggaggcggtggaccgcaggcggcgcacggtggaccacgtagcggacctggcggcacaggccgaacaggccgcggccgagcgccgcgccgcggcccgccgcctggacgaggccgagcgggaggccgggcacaccgccgagcggcaggccgcggccgaggcagcgaccaccgcggcgggaagcgcgctcgtcgccgccgtacgtgaccatctccggggctgcgccgagctggccgtcgacgaccccgagggactgctcgacgtcctgacggactggacgacgcatctgaccggcccgtcacccgcccgcgagcgcgccgcccacgcccatcgcgtgcgcgccgcgcggctggccgacgagtcggccgcgctggggcggcggctggcggacctcggcgcccggagggaggcggccgagcgggagctggccgggctcgaagcgggcggccaggtcgggccgccggtgcctcacacccgtaccccgggtgtacgcgaggaggcgccgggcgcgccgctgtggcgtctgatcgacttccgcgaacacgtcggtacggcggaacgcgccggtctggaggcggcgctggaggcgtccgggctgctggacgcccgggtggtcccggacggcacggcgctcgccgcggacgggcacgacgtgctgctcgcccccggcgctccgctcaccgggcgcccgcggctcgacggagccctgcgcccggcggtggaccacggcgacgcgcgggccgccgcggtgggcgaggcggccgtggtccggctgctcggggcgatcggtctgggcgacgggccgggtgacggccccggcaccggccacggcgacacctgggtggctccggacggccgctttcgcgtgggcgccctgaccggaagctgggcgaaggaagccgccgtgtacgtcggcgaaggcgcgcgcgaggaggcccgccggacccgtatcgccgagctgcgcggcgaactcggtgaactcgcggcggcgcgggaggcgcttcaggcgcagcgggacgcggtggccgcccggcgccgcgccctggacggcgaactcgccaccgtccctgaccaagaagaggcggatctgcgccacgcccacgcgcagaccgccgccgccgcggaggccgcccaccgggcccgtagccgccgcgacgagcacgccgggacggcccgtgaagccgcccgtgcggaggagacggccgccaccgaactggcggataccgccgcggccgtggacctgcccgcagaccggccgggcctgaccgccgtacggcaggcgctggccgactacaccgccgtgctggccgcgttgtggccggcgctgcgggaacgggccgccgccgcgcgcgccgccgccgaggaccgcggcgagaccgagcgggccggggaacgggtggcggaactggccgtacgcgccgaggagtcggcccgtacggcggcggcggccggggaacgccacgccaccctgggcagcaccgtgggcgcggccgtggccgagctccagcggcggctggcgcagaccgcggacgcacgggacgcgtgcgaacggggccagcggcaggcgcgtacggaccacaccgcggcggagaagagcgccgggcgcgcggaggggcggatcgagcaactggagaaggacacccgggaggcgaccgccgcccgcgccgaggcgattgccgcgctgcagcggttcaccgccaccgggctgctcaccgtggcgcttccggacgtggctgtgccggcgcaggacgccggcggctgggcggcgaagcccgccatcgcgcttgcccgcaccgtggaggcggagctggccgaagccggcgtcgacgactccgacggcgcctgggagcgggtgcagaaacggctcggcgaggagtacaagaagctgcaggacgccctctcccgaggcggccacagcgccagcgcgcggatgacggacgacggcatggccgtcgacatcctctaccagggcagggagcgcgccgtgcccgaacttgcggaggcgctggcggccgaggtggcccagctgcagcggatcctgtccgcgcacgagcgcgagatcctggagacccacctgctcaccgaggtcgccggcaccctccaggagctgatcgccgccgcggagctgcaggtgcggcgcatgaacgacgagctggaacagcgccccacctccaccggcatgcggctgcggctgatctggcgcccctcccgcaaggcgccggccggtctggaccgggcccggacgcggctgcggcagaccgccgacgcctgggcaccggaggaccgggccgcggtgggggagttcctgcaggctcagatcgcgcggcagcagaccgacgaaggagagggcggcgggaagggcagttggctggaggtgctcaccgcggcactggactaccgttcctggcacgagttcggagtggaacgccaccagcagggccggtgggtgccggccaccggacccgcctccgggggcgagcgggtgctggccatgagcgtgccgctgttcgcggcggcctcgtcccactacgccacggccgcaccggacgccccacggctggtcgccctggacgaggcgttcgcgggtgtcgacgacgactcccgtgccaagtgcctcggcctgctgcacgccttcgatctcgacgtggtgatgacgagcgagcgtgagtgggcctgctacccgcaggtgccggggatcgccatcgcgcagttgtcgcgggtggacgagatcgcggcggtgctggtcacgcgttgggagtgggacggggtggccctggaccagggagcggagccggagcgcacggcggcgtcgcagggcggcatccccgtgccgcgggacggggatgcgcaggagtccggtgcggagcccctgtggacgtga

SEQ ID NO: 51093 - DNA, 1215 bp, Streptomyces sp. CNQ-509
atcgaccccgaccgcctcacccgcctactcggcgggcccggcctcgactggctggtggaacgcgcccgacgccggctggcccgcggcgagcccctgaccggcacggtgacgctcgcttccgccacggccgcacagcgcggggccgccgaacgcctgctgggccgcgccccacgtccaggccgctcactgagcgtacggctggacgaggtcgacgcggtgctgcgccgctcccgggtcagccccgcgggcctggccgccgccgtgaccgccctgaccggccccgtggtcccgctcgcagaggcccgcgagcgtcaggcacgggcgtgggaggaggcgtacgcaccactcgccgccctgcccgcggaactggcggactgggccgatgacatccgccgggacggcctcgtacgccgcctcgcccgcagccccgatgcggcccgccctctgctcgccgcgaccgtctcggcgctcggcgcgctccccgccgagccggcccgcccgctgcccgagttcgctgcccagacgcttggtgatgcccacgccctcgacgacggcaccccgctcgccaccctggtccgctccggcgtccgggccctgaccggcttccccgacggcgaaggcgccgagtggcgccgggcggcctgggcctcggcgggcctgctgaaggacgccctgtccgccaccgtgctggcgctgggtgtacgcggcaccgcggcactcgacgcgctcgccgacgcgggcgagccggcggtgctcaccttgcgccaactcgcccacggcgcgccccgcccgccggcgaccgcccccgcggtgtacgtatgcgagaaccccgcggtcgtcgccgccgcggccgatgcgtacggcgccgactgcgcccctctggtctgcctccagggccagccctcggccgccgcgctcaccctgctgcggctcctgcaatcggccggagcacggctgctctatcacggcgatttcgactggggcggcctgcgcatcgcggggggcctgctgcgccgcgttccgtggcgcccctggcgctacaccgcggcggattaccgggcggcagcggccacgatgccgcttgcgcgcccgttgcggggcacccccgcgtccgccccctgggaccccgcactgagcgccgctctcaccgaggtcggggtcggtgtggaggaggagagcgtcatcgacgacctgctcagcgatctgattcgctga

SEQ ID NO: 51094 - DNA, 1542 bp, Frankia sp. BMG5.1
atgacttcgacgcatcgggtgccaccggagatgttccggttcgcgaccgagcagaacgtcgacctgtacacggcgatcctgcacgtcttcggtgaggcgaacgagcggctggagaccgcgctgggcctcgacggcatctcggaccggctggcgtccgtcgggttcttccgtgagctcggtccggacgagcttggccgcgcgctcgcgcagctgggcaaatggcggctgctggacgtcatccagaaccacggcgcggactacaccaccgccgccgagtacgagcgcggcaacctgcagtactcgctgacgcgacgtggggaggccgcgttcgcgggcgtccagcacgcgctggcggtgctcgcctcggcgggcgcgttgcagaccgccgttctggacgccatcgtggaccggctggacgcgctgtacgcgctgatggccgacgaggcttcgccgaaccgcaggatcttcacgacgctcagtgagcttgagggtcatcttgaggctctccgggtgaacaccaagcagttcaacggtgagctgcagcggctcctgcgggccgagaacgccgatcttgacaccttccacgaggtcaagcgggccaccgtcgcctacctgcaggagttcgtcaccgacctcgatcaccggtcgcacgagatccgcgaggcgatccggcgggtggagtcccgcggtgtcggcgcgttacgcgggcgcgcgctgctgggcgccgagctctcgccgatgggcggggacgatccggcgccggcctggctggagcaccgccggctgcgctgggagggcctgcggctgtggttcgacccggacggcggtgcgcgcccgcgggcggagcagctgcacacggtggcgcggcgggcgatcgtcgccctgctcgcggccctggaacgcatcggcgagtcccggcggcggtcgtcgagcgcggcccgcgacttccgcgtgctcgcgcgcgcgttcgccgccgctcccgccgaggacgacctgcaccggctgtggggcgcggcgttcgggctggccccggcccgccacgcgcacctgcggcacgccgaccccgaactggtgccgaccggcgtgagctgggcggacgccccctcggtggaggtgtcgacgctgctgcggcgcgcgggccgggtggagcgcttctcccggaccggccgggtccgtgacgtcacggccgtccggcgtgcgcgcgaggagcgggcgcggcgggagcgcgccgaactggaggccatctggcggcggctgagaacggacgggccgatccgcctgtccgcggtggccgagctcggccatgaggagctgtcatacctgctggacctgctggggcatgcgctcgacgggccgctggacagctcgggcgcgcggcgggccacgacgtccgacgggcgggtcgagatcgtcgcgcggccgacgggtgacggcaggctggcgatgatccgtaccccgcggggtgtgctgaccgccccggaccacgtcgtcgagatcatcctcgtcggccagcgcgcgcgtcccagcgaggccgcgcggtga

SEQ ID NO: 51095 - DNA, 1320 bp, Frankia sp. BMG5.1
aagccgatcgcggactggttcgactacttctgcggatggcagctcgtcgtcgagccgcgggccggctacgcgcggctggtgaagatccgttcggagccggacccgtcgcgcccggcgcgccggccgcggtcgacgcgggccccgttcgaccggagcaggtacgtgctgttctgcgtggtggccgccgagctgatggccggtccggtcacgacgatcgggctgctggccgaccgggccgcctcggcctgcgcggcggacgacgccctgccgcccttcgacaccgccagccgcgccgggcggatggccttcgtcgacgcgctgaagctcctggagtccctcggcgtggtcagcgcggtggacggcgtcaccgacacgtatgtgcagtccgaggaggcgaaggtcctctaccgcgtcgacaccacccgcctggtgcggctgctcgccgcgccggtcgcgccgtcgcgggtggtcaccgccggcgcgtccgtggcgcccggcgtcggtgacgcgcccgccacgcccactgcggacgacactcccgacgatgccgggaaggccggcgcgaccccgcccccggaccaggagctgatcgacatcgacgtgctcatcgccgacatgctcgtcgagacccgctacggggacgccgcggccgaggccccgacggtctccgactcccggcgcaatctctggctgcggcattcggtgatccggcgcctggtcgacgacccggtcgtctatcgctggcagctcagcgcggcgcagctggcgtatctcgccacgccgacgggccgcacgatggtccgccgggccgcggagctggcaggcttcgagctggaggagcgagccgagggatatctgttcgtcgaccccgacgggatcgcgaccgacagccgcttccctgacgacgcgagcagcgcaaagatcgctggcctgatgctgctcgacgtgctgcgggccgcgccggccgggctcacgatcgaacagctggccatcgaggcggggcggatactcgcggggctgccgtcctgggcgaagagctaccgttccgaggagggcgcgcaccggctcgcgcgggacgcggtcaccgagcttcggatgttcgggctcgccgcgctggacacgggccataccggtgcctccgccgtcgtgcgggccctgcccgccgcggcacgctaccgcgaccaccgcgaggatcggtcgcgcctcacggacgtggcgtcatccgccgcgaaggccgccaccggggatgtcacaggggacgctgagcggggcgccgcgcgggacgctgagcgggacgtcgcgtcgggcgggcaggcgtga

SEQ ID NO: 51096 - DNA, 4245 bp, Frankia sp. BMG5.1
gtgaccaggctgcccgttcgcccggctccggccgacgcccaggcccgggtggcccgctggcggccacagcgcgccgggatcgtcaacgtctggcgctactacgacgagacgttccacttccaccgcggccggctgctgctgcgcggtcgtaacggcaccggcaagtccaaggcgctggagctgctgctgccgtacctgctcgacgcgaacctgcaggccaggcggctgtcgacgttcggcgggccggaacgcacgatgcactggaacctgatgggggacggcgcgagcggccagacccgcgtcggctacgtctggatcgagttccgtttcggtgctctccccgagaccggcgagaccggcccgaccggccagccgagcccggtgcggcccgtcggcgacggtgacggcgtcggtgacggcgggcgcgagggcggtgggccggccaggcccgacgacgggaccgacgggtccgatgacgggatcgacgggtccgatgaacgttggttcacctgcggcgcgcggctgcaggcgtccgtgcacacggcatcggcgacagcgaactacttcacgaccaccagccggatcgggctgcccggtggcctgagcgtggttgacgaggcgaacgccccgctgacgcgcaaacggctggaggcggagctgggtgacacgggccagctgtaccccaccgcggccgactaccgggcggcgatccgcgccgagctgttcggcggcctgagcgagcagcgctacagcgggctgatcaccgcgatgctgcagctgcggacgcccaaactgtcggaacggctcgacccgtcgctgctgtcgacgctgctgtcccgggcgctgccgccgctcgggggagccgagatcgccgagctggccgagggattcgagcgcctggaccgacagcgggagagcctgcgccggctcgacgaggaggtcgaggccgcgcgggtactggccgaccggcagcgagcctatgccagccgggtgctgcgcgcggccgccgccgacctcatctccgccaccagcaccctggacgcgctgacacgcacggcccgggaaagccaggaggagtacgaccgggtcgtcgctgagcgcgaggcgctcgacgagcgcatcacggccgccgaaaccgaccgcgggacgctgcaggcccgggtcgagggcctgcaggtcagtgacgcctaccgggccggtgggcggctcgacgagctgcgcggccaggtccgcgcggcacagcgacgcgccgccgacacccgcgagcaggccaccggggcgcaggagcgggcgcgtgtcgacaaggccaccgccacccggacggcgacgggcgcggcccgtgccgaggccgagctcgcgtccgcgcgggagacggcccgccccgccgccgaccgggcgggcatgaccgcgacctaccagcagctcgctgccgtcaccgagcgcgccgccggcgccggggaggaccgcgaggacgccgccgcctcgtggagtgccgcggcgacgcggccccggtcgttgctgcgcgcggcggtcgaggcccgaggccgtcagatcggcgccgtacgccgtgcgctgggtgaacaccggtccgcggtcgacacgcggaccacggcggagcggaacctggagcgggcccgccaggaactcaccgccgcgacagcggctcggcgcgatgcccgcgtggcatacgaggacgcgcgggaggccctcggcgaggcgctggcccgctgggccgccagctgcgcgcagctgcggttcaccgacccgggggcgctgcgcgacgcggccgagtccgaacccgacgtcctgcgcctcgtcgaggagaccgccggcccgctgctcgaggcgatcgccgcccggtcggccgagctggcccgggagcacagggaccgcgacgccgaacgggacgcgcacacggcggagcgggaccggctgctgatcctcaccgagctgccgccgtccgccccgccgaccaggaccgccgaccgggccgggctgcccggcgcgccgctgtggcggctggtgtctttccgcgacggcgtcgccccggccgtccaggcgggcattgaggcggcgctggaagccgccgggctgctcgacgcctgggtgttcccgacgggcgggctcaccgtccccgggcacgacacggtcatcgacgtcgaccggatggcccccgcgcccgcgggcgggctgggcgcggtgctcacacccgagccagacgcgaaggtgccggccgagcgggtgctgcgcctgctcgccgggatcgccgtcgataccaccgtgcccgacggccacccggtcgcggtcggcgccgacggcacctggcggctggcggcggcccggggcagctggtcgaagccggagcccgcccacatcggggcgctggcgcgtgaccgggctcgccgacgccgtgtcgacgagctgaccaggctgatcagccagctggacgacgttctcgccggcatcggccgggaactcggcgaactcggcgcccggcgggaacggatcgcggcggagcgccgcgcccggccgagtcaccgcgcgctcgacaccgcgcgcggcgcgctggaggctgcggacgcggcggtggccgcccgtgacgacgtggtcagccaccggctggaggaggtccgggaaggcgaggacgcggtgcgcgccgcgacccgtgccctgaccgcggcgggcgccgagcacgggctgccgaccgacacggacgcgttggaggcggtgcaggatgccgcgacggccttccaccggctggcggacggctggctcgactgccaccagcgggccaccgccgcccgagacgccgcggtggccgcggcgggggtggccaccagatcccaggagagcgcgctcgggctcgccgcgacggcgggcgatgcggcgggggagacccagcgcctgcgcgcgaaactcgacgggatcgaggccgcgatcgggcccgagtaccggcaggtcctcgacgagatcgccggcgcccggcgccggctggaggaactggcgaaacagcgcgtgatgatggagcagtcagggcgcgcgctggagcgccgcgtcggcgagctggacgagcggcgtgtcgtggacgcggaccgccgcgaggccgccgtcgccgaacgtgacagccgggcgaaccggtttcggcacctcggggccggcagcctcgccgcggacacgcggctcgacatcccgctcgccgggctggacggggtgcgccccactctggaggccgcccgcgcggtcgcggccaggctcacgaccaccccgtacgccaggcagaacctcaaggaggccgagacccggctgaccgacgccgtgcaccgcagccggcaggcactcgcggaccgggccgagctggtcctggagccggacgaggacatccagattctcacggcggccgtcgacgggatccgcgtcggtgccgcccatctgcacgacgctgtccgcgacgagcgggagcgctcccgcgccgagatcaccgaaggtgaacgggagttgttcgaccggacactcaccggcaacacccgccggcacgtcgccgaccggatccggcaggcgaacgccctcgtcgcggacatgaacagccggctggagagggtacgcaccgcatccaggaccgccgtccagatccagtggcgggtcgacccggccctgcccgccgcgacccgcggcgcccgcgacctgctcctgcgggacccgagccagctcaccaaagccgaccatgaggcgctgcacgagttcctgcgcgcccgggtcgacgacgcccgtgacgacgacaccgcgaccggctgggaggaacagctcctgcgggtgtttgactacacggcctggcaccagttcatcgtccgcgtcgaccgcggcaacgagcggggctggcagccgttgaccaagaagctgcacggcgcgctgtcaggcggtgagaaggcgatcgccctgcacctgccgctgttcgcggcgctcgccgcgcactaccagtcggcgccgaccgccccgcgcctgatcctgctcgacgaggtcttcgtcggcgtcgacacgaccaaccgcggccaggtgttcgagctgctcgcctcgctcgacctcgacctgatgatcacatctgaccacgagtggtgcatgtaccgcgagctcgacgggatcgcgatccactcccttatcaccggggacggcagcgacgacgccgtgacgacggcccgcttcacctgggacggcctgcgcctgacggacgcggacggccagccgctgtga

SEQ ID NO: 51097 - DNA, 1506 bp, Rhodococcus erythropolis
atggtggaagaaacgagtgcgcccgattacgccgcgtacgccgacaccaatcgactgaagctgttttcgttcacgatcgcggaaaaacgggccgagtacctctgggtacttcgtgccttcgaccatgctcgcgccaactacaccgtcctgctgcatgccggagccgtcgcgcacatcctcgagaagatcggtggatcggatccggcggccgatctgtcggcagcagaggtcactcccctgttggatcagctccacgtgtgggagatcctcgagcgcagctacgacggcacccgcgcggccacgctggccgagtaccgcaatcgccacttcgtctaccagttcggtcaggccggataccaggtctatcgatcggtcgaagacgttctcgccgcacgcctggactcggcgtcgctctcgcgtctcgctctgccggacctgctcgcagacatgtccgaactcgccgaggccaaccgaagctccgacggcgatctgatcttccgcaagctcaagcgcctcgactcgacactctccgacatggccgatcgagccgcgcacttctatctgaccctcggggacctcgtacggaccacggagatcaccctgcaggctttcctcacgcacaaggacgcactgctcacgcacatgcgggagttcagctccgatctggcgcgctacgcccccaagctcaaggaagcgatcgagcacgtcgaacccaccggggtcgatcgcatgatccgcctcgccgccgccagtgacgaacgggtgttcgtcccgatcaccgaacgcgaagacgactgggctgcgcgctggcgaggattgaccgcctggttcgtctccgcggaatcgggaatcagcgagtccgaacgcctgcgtgagggcacgatgagcgcaatcgccgcggttctcgcgctacttcgccgcgtcacggaaacccgtcgcggcggcgtcagccgtgagagccagctccggcacctcgccggctggttcgccgccacgccgtccgaagacgcagctcatgctctgttccaggcagtgttcgacctcggccgtccacgccacctctcgatggtgcatccggacgccgacatcatttcgcactcacgctcgtggtgggaggcaccgccggtcgagatcgcgcgaacactcgccgaaaccggccgcccgccctcacccggcttgccgagcaaagtcgcccgcaacgacggcagcatccgccgcctgcgcgaagagcagctggcggcgcaacgtacgcgcagtgccgcggcgcaatccctcgcgtcgaacggcgtctatcagcgcgaactcaacgagcaggagaccgaagttttgctgagtctgctcaatgcagcactgaccgcgcgcgttccggtggcgggacgcgtcaagagctccaccggtagtgagaacggggtgaagctgacgctcagtccctcggacggttcgaccaccatcaagaccgcccgcgggcgtatgcacctcgacggcatcgaggtcagtgttcgatga

SEQ ID NO: 51098 - DNA, 1443 bp, Rhodococcus erythropolis
atgagagctcgcgagatcacgccccttgccctcgactcgtatcaacgcgcggcgcgagtgatcctgtccaaccacctgatcacctcgacgtacccggatcgaattgcgttgccgctcttgcgccgttgggccaccgaactgcgtgacgaccttctcgaactgttcggctaccgcctcgaggtgacggagaccaccgcgcgcctgttcacggtgtcggatcggctcaacccgtcggcaccggccagaactgcctccgagcgaaccttcgatcgcacgcgctacgcgtacctggcgatgtgcctggccgcattgggccgcgccggaaaccagatcacgttgtcggagttggccgatcacgtcgcggctgacgcagggcaggtcgacggcgtggaactctccaccgatcgtgcgtccgaccgcgacgccttcgtcgacgcagtgggctggctcggagtcagaggcgccatcgccctcgccgacggtgacgcaaacggctgggcgtccaatcccgaagcgggagaagcactctacgacatcgaccgttccgtcgtcgtagcgctgttccgtccaccgcgcgccctgcagcacctacactccatccgcggactcctggccgtcgagacctcgagcgcctccgaggacgacggaattcccgtggacgcgaaagagatcggacgccgagtacgtcgggcactcgtcgagcgcccggtcgtactggccggtgaactcgatcagcacgaattgatcgcgttggcgcagcccaagaccgcgtcggaagtcgaactactgacggggttggtggccgagcgccgcgccgagggaatcgcgatgatcgatcccaccggccgactctccgacgtccgcttcccgagcaccggaacgatcgctcaggtggcacttctcctggccggcgagattgccgaccgcgtactcgacgtcgacgctcctgaactgccgaaacttccgatcccgcacgtgtcggacgatcacctgatcgaacaactcgatgccgccatccccgaggccgggatcttcgaggacctcgccgacgaggacgacgacttcgtgctgcccgccggcgaaccggccgagccaccgccacccgtcacgtacccgaaaatcgacgacgactggctcgctgacaaggtcaccgagttggtggaccagttcgggcgaactttcgcggcgcagtggcaggccgatcacaacgggctgcgcaagcaggcgctcgggttgctgcaacgtctgcgcctgacgcatgcggtcgacggcggcgtactggtgttgcccgtccttgcccggtaccgcgacgtcgtggtctccgtgcgcgaacgcgatcctcagatcgacttcgcggtggacaactccgcaccggatccggtcgacgaattcggccccgaaccttcccccaacggcgaactatcagaggtagagaacgtatga

SEQ ID NO: 51099 - DNA, 4176 bp, Rhodococcus erythropolis
atgagcaacgcccgcttccgacctactcgggctggaatcatcaacctctgggattaccgagaccaagagttctcgttcgccgacggtcgactggttctgcggggacccaacggatccggcaagaccaaggccctcgaggtcctgttcccgttcgtcttcgacggccgcatcgaaccgcggcgcctcaacccgttcgccggtgaagagcgcacgatgaagtccaacctgctctaccggggccaggacagcgcgcactcctacgtgtggatggagttctgccgcggctccctcgaagatcccgagtcggtgaccgtgggaatcggcatgcgcgcaacacgcaccaacgacaaggtcacccgctggtacttcgtcgccgacggccgcgtcggagtcgacttctcgctgatcggcaacgacgatcgtcctctcaccaagaagcagttggccgaacaactcggcagcgattccatcaccgaccgtcccctcgactaccgcacagccatcgacgcgcgaatgttcggtctcggtgtgcagcgctacgaccagctgatcaatctcattctcacgcttcgccgcccccagctcgcgaagaacctcgacccgaagggcctttcgcaggcactcaccgacggtctccgtccactcgacgatcagttggtcctcgaagctgcgcgttcgttcagcgacatggaggaagtcggccgcgcgctcgaggggctcgcggccgccgatcaggcagcccagagtttcatcggggtctacaccaagtacctgcgtcagcagtctcgcggagagatcgaacaggtcagcacccgcctcgcagcggtcaccagaggtgttgccgccatggacgagtcgtcgctcgcccagacccgcagccgtgaggcgcgggcagcagccgaggagcgcttcaaccaggccgagcaggcactcgagaacgcgcgcgccaatgtcgaagcactgcaacgctcgagcgcgtacgaaggcaaacagcaactcgacgacctcgcccaggccgtcgcgacgctcaagctctcgaccgagcagcaggcagacaagtcccggaaagcgcaggccgcactcgctcaacgcggcgacgaagccgacaaggctgcatcgtcggtcaagcgtgcggccgaagcactctcgcgcgccgaggacgaacttcaggcagcagccgaggacgccggcatcgtctggactcccctgcccgacggctcacgcagtgaccagatcacggcagccgtccgtggccatgccgaggagcgtgacggtgacgtacgcgtcgtccgcaccgcactggcgaccgtcgagaaggcggcgaccgaacgaacccgggccgaaaacagctctcgccgtggacaagagctgctcgaagcgtccaaggccgcggtactcgagggcgaagctgccgtggaactcgcacgcagtcagtgcgccagcgggctgcgcgcgtggtggaccgatcactcctccctgttttcggctgtcggcgccgacacgtcgctgttcgaagctctcgacgcggcgctcgccgaggtcggcgacgaagacgctccggcgctgtccgcagttctcgccgagcacaccgtggccggcaccgagacgctgcgcgagcgtcgacgtgaggccgaagctgaaatatctgcatcacacgcctccatcgcggctctcaaatccgagcgcaaggccgtctccgcggaacacgacgacgctccgcctgccttccacgcacgctccgacaaccgcagtgaactgggtggtgcaccgctatggcagttggtgcgcttcgccgattccgtcgaaccagacgtggccacgggaatcgaatccgcactccaggcggcaaatctgctcgacggctgggtctgcccggacgagaagattcccgagcacgtcagcgagcagttcctgacggctctgcccgtcaagcagcgtccgaagggacgaacgctggccgacgtcctcgaggtcgaaggcaatgccgacgtacccgacgctcgggtacaggacattctcgcgtcgatcagtctcgtcgaggcgccgggcgactccgacgcaagcgtcgcgatcggcgtcgacggccgcttctggcagggcgtcgcgcgtggccggcacgtcaaggccgacgccgagtacatcggcaccacagcacgggcgcgtcgacgcgaggctcggatcaccgagatcgacgcggctctggaagaacttgccgcggcagtcgatacggccatggcactggtggcgcagaccaacgagcaactgagccggatcaactctgcggcaaaggaattgccgaagacaggttcgatcctgcgcgcactcaagacggtcaccgaatccgccggcgcactccgtactcgttcggaggccacggaaacggcacaacgagaactcgatgcggcgatcgctgatctcgcggcgaaggaaaagcaactccgagcgacggcgtcgcagcaccggacgccgcatatcggccgtgaactcgactccctcgcggcggcgatccgtcatttcgagaagcagggggaactggcgctgcgctgccgacgggagcatgccaaggaagtcgaactcgaacgcgagtctcgcgaccgtctcgacgaatcacgcgccaatgcggaggaattcgccgaggaagccgccatcgccgaggagagtctgctccagcaggtgcagcgtctcgagacgctgcgcgacaccctcggtgccagcgccgagcagatcgacctggacctggcaaaagcccgcgcgaagatcgaagaatgcaaggtcgaacagcgtgcggcgcgaaaggcatacgacgccgccgtcctccagatcggcacggcggagggtgcgtacaacaccgccgtggagaccttgcgtcacaccctgaccgaaacccgcagtgatgcagagcgactcgcaccctacgcgcgcccggaccttctcgagttgttgggcgtcaaggaacatctgagctggccggcaagttcagcggcgtggatgagccccgatcagttggtctaccgcatccagaacgaagatcgcagcgaggacgcagcccacccgcccgtcctccccgaagacgtcgacaagttgtaccgagcgctcgaggctgcgacctcggcagtccgagtcaccgacggagcccgcaaggcaacccgcacggcactgacctcggcgttgcaggacttcgacgcccaactcgcagcggccggacaggactaccgtctgcagtgggatgcaccggatgggctgaccgtcgtacgagtccaggacgatcagggctattcgtcgatcggcgagttcgcaacgcggatccacgacgctcgcggcgatcaggagcagttgctcaccgaatccgagcgtcgcattctcgaagatgccctgttgaccggattggctcagcagatccacgagcgcacggtcgacgcacgcgagttgatcgcacagatgggcaccgagatgcgtgagcgtcggatgtcctcaggcaataccatcggcgttcactgggtgctcgccgacaacctcgacgacagctcgcgggcgatctccaagctgctggatcgagacgcgtcggccctcggcgtcgatgaactagctactctgcgagcacatttcgcgacgcagatccgtaccgcccgcgcggcgcaccccgaacgctcgtacccggagattctgtcctcggcgctcgactaccgtcaatggcgcgtgttctcgttcaccctcatcagcggtgagggcaaggaagaccgtcttaccgtcgcgcggcacagcgcgctgtccggtggcgagcagtccgtctcgctgcaccttcctttgttcgccgcggcgcacgtcatgttggactcggccgacccgcacgccccgcgtctgctggcactcgacgaggccttcgccggtgtcgacgacaacggtcgcagcgagcttctcggcttgagcgttcagttcgacctggacctcttcatgaccggctacgacctgtggatcacatacgcagacgtccccggctgtgcgcactacgacctcgcgcactccacggccgaacaggctgtcagcgccgcgctgctggtctggtcgaacggtgagctgcttgccgagcacgacggaacggatctggcgagggcattgggctcgccgctacggcgccgggtgccgacacccgccgaaggtgcgttggactacgcctag

SEQ ID NO: 51100 - DNA, 1473 bp, Enterococcus cecorum
ttggaaaataaaatattacaagcaagctatttaacagcagagaacgtcgaacgctaccgagcgatgatgcgaattttttatgtgcgccaaaaagagttacgtgggattctttttcgtccagacgtcttagagctgatgcaacaatactatcagccagattattcgatgaaggaattagaacaagatattgagcaattagtatcttgggggaatttaacgaaacaacaaattatggttcaaccgaaaagtattgaagaatatctaaatagcaatttccaatatcacatttctccagagggacagttatttgaggaattagctgaaaaacttatcaatatccaaaatgaagttcgaggtgaattgaatcaaaatgatttcatggaattatatcataagattcaagaattcaatgcgctgagtgatgaaagtcaactacttccatcatggcaaaaagtcattgaatcttttgaaaaaataagtagcaatacaacaaattacatttcttatatcaataataatgcgataaatactcatttgcggctagaaagttttatcatctacaaagatcaatttgtaagatatttacaagattttatcattattgttcaaaacctatattataaattgcttcatgaaattgaaaggatatctcaagaaaaatttgtatcagttgccaaagcgtcctatgaaaagaatcagctacgttcctttggtcaaaatgaagaaacagaagaagaaatgctacaacgaattaaaggacaatatcaggcattgctttactggtttaaagatacggaggaaaaagcgagtacttatcaaaatatgatggaacaaacccagattatgattggtaagattactgattttgcacgatattatggttcggagttaaagcaatatcgttcacgtaaaaaagattatttaaaaatcgctcaatggttcatgcaagaaagtgatttaaatcaagcgcataaaatgtttgctggaatttttggattgcaacatacccgccatttttacgttcctgaaagtttacagtcaacgagtaaccgcgatgatttgcgcgatttagcacctgcagttttatctttagggacaagaggacgcggtgctcgctcagaaagaaaatctaaaccagtaaaatttgatttagagctacaaaaacaacagcaaaaagaataccttgaaaaacaagaagcgcaaaaacaacaagttctacaatattttgatggaaataaactagatttaaaagcggtaaaagttatggataaaaagacccgaggaattattttaaaatggattagtcgtggttattacagttcaaatcatttattacaaacagagtatggttttatggttcgtttgcatattcaaaaagaggattcaattgtattaaaaggcgaagatggtgatttacagatgcctcatattgtcattgaaaggatggaaagaactgaatcaggaaacttttag

SEQ ID NO: 51101 - DNA, 1122 bp, Enterococcus cecorum
ctgaatcaggaaacttttagtacttgcttaaatttactctttgaaaatttttggattataaagactactcaacctgaggaatatcgtctcattaaacgttatcgtaaagagttagatattgaattaagaaaaagatttgggttgagcttgctagtgaggcctcagtttattcaattgtttagacgtccttttcatctacaagaatggatgggcatagaagattttaaagatgtaatggattatgttttgctgatgcatgcgatggcttatattgaagagcaagaaacgaatacctattttttacttaatgagttgattgaatccatagaaagagatttgccagaagattatcatttagaatggactaattatcttcatcgaaaaagtttggttcgcgtgctaaaaaaattaattgatttggcgatattagaagtgattcaaggcgaaatagaattatttgaacaaaacgaagaccgtaacattttgtatacaattactactcagagtcgctatttacttggaaaaacaccaaatgcatttgttaagtatgagggctttgatgatttttggcaagagattcaaaataatcagttagaagattcaaatcaggcactatttactcagctaatgtgcgaacctgttttgtatcgtaatgcagaaaatgagcaagattttatcagattgcgcaattatcagtcggtgtttgcgcgttttgtagaagaaaaaacggattatcaattcgaattaacgaaagatgtagcgatatttactttggataaaagagatagcagtcgagatatttttccaagccgtaaagtgctagatgaaattttagtccagctacaaactgtattatttgatcaagaacagcaagtggatacttatggggtaggtttatttacaatgagtcaatggcaacttgctgtggaaaagttaaaacaggatttccaatcattttggtctaaggaatataaggaattaaagatttcggaattagctaatcgcttgttagaaagagcgcaagagtttcaaatggtcaaagtaatagatgaggtcatttatttacagccagttttaactagaatggtagcaaaaatggaggataaaagagatgaaaaataa

SEQ ID NO: 51102 - DNA, 4059 bp, Enterococcus cecorum
atgaaaaataaatggcagattaatcgtgtaggattacaaaatttttggtattaccaagatcaagtttttgagttcgctcaaggaaagcttttattgagaggttcaaatggttctggaaaatcagtgactactcaaagtttgttgccaccattattagacggaataaccagagcaaaccgcttagattcatttggcagtacctctagaaaaattgaagactatctattaggggaagaagaagtttcaggaaaagacgaagctactggatatttgtttattgaatacaaaaaaacaaatagcgaagaatattttactagtggcatgggcctcaattttaaacgtggagggcaattgcgaaaatggttcttcgccatagatgatcatagccgcataggtatggatttcaatttatatcaatcttcagttgatggacggatctacttatcacgactgcaactaaagaatttaatcgtggatggtaaacacggtaaattgtttgatgatgcaaaaagttatcaacgttatatcaatgaccgtatctttggctttcaatcgatggaacagtataatgatttgatacaattacttattcgactaagagcacccaaactttctcgagattttaaaccgtctgttatttatgagattttacagtcatcattaccggttttagatagtgataccttattaccattgacccaaacgattcaaaacatcgatgataatcacgatcaattagatactttgctagatgaaacaaaacaattatcgcgttttttacgttattatcagcagtatcaagaagaattaactgctcaaattgctgaaaattggttagaaaaagatgctattgttcaagacatatctgctaaattaacacaattaaagcaaagtatagatagtctcaatcaagaactcagccaaaaagaaaatcagcttaaagaattaaaaataagacaaccggttctcgaaaatacagtaagtgagctaaaaaatcatgaaggtttccaattgattcaacgcgctaaagatttacaagatagctttaataaggttcgtaaaagattagaagaaatagaaaatcaattacatcaaaagcttgaaaagaagcaagaaactagcaaaaaaattgatgaattgcagacaactatgtatcaaacagaaaaagagttaaatgattatctagaaagcgccagtcaatatattgaagatctatcattagagtatatccatcaaaatatttgtgctaaactctttgaaaaattaactcgagaagatgaacaatacttaatgaaagaagttactaaaaaagaacaattcattcaaaaaatcattcaacaaatgagaaatttaagtaagttagcgattgaagaaaaggaaaaaagtaacgaattagctgaactacaaaaaatattggatgaattaaaacgtgatcaaagtcaatggcagcaaggatttgttgatgaagtacagaagtggaaagaacaaataaatgcgtggcgtgctaaaagtccagttatgattgcagatgaagttatccaacaagtgtattatcaattagatcaaattcaagtaacggatgaattcgtttctgaagtatttctcttgcctctaaaaactgtatttgaacaagctaatgaacaaatattgcatcatattcaatcaaccaatgtaataatcgagcaaaaggagagtaagttacgaggactacaagtagaaatcgaaacttggaaaaatgaacgtgatccaattcctgctcgttcattgatccgccaagagaatagaaatcatctaaatgaaagtcaaaagcaatatgccttctttgaattaatcgactttaaatcagacattactgatgagcaaaaaaatatcttagagggcacgttgtatagttcagggctgttagatgcactggttgcaaaagaaaaattagatttagcagatgatattcagattgtggcaaatccgcagttactgtgttcgacattagcggattattgtgaagttgccgcagatacacctggagaattagttgaacttgtagcagaatttttacaaaccattttagttgacgagggtaaagagggatgtccgtcgatatatttagatggtcattttgagttagcaggtatttatgggaagatggttcctaattatcaagcgagttttattggaaaattgagtcgcgaaagatatcgacaacaaaaaattgcagaattaacagaagaggttaatcaattagcaaaagaaatatcgcttcttcaacagcaattagagacatatcgtcttgagcaatcacgtcaaagagaatatttatccctgattcccgatacagaacaaattagagaagcaatgaaacaatatcgatcagttagcgaaaaaatcaacgtacgtatagaagaaattcaacggaaaaatcagatttatcttgcattaaaacagaaaatagctgatgtcaatcgagaaatcatgctacagacgcaaaaagaaagaatcacgccaaagctagaaagttacgaagaagccttggtatttttgaaaaactatcaggcagatatgcaagcaagctttagacaatatgatcaactatatgtccaaaagaagcatgaaaaggaactatctcagcaattagcggatattcatcaagatatcgctattatcgagcaaagtaatcaacagtatctacaggaagaaaataccttacagcaacagataactgaaaatacagcccaacaagaattacaaaacatttcagaaataaaacaacgaattaatgaaaaagaagaggaattaactgaagtaaaagataaaattgaagaaacacgaaatcaaaaagaacaattaaatatgcaattggctttagaaaaatctcagtatttattacagcaagaaaattatgaaaaaaatgcaccagtaaatattctatggaaaaagttaattcaaacacatttacaaattgaagatacagaaagattgcaacgtgaggcgcaaaaaatagctcgtccaaaagattttgatttactttttaaaaatgaaagaaagttagaagatgaatttagatacttagctgataatgtgcgcgaatatcagccaaaaatgagtcgtgaagtggatgtttctactgatttaacacaagaagatgattcgatacaaacttttaaaaactattctcagagattaatcgccactttcagattggaccaacaaagtctaggaccaaacgagcttttatcgtttttggaaaatcagatagctattgtcaaaaatactttaaaggctgatgatgaaaaactatttaaacaaattatatttgactctgttggtaaagtcctccgcgcattaattgagcgggcatttatttgggttgaagagattgatcaattgctaaagagccgtaaaaattctcaaggactaaagctttctttacgtttgaaaaatataggtgctcaaaacgaacacgaattgggtactaaagatttaattgctttattaagaaaagatccaattacattaaatgaatcagatagtagacttttagttgaacactttcaatcaaaaattcaagatgctaaagaattgattgcagatgagagcacagagggtaatttatcgagtgctatcgctgaagtattggattatcgaaaatggtttacttttgaattgcaatttagacgtgcaaatgaaaattatccttggcgtccattatccgataaccaatttaatatttttagtggtggagagaaggctatttccatgtatttaccactgtttgcggccgtatatgctcggtacgaagaggctagtgattacgctccgtatattattacgttggatgaagcatttgctggtgtggatgagctaaatattgaagatttatttgctacttgcgaggagttaggcttcaattatatctttaactctcaagctttatatggagaatatgcaagtgttagtgctttagcgacttatgaattaattcgtccgcaaaatgcgcctgtcgtatcaaccattaaatatttatggaatgggcatcaaaagcaggtgagtccaattgagtaa

SEQ ID NO: 51103 - DNA, 1242 bp, Enterococcus cecorum; identical to SEQ ID NO: 50507

SEQ ID NO: 51104 - DNA, 1473 bp, Enterococcus cecorum
ttggaaaataaaatattacaagcaagctatttaacagcagaaaacgtcgaacgctaccgagcgatgatgcgaattttttatgtgcgccaaaaagagttacgtgggattctttttcgtccagacgtcttagagctgatgcaacaatactatcagccagattattcgatgaaggaattagaacaagatattgagcaattagtatcttgggggaatttaacgaaacaacaaattatggttcaaccgaaaagtattgaagaatatctaaatagcaatttccaatatcacatttctccagagggacagttatttgaggaattagctgaaaaacttatcaatatccaaaatgaagttcgaggtgaattgaatcaaaatgatttcatggaattatatcataagattcaagaattcaatgcgctgagtgatgagagtcaactacttccatcatggcaaaaagtcattgaatcttttgaaaaaataagtagcaatacaacaaattacatttcttatatcaataataatgcgataaatactcatttgcggctagaaagttttatcatctacaaagatcaatttgtaagatatttacaagattttatcattattgttcaaaacctatattataaattgcttcatgaaattgaaaggatatctcaagaaaaatttgtatcagttgccaaagcgtcctatgaaaagaatcagctacgttcctttggtcaaaatgaagaaacagaagaagaaatgctacaacgaattaaaggacaatatcaggcattgctttactggtttaaagatacggaggaaaaagcgagtacttatcaaaatatgatggaacaaacccagattatgattggtaagattactgattttgcacgatattatggttcggagttaaagcaatatcgttcacgtaaaaaagattatttaaaaatcgctcaatggttcatgcaagaaagtgatttaaatcaagcgcataaaatgtttgctggaatttttggattgcaacatacccgccatttttacgttcctgaaagtttacagtcaacgagtaaccgcgatgatttgcgcgatttagcacctgcagttttatctttagggacaagaggacgaggtgctcgctcagaaagaaaatctaaaccagtaaaatttgatttagagctacaaaaacaacagcaaaaagaataccttgaaaaacaagaagcgcaaaaacaacaagttctacaatattttgatggaaataaactggatttaaaagcggtaaaagttatggataaaaagacccgaggaattattttaaaatggattagtcgtggttattacagttcaaatcatttattacaaacagagtatggttttatggttcgtttgcatattcaaaaagaggattcaattgtattaaaaggcgaagatggtgatttacagatgcctcatattgtcattgaaaggatggaaagaaatgaatcaggaaacttttag

SEQ ID NO: 51105 - DNA, 1122 bp, Enterococcus cecorum
atgaatcaggaaacttttagtacttgcttaaatttactctttgaaaatttttggattgtaaagactactcaacctgaggaatatcgtctcattaaacgttatcgtaaagagttagatattgaattaagaaaaagatttgggttgagcttgctagtgaggcctcagtttattcaattgtttagacgtccttttcatctacaaggatggatgggcatagaagattttaaagatgtaatggattatgttttgctgatgcatgcgatggcttatattgaagagcaagaaacgaatacctattttttacttaatgagttgattgaatccatagaaagagatttgccagaagattatcatttagaatggactaattatcttcatcgaaaaagtttggttcgcgtgctaaaaaaattaattgatttggcgatattagaagtgattcaaggcgaaatagaattatttgaacaaaacgaagaccgtaacattttgtatacaattactactcagagtcgctatttacttggaaaaacaccagatgcatttgttaagtatgagggttttgatgatttttggcaagagattcaaaataatcagttagaagattcaaatcaggcactatttactcagctaatgtgcgaacctgttttgtatcgtaatgcagaaaatgagcaagattttatcagattgcgcaattatcagtcggtgtttgcgcgttttgtagaagaaaaaacggattatcaattcgaattaacgaaagatgtagcgatgtttactttggataaaagagatagcagtcgagatatttttccaagccgtaaagtgctagatgaaattttagtccagctacaaactgtattatttgatcaagaacagcaagtggatacttatggggtaggtttatttacaatgagtcaatggcaacttgctgtggaaaagttaaaacaggatttccaatcattttggtctaaggaatataaggaattaaagatttcggaattagctaatcgcttgttagaaagagcgcaagagtttcaaatggtcaaagtaatagatgaggtcatttatttacagccagttttaactagaatggtagcaaaaatggaggataaaagagatgaaaaataa

SEQ ID NO: 51106 - DNA, 4059 bp, Enterococcus cecorum
atgaaaaataaatggcagattaatcgtgtcggattacaaaatttttggtattatcaagatcaagtttttgagttcgctcaaggaaagcttttattgagaggttcaaatggttctggaaaatcagtgactactcaaagtttgttgccaccattattagacggaataaccagagcaaaccgcttagattcatttggcagtacctctagaaaaattgaagactatctattaggggaagaagaagtttcaggaaaagacgaagctactggatatttgtttattgaatacaaaaaaacaaatagcgaagaatattttactagtggcatgggcctcaattttaaacgtggagggcaattgcgaaaatggttcttcgccatagatgatcatagccgcataggtatggatttcaatttatatcaatcttcagttgatggacggatctacttatcacgactgcaactaaagaatttaatcgtggatggtaaacacggtaaattgtttgatgatgcgaaaagttatcaacgttatatcaatgaccgtatctttggctttcaatcgatggaacagtataatgatttgatacaattacttattcgactaagagcacccaaactttctcgggattttaaaccgtctgttatttatgagattttacagtcatccttaccggttttagatagtgataccttattaccgttgacccaaacgattcaaaacatcgatgataatcacgatcaattagatactttgctagatgaaacaaaacaattatcgcgttttttacgttattatcagcagtatcaagaagaattaactgctcaaattgctgaaaattggttagaaaaagatgctattgttcaagacatatctgctaaattaacacaattagagcaaagtatagatagtctcaatcaagaactcagccaaaaagaaaatcagcttaaagaattaaaaataagacaaccggttctcgaaaatacagtaagtgagctaaaaaatcatgaaggtttccaattgattcaacgcgctaaagatttacaagatagctttaataaggttcgtaaaagattagaagaaatagaaaatcaattacatcaaaagcttgaaaagaagcaaaaaactagcaaaaaaattgatgaattgcagacaactatgtatcaaacagaaaaagagttaaatgattatctagaaagcgccagtcaatatattgaagatctatcattagagtatatccatcaaaatatttgtgctaaactctttgaaaaattaactcgagaagatgaacaatacttaatgaaagaagttactaaaaaagaacaattcattcaaaaaatcattcaacaaatgagaaatttaagtaagttagcgattgaagaaaaggaaaaaagtaacgaattagctgaactacaaataatattggatgaattaaaacgtgatcaaagtcaatggcagcaaggatttgttgacgaagtacagaagtggaaagaacaaataaatgcgtggcgtgctaaaagtccagttatgattgcagatgaagttatccaacaagtgtattatcaattagatcaaattcaagtaacggatgaattcgtttctgaagtatttctcttgcctctaaaaagtgtatttgaacaagctaatgaacaaatattgcatcatattcaatcaaccaatgtaataatcgagcaaaaggagagcaagttacgaggactacaagtagaaatcgaaacttggaaaaatgaacgtgatccaattcctgctcgttcattgatccgccaagagaatagaaatcatctaaatgaaagtcaaaagcaatatgccttctttgaattaatcgactttaaatcagacattactgatgagcaaaaaaatatcttagagggcacgttatatagttcagggatgttagatgcactggttgcaaaagaaaaattagatttagcagatgatattcagattgtggcaaatccgcagttactgtgttcgacattagcggattattgtgaagttgccgcagatacacctggagaattagttgaacttgtagcagaatttttacaaactattttagttgacgagggtaaagagggatgtccgtcgatatatttagatggtcattttgagttagcaggtatttatgggaagatggttcctaattatcaagcgagttttattggaaaattgagtcgcgaaagatatcgacaacaaaaaattgcagaattaacagaagaggttaatcaattagcaaaagaaatatcgcttcttcaacagcaattagagacatatcgtcttgagcaatcacgtcaaagagaatatttatccctgattcccgatacagaacaaattagagaagcaatgaaacaatatcgatcagttagcgaaaaaatcaacgtacgtatagaagaaattcaacggaaaaatcagatttatcttgcattaaaacagaaaatagctgatgtcaatcgagaaatcatgctacagacgcaaaaagaaagaatcacgccaaagctagaaagttacgaagaagccttggtatttttgaaaaactatcaggcagatatgcaagcaagctttagacaatatgatcaactatatgtccaaaagaagcatgaaaaggaactatctcagcaattagcggatattcatcaagatatcgctattatcgagcaaagtaatcaacagtatctacaggaagaaaataccttacagcaacagataactgaaaatacagcccaacaagaattacaaaacatttcagaaataaaacaacgaattaatgaaaaagaagaggaattaactgaagtaaaagataaaattgaagaaacacgaaatcaaaaagaacaattaaatatgcaattggctttagaaaaatctcagtatttattacagcaagaaaattatgaaaaaaatgcaccagtaaatattctatggaaaaagttaattcaaacacatttacaaattgaagatacagaaagattgcaacgtgaggcgcaaaaaatagctcgtccaaaagattttgatttactttttaagaatgaaagaaagttagaagatgaatttagatacttagctgataatgtgcgcgaatatcagccaaaaatgagtcgtgaagtggatgtttctactgatttaacacaagaagatgattcgatacaaacttttaaaaactattctcagagattaatcgccactttcagattggaccaacaaagtctaggaccaaacgagcttttatcgtttttggaaaatcagatagctattgtcaaaaatactttaaaggctgatgatgaaaaactatttaaacaaattatatttgactctgttggtaaagtcctccgcgcattaattgagcgggcatttatttgggttgaagagattgatcaattgctaaagagccgtaaaaattctcaaggactaaagctttctttacgtttgaaaaatataggtgctcaaaacgaacacgaattgggtactaaagatttaattgctttattaagaaaagatccaattacattaaatgaatcagatagtagacttttagttgaacactttcaatcaaaaattcaagatgctaaagaattgattgcagatgagagcacagagggtaatttatcgagtgctatcgctgaagtattggattatcgaaaatggtttacttttgaattgcaatttagacgtgcaaatgaaaattatccttggcgtccattatccgataaccaatttaatatttttagtggtggagagaaggctatttccatgtatttaccactgtttgcggccgtatatgctcggtacgaagaggctagtgattacgctccgtatattattacgttggatgaagcatttgctggtgtagatgagctaaatattgaagatttatttgctacttgcgaggagttaggcttcaattatatctttaactctcaagcattatatggagaatatgcaagtgttagtgctttagcgacttatgaattaattcgtccacaaaatgcgcctgtcgtatcaaccattagatatttatggaatgggcatcaaaagcaggtgagtccaattgagtaa

SEQ ID NO: 51107 - DNA, 1242 bp, Enterococcus cecorum
ttgagtaaattgcaagctaaaaaatattttcaagaacctatctttgtgtggcttgctcaacgattacgaaaaaattattatcataaaaaggcatttggttcgcgagttaaactaccgaatgatgtggatttattaccgctatatcgttttttaggactaggcagtgttcaaagtcgtagttatcagcaactttctattatgcaatttgaagctgcattacaacaaagtaaatttgagctttccttatctgaatatgtgtatctttttgatgacactgaattaatagataaggaaactgaaaaacaaaattatgaagcaagctttcaggaattcttacaaaaactaaaaccattttcgttggattttgaacatcttttaagtaaaaagcagttacaagaatggtttgaaaaagaaaatttatcagcatttcaacaagtggatattgcttttagtcaattaccacaagattttacgagactgcctttttttgcttatcaaattactggcaatccacatgcttttgataaatcacaaccagtgggagagttattcttacaaattttaagcactaaatatttagaaaatatccgtcaagattctgattttttagcccaagcagagattgaacaattactttatcaacaagtgtatttgttgaaagatgatattttaaactttgttgcgctacatcggatttcaggatatgttaatcatcaagaagtgcctgtttggcggtcaattgcgaactcagatatgtcttggaatgcatcagttagagaattgttgaaagttgatgaattaagaccagtaaattatccttttgtgattctagttgagaattcaggcgtgtattctctattacttgagcggttccctgatttaccgcttttatgtaccagcggacagatgaaatttgccgtttgggttgcattgcgaaaattgacgcaacagcaaaaggtccagctgtattatgcaggagatatggatccagaaggtttgttaatggcagataagttgtcgaaagtatttttaaaacgaatctcttttttggcgatggataaggaagcctttgaacagggaaaagagagaaagatatacgagatgaatcgtctaaaaaagatgaatcaaattgaaaatgaaggattaaagcaactgattccattgattcagcaaaatcaggtttgctatcaagaaggatgcatcgattatttgattcagcaaattgaacaaatactatcttaa

SEQ ID NO: 51108 - DNA, 1473 bp, Enterococcus cecorum; identical to SEQ ID NO: 50504

SEQ ID NO: 51109 - DNA, 1122 bp, Enterococcus cecorum
atgaatcaggaaacttttagtacttgcttaaatttactctttgaaaatttttggattataaagactactcaacctgaggaatatcgtctcattaaacgttatcgtaaagagttagatattgaattaagaaaaagatttgggttgagcttgctagtgaggcctcagtttattcaattgtttagacgtccttttcatctacaagaatggatgggcatagaagattttaaagatgtaatggattatgttttgctgatgcatgcgatggcttatattgaagagcaagcaacgaatacctattttttacttaatgagttgattgaatccatagaaagagatttgccagaagattatcatttagaatggactaattatcttcatcgaaaaagtttggttcgcgtgctaaaaaaattaattgatttggcgatattagaagtgattcaaggcgaaatagaattatttgaacaaaacgaagaccgtaacattttgtatacaattactactcagagtcgctatttacttggaaaaacaccaaatgcatttgttaagtatgagggctttgatgatttttggcaagagattcaaaataatcagttagaagattcaaatcaggcactatttactcagctaatgtgcgaacctgttttgtatcgtaatgcagaaaatgagcaagattttatcagattgcgcaattatcagtcggtgtttgcgcgttttgtagaagaaaaaacggattatcaattcgaattaacgaaagatgtagcgatgtttactttggataaaagagatagcagtcgagatatttttccaagccgtaaagtgctagatgaaattttagtccagctacaaactgtattatttgatcaagaacagcaagtggatacttatggggtaggtttatttacaatgagtcaatggcaacttgctgtggaaaagttaaaacaggatttccaatcattttggtctaaggaatataaggaattaaagatttcggaattagctaatcgcttgttagaaagagcgcaagagtttcaaatggtcaaagtaatagatgaggtcatttatttacagccagttttaactagaatggtagcaaaaatggaggataaaagagatgaaaaataa

SEQ ID NO: 51110 - DNA, 4059 bp, Enterococcus cecorum; identical to SEQ ID NO: 50506

SEQ ID NO: 51111 - DNA, 1242 bp, Enterococcus cecorum; identical to SEQ ID NO: 50507

SEQ ID NO: 51112 - DNA, 1473 bp, Enterococcus cecorum; identical to SEQ ID NO: 50504

SEQ ID NO: 51113 - DNA, 1122 bp, Enterococcus cecorum; identical to SEQ ID NO: 50505

SEQ ID NO: 51114 - DNA, 4059 bp, Enterococcus cecorum; identical to SEQ ID NO: 50506

SEQ ID NO: 51115 - DNA, 1242 bp, Enterococcus cecorum
ttgagtaaattgcaagctaaaaaatattttcaagaacctatctttgtgtggcttgctcaacgattacgaaaaaattattatcataaaaaggcatttggttcgcgagttaaactaccgaatgatgtggatttattaccgctatatcgttttttaggactaggcagtgttcaaagtcgtagttatcagcagctttctattaagcaatttgaagctgcattacaacaaagtaaatttgagctttccttatctgaatatgtgtatctttttgatgacactgaattaatagataaggaaactgaaaaacaaaattatgaagcaagctttcaggaattcttacaaaaactaaaaccattttcgttggattttgaacatcttttaagtaaaaagcagttacaagaatggtttgaaaaagaaaatttatcagcatttcaacaagtggatattgcttttagtcaattaccacaagattttacgagactgcctttttttgcttatcaaattactggcaatccacatacttttgataaatcacaaccagtgggagagttattcttacaaattttaagcactaaatatttagaaaatatccgtcaagattctgattttttagcccaagcagagattgaacaattactttaccaacaagtgtatttgttgaaagatgatattttaaactttgttgcgctacatcggatttcaggatatgttaatcatcaagaagtgcctgtttggcggtcaattgcgaactcagatatgtcttggaatgcatcagttagagaattgttgaaagttgatgaattaagaccagtaaattatccttttgtgattctagttgagaattcaggcgtgtattctctattacttgagcgtttccctgatttaccgcttttatgtaccagtggacagatgaaatttgccgtttgggttgcattgcgaaaattgacgcaacagcaaaaggttcagctgtattatgcaggagatatggatccagaaggtttgttaatggtagataagttatcgaaagcatttttaaaacgaatctcttttttggcgatggataaggaagcctttgaacagggaaaagagagaaagatatacgagatgaatcgtctaaaaaagatgaatcaaattgaaaatgaaggattaaagcaactgattccattgattcagcaaaatcaggtttgctatcaagaaggatgcatcgattatttgattcagcaaattgaacaaatactatcttaa

SEQ ID NO: 51116 - DNA, 1491 bp, Geobacillus sp. T6; identical to SEQ ID NO: 50217

SEQ ID NO: 51117 - DNA, 1197 bp, Geobacillus sp. T6; identical to SEQ ID NO: 50218

SEQ ID NO: 51118 - DNA, 4122 bp, Geobacillus sp. T6
atggcgaatccatgggtgcttcatcgtgcggggctgattaatttttggtattacgacgagcagtattttcatttcgctgacggtaagctgctcttgcggggaagcaacggggcgggcaagtcggtgacgatgcaaagcttgatcccggtgcttttagacggcaagaagacgcccgatcgcctcgatccgttcggttcacgggcgcggcgcatggaagactacttgcttggggaaaaagatgtcgtcaatcgcgatgagcggaccgggtatttgtttttggaatataaacggaaagaatccgaccaatacgtcacaacgggcatcggcctgcgcgcgaagcggcaaaaaagcctcgatttctgggggtttgtcctctttgacaaccgccgcatcggctatgaccttcagttgtataaacaagaaaaaacaggtgaaaaaatcccgctgaccaagcgggagctggccacagcgctcggcgcgggcgggacggtcgtcgagacgcaaaaagactatatggagctcgtcaataagcatgtgtttcgctttgaatcgcttgaggcgtttcaagaattgatcgagctgctcattcaactgcgcagcccgaagctgtccaaagactttaagccgaccgtgatttatgaaattttggaaagctcgctgcctccgttgaccgacgacgagctccgccatttatcggacacgatcgaaaacatggaccaggcgaagcagcagcttgagcagctcgaacgcgacgagcgggcgttgaagcgtctttgcgatcaataccgcctttacaacgaatatatgatcgccgaaaaggcgacagaatacgtaaaagcggtcaagcaagccgaacagctcgctgctgcacaacaccgccttcacgatgaagaagagcaggcgcgaaagacgcttgatgagcttgatgagtccatcacccgcctccgccgtgaagaagacgtgctgcgttcacgcgaaatcgacttggctggccacgaagtgttccagcaagcggagaagtatgaacagttgaaatcggagagggagcgtctgcaggagcggtgggagcggcacgagcagacgatcgcggaaaaagaacggctggaacgccaacatcgccgccgcctcgatgaatcggaagcgcggctggatgaccttgaacggaaacttgaagacgagttggcgcagctgcgagcggatgcggaagaaggagccttttctttgcatgaaacgaacgaagacgattttcaccgccatcgccaaaagcaacaagagttttcgtttgccgcttggaaacaggaagctgaccgccatatcgagcagctcgaggagttggcgcgcctttggcgcaggcatgacgatgtgaaacgacgctatgaagaagcgagcaccgaagcgggcgagcggcggcgggaaatggacgaatggcgtcatcagcaacagaaatgggaagagctgctcgagcaggagaaagagcggtttgaacaagccgtgcttgcctgggtcgagcaaggaggaatcgacgtttccgaagcggacattcaggcgtttttgcgacaaatgggcgccctctatgagctgtattcgctcgatgatctgaagcgcccgttcgttcaagcgtattacgatgccgtcggtaagaaaaaggatgagaaatggcggctcgaacatgacatccgtctgttggaagagaaacgggcagaacgtgaggccgaactgcgtcaatggcgggaacaacgcgaccctgaacccgaacgggatgaacaaacgacagccgcccgcttggcattggaacgggaagggattccgtttgtcccgttttatgccgcggtcgaatttgtcgacgatgtgcctgacgatgtgcgcgagcggatcgaatcggcgctttcgcacgctgggttgcttgacgccctcattgcggcccgcgatgtcgacgtcgactgcgaccgtgtgctcatcccgaaaccggttcatatggtgcatacgttggccgattatttgcgcccagatgcggatgcccctgtgtcggcggagcggattgacgaagtgctccgaagcatcgtgatcaccgatgcggaacaaaaaggcggcatgacgatcgacgaaacaggacgctattcgctcggccttgtccgtggccatgcgccgcggagagcgcgggcgatgttcatcggccgtgcggcgcgggagcggtggcggcttgagaacatcgcggcgctggaagccgagatcgccgctgtgggacaagagatcgaccgtctacgtcgtgagcatcaggcggtgggagcggccatccaagcgcttgccgactggtttgtgtccttcccatcggaccgcgatgtgcgcaccgcgtttgaggaagggcaagaagcccgccgccaagccgaaagcaaagaacgggaatggaagcggcaagaagaaaaagccgccctcctcgcgcgcgaatggaaacaaatcaaacaacagctccatgacgagtcggccgagcttgatttggcttttaccttggacggctgcgaacaagcccagctcgccatgaaatcgtacgtccgccatttgcacgaactcgaagtgctttaccgcgaaacgcgccataccgaggccatgatcgcccaacagcgcgagcggctcgcggcgctggaaacggagatcgacgaagcgaaaggcgaacgaaatcggattcgggatgaaaaagagcggatctccttggagatcgttgagatggaacggacgctcgcccaaatgggagcggatgacattcgcgcggaaatcgcccgcatccaagaacgattggcgtttttgcgccaagaaattccgcgccttgtcaacgaacgggcgcggacggaacagcgcctcatgcgcttagtcgaagagcgggaaaaaggagcgcaacgggaagagttcgcctgccagctggccgccatgtgggagcggtcgtttgccgatgaagcggcgcttgggctcgtggatcttgatcgttcacgttcgcttttggagcaggccagagaagcgaaacaacggtatgaaacagtgttaaaagagacgcgttcctcgcttttggcgcggctgaacaccgtcttcttccaagagtcgtccaacttgaccgaataccgggcgacgttcgagcggctggcggaacaaaaggagtccgaatggatcgccgccgccccagacgacgagatggcgatgaaagcggccgattggcgggaaaaacaagaacggcatgtcatttatctcgactacaaaggccagcgtgccacgccgtttgccgtgctcgccgaggtggagcgcgacatcgccttgcagcacgagtatatgaaggagcaagaccgcgagctgtatgaggacgtcattttaaaatcagtcggccgcattttgcgcagccgcatccagcgcgccgagcggtgggtgagcgatatgaacaaactgatgggaggtctcgacacgtcatcagggctcgtgctgtccattcaatggaagccgaaaacggcggagacggaagcggagctggatacgaaagagttggtccgtctgttgcggatcgattcgcggctgttgaaagaggaagatttgcagcgggtgacgaaccatttccgctcgaaaatcgcccgcgcccgcgaattgcttgaggagcgcggccaaggcaacacactccatcaaattattaaagaagtgctcgactatcggaaatggtttgccttcaccttgtactatgaaaaaacaaatgagccgaaacgcgagctgacgaaccaccgtttttaccaattcagcggcggggaaaaggcgatggcgatgtacattccccttttcgccgcggcgtattcgcgctaccaagaagcgggcgatgacgccccgtacatcatttcgctcgacgaggcgttcgccggcgttgacgaaaacaacatccgcaacctgtttggacttgtcgaacagctcggctttaactacatcatgaactcgcaggcgctttggggcgactacgacaccgtgcccgctttgtccatttgcgaactcgtccgcccgcgcaatgcgtcgtttgtgaccgtcattcattaccgttggaacggccgcgtcaaacagctgatggtcaatgataaagaatgggagacgatcgagacgtga

SEQ ID NO: 51119 - DNA, 1221 bp, Geobacillus sp. T6
gtgagcacggccaaggaggcggctgcctttttccgctctgaaccgggcttccgccgtctgtttatcgagatgaagcacaagtacgagtcgctcggccgcgtcggcggtgcggtgtctttagaggcgttcaccgatgaagagcgggaggcggtggccgcctttttcggcaaagacgtctcccgcgtctcccttatcgcgtttgaaaaacagctcggacagacgaggtttgcgggcgttgggcttgtcgagctgcttgaacagtacttcggcgccccgcttgtctcaaacaaagaacggcgccaggcggaggaagaggaacgggatcgtttttttgcgcgtctgaccgaggagcatcattgggttgagtcggtccgccctcagcgcttcgtccaaacggcgtacgaaaccgaccgccgcagcctggaggaggccctccgccttgtcagcgccgctttgggccgcctcccgctcccgtcatacatgcgcctcccgctctttgcccagcaagtggcgggcgacccgcacgcgttcgatttgtccacgctaccggggagattgttgctttcggcgttgcaagcgaccgtgcctggggactgggacatggcatctgtagagagcgtcaacgagttgctccagtccgtcggcttgctccgtgaggatatcctgaactttgtcacatgcgccaacattcttgctgaaaccaaggacggaccgcatcctgttttctccgctgcctgggagacgaacacggcgctgaacatgccgcttagagatgtgctatcgcttgtccgcgcccgccctgcccatggggggacggtgtacattgtcgaaaacgcgggcgtcttttcgacgctgcttgacacccgcgccccgcttgtcagcacgaacgggcaaatgaacttggcgacgatgaagctgctcgatttgctcgcggcctctggcgccaagctgtattattccggcgacttcgacccagaaggattggccatggcagagcggctgcaggagcggtatggacaggccgtcaccctttggcgcttttccgtcgaggattatagggccgccaaccctgtcgtcgacctcacccccgagcgcctcgccaagctcgcatccgtaacgtcgacgccgctgcagccgctgaaagaggagatggcggaaacgaaaaaagcggggtatcaagaggcaattatcgggaggctgacagaggatatcaacgggtag

SEQ ID NO: 51120 - DNA, 1488 bp, Bacillus vireti; identical to SEQ ID NO: 50678

SEQ ID NO: 51121 - DNA, 1161 bp, Bacillus vireti
atggaacaaacgcaattattcgatgaaaaggcaatccaaggaatggacatcttgtttcatcattactggatcttacgtgccgaacaacctgaatggtatcagctgattcgtgagcgggagaaggtattgcgccgctatcttgatgaaaagttcggcctgcggctaattgttcatcaacattttattaaactggaaaaaattcctgttgaaccggaaggctggatgggcatccaagatttccaagagccaatggactatgcgattttttgctgcgcacttgcctttttagaggggaaagcagtggatgaacagtttttgctttccgaactatgtcaagagattcaagccgattatcctggagattttccgcttgattggacgctctatacccaccggaaatcattgataagagctgtaaaagttttgatggaatttcagctcatacgaaccattgatggggatatcggccgcttcgatcaaaatgaagagcaggaagttttatatgaagctagcacctatagtcgatatttcatgagaacatatccagatgatttttcgagctatcagcactggagcgagttactaaaagaagattggaaattgaaccaagaggatgaacgtaggaagcgggtgtaccgcaagctgttcttttcacctggtttgcatcggctagatcaacaggatcctgattttctctatatccggaactatcgtaaccgcttagcagaagatattgaaaagcacagtgagtataaactccatgtctataaaaatacggcatttttatcgattgcggagccaaggcaatatcaacaggtttttcctaattccaaggcatccactgacattatccttcagttgtcaaagtacattcatggggagcctgagcgcttcaaagcaaacgaaaatggtgaaatactgatgacggaaggtgagtttgaacaagttgtggatgatttacggcagcaatttggaacaggctgggcaaagtattttcgcgatatgagtacaaaaggaattcgaacggaactgcttcgtgccatgaaggattggatgatggcggaagtggattcagaaacttctcttattcggattaagtcattaacaggggtcatgacgggggaatatccgagtgattttcaaacaggaggaacagaatga

SEQ ID NO: 51122 - DNA, 4110 bp, Bacillus vireti; identical to SEQ ID NO: 50680

SEQ ID NO: 51123 - DNA, 1296 bp, Bacillus vireti; identical to SEQ ID NO: 50681

SEQ ID NO: 51124 - DNA, 1491 bp, Geobacillus sp. 12AMOR1
atggacgccacgtggttgaagcccattgtcgaaacaaaatatttatcgacggaaaacgcgcaccgctaccgggcgattttgcgctatttctacattcagcacgagcggatgcggcaatatttgtttccggaagaagtgtacgcctttttaaagcagcacgaggagtttgccgattacactgaggaagagctgcagcaagacctcgaccagctcgtgaaatggaacaacttgatcgcccgtcaagagacgtcccacgtgcggacgattgaagagtttaagaaaaagcggttccgctatcaatgcagtccgtacacggtggagatcgagcggatgatccgcacgcttgagcagcttggggattcgttcggaggatcgcttgagaaaacgcggtttgaccgcttgtatgcttccctttcccgcatcgaggcgattatcgcctctgattttcaagagcagccggatgaaatgcatcaagtatgggaagagacgttcgattatttcaagaaaatcatccaaaattccgccgactatatcgcttatttgcacggtgaaaatttggaagagcggatgacatcggagtcgtttctcgtttataaagagcagtttactgcttatttgcgcgattttatcgtcgccttgcaaaaaacgtcgatgcagattgagcaattgcttgaagatctgccggaagacggggttcggcagttcatcgggcatgtcgtcgactatgagcggtcgatcccgcgctttgccgatgcgctgccgccgcgcgctgtccagattgaagaaaaatgggagacgtggcgcagcttgtgtgaatggtttttaggccgcgatgggcgcgagagcgagctttcgtttttgcaataccagacgaatgaggcgattcgccgcctgacgcgcgtcgtgcaacggcttggcgagcggcatcaccattttcgcagccgcaaaggcgactacttgcatttggcgcgctggttttcccgccttgaatcgattgaagaggcgcactgcctgtcagcggtcgtgttcggctgtttccatacgaaacatctcgtcgctgatgcggaagcgaccgacaacatataccgcgatgtgtgggacgagccgccagccgagtgggtgacgaaaccgcgcgtccgccattacggggaaaagaaaaagccgcaggcgatagaagacaaagaatgggagaaagaagaagcgcgccttcgctatttggaagaaaaagcgcgcgaggaagccgagctgaagcaatttgtgaccgatgggaaaatcgtgcttgccgaccttcccgaggtgaccccatacgtacggaaaacgctgctcggctggatcgccaaagcgatggggcgcgaggggcaagcaatgaagacggaaaacgggtgggttgtcaacgtggtgaacaaagaggggacgatttgccttcgcgcagaagatggagaactcgtaatgcccaactatgaaatccacgtgctggcaggaggtgaatga

SEQ ID NO: 51125 - DNA, 1197 bp, Geobacillus sp. 12AMOR1
gtggaaacggcgtttgacgacaaggcgaaagaagcgctcgccgcgctgttcgaacaattttggattattcgcgaccaagagccggatttgtatcagctcgtccgtgagcgcgaacatgtgttgaaaaagtatgtggaggagaagtttgggtatcggctcatcgttcaccgctatttcgccaagctcgagaaaattcccgccgatcccgagccgtggatgggcatcgagtcgtttcaagagccgctcgattatgcgctgttttgctgtttgatggcgtatttggaaggcaaggcggtggaggacaagtttttgctttctgacgtatgtgaagaaatccgcgccatgtacccgggtgatctaccggtcgattggacgaactacgcgcatcggcgcgcgctcatccgcgtgttgaaaacggcggaacaaatcgggctcgtccgccggatggacggggagattgaagcgttcgcgcaacatgcggaggaagaagcgttgtacgaagtgccagtgttggctcgttattttatgcgcacgtatccgaaagatttgttgcaatatgaatcgatcgacgaattgctcgccgaggagtggaaagcatcaccgcaagattatcggcgccatcgcctgtatcgaaagctgtttttatccccggcggtgcatcggacggaaggcgacgagcaagatttttactacttgcgcaacttccgccatcggctgcgcgatgacatcgaagcgcatacgccgtttcggtacgagttgtacaaaaacgccgccatgttgacgttgcctgagcggcaggcgccgtacacgacatttcccgaccagaaaggaacgtcggagatcatccttcatttttctgccttggtgcgcgagcggcttcaggactatccgccggatgaatacggccgcattcgcttgacgccggaacagttttccgcctggcttgccgattgccgccgccgttacggggcggggtgggggaaaacgtaccgtgacatgtcggccgccgagctcgtccgcgaggtgcttgcggcgctttgcgaatggcgcatggctgatatagagcgcgccacaggaatgatcgttctctatccgcttctcggacgggtggcgggacggtatccagatgattttgacgcaaaagagggggaggaacatggcgaatccatggatgcttcatcgcgcgggactgattaa

SEQ ID NO: 51126 - DNA, 4122 bp, Geobacillus sp. 12AMOR1
atggcgaatccatggatgcttcatcgcgcgggactgattaacttttggtattacgacgagcaatactttcacttcgctgacggcaagctgctgttgcggggaagcaacggggcgggcaagtcggtgacgatgcaaagcttgatcccggtgctgcttgacggcaagaagacgcccgaccgcctcgatccgttcggctcgcgggcgcggcggatggaagactacttgcttggagaaaaagatgtcgtcaaccgcgacgagcggacggggtatttgtttttggaatacaaacgaaaagcatccgaccaatacgtcacaacgggcatcggcctgcgggcaaagcggcaaaaaagcctcgacttttgggggtttgtcattttcgacaaccgccgcatcggtcatcatcttaccctatataaaaaagaaaaaacaggagagaaaatcccgctcacgaaacgcgagctcgccgcagcgctcggcgcgggcgggacggtcgtcgacacgcaaaaagagtatatggagcttgtgaataaacatgtgtttcgctttgaatcgcttgagtcgtttcaagagctcatcgaactgctcattcaactgcgcagcccgaagctgtcgaaagactttaagccgacggtcatttatgagattttggaaagctcgctgcctccgttgactgatgacgagctccgccatctatcggacacgatcgaaaacatggaccaagccaagcagcagcttgagcagctcgaacgcgacgagcgggcgttgaagcgtctttgcgatcaataccgcctgtacaacgaatatatgatcgccgaaaaggcggcagaatacgtaaaagcggtcaagcaggccgaacagctcgccgccgagcaacaacgcctgcacgatgaagaagagcgggcgcgaacgatgcttgatgagcttgaggagtccatcacccgccttggccgcgaagaagacgtgctgcgagcgcgcgaaatcgatttggccggccacgaagtgttccagcaggcggagaagtatgaacagctgaaagctgaacagcagcgcctagaggaacggcggaagcgtcacgaacaaacgattgcggaaaaagaacgacaggaacgtcagcaccgccgccgcctcgatgaagcggaagcacggttggacgaccttgagcggaagcttgaagacgagctggagcagctgcgtatggatgccgacgaaggatccttttccttgcatgaaacgaacgaaggagactttcaccgccatcgccaaaaggagcaggagtttttgtttgccgcttggaaacaggaagccgaccgccatatcgagcggcttgaagggctggcccgcctttggcgcaggcatgacgaggtgaaacagcgctatgaggaagcgagcagcgaagcgggcgaacggcagcgggaaatggacgaatggcgccatcagcagcggaaatgggaagagctgctcgagcaggagaaagagcggtttgaacaagccgtgctggcttggatcgggcaaggagacgtcgacatttccgaagcggatattcagtcgtttttgcaacaaatggacgccctctatgagcagtattcgctcgatgatctgaagcgcccgttcgtgcaagcgtattacgatgccgttgggaagaaaaaggatgagaaatggcggctcgaacatgacatccgtctgttggaagagaaacgggcagaacgtgaagccgaactgcgccgttggcgggaacaacgcgaccccgagcctgaacgggatgaacaaaccactgccgcccggttggcgttggaggagaaaggcattccgtttgtcccgctttatgccgcggtggaatttgtcgacgatgtgcctgacgatgtgcgcgagcgaatcgaatcggcgctttcgcacgcggggctgcttgacgccctcattactgctcgcgagatcgacgtcgcctgcgaccgtgtgctcattccgaaaccggtccatatggcgcacacgcttgctgattatttgcgcccagatgccaatgcccctgtgtcaatggagcggattgacgaagtgctccgaagcatcgtcatcaccgatgccgaccaagaaggcggcatgacgatcgatgaaacagggcgctattcgctcggccttgtccgcggccatgcaccgcggggatcgaaggcggcgttcattggccgtgcggcgcgcgagcggtggcggcttgaaaacatcgcggcgctggaagcggagatcgccgcgatggggcaagagatcgaccgtctgcgtggggcgcatgaggacgtggaagcggccattcaagcgctcgccgactggttggcgtccttcccggcggaccgcgacgtgcgcaccgcgtttgacgaagcgcaagaagcgcgccgccaagcggaaagcaaagagcgggaatggaagcggcaagaagaaaaagcggccctccttgcgcgcgaatggaaacaaatcaaacagcagcttcgtgacgaatcggctgagcttgatttagccttcaccttggacggctgcgaacaagccatgctcgccatgaaatcgtacgtccgccatttgcacgaactcgaagtgctttaccgcgaaacgcgccataccgaagccgtgatcgctcagcagcgcgagcagcttgcggtgctggaagcggagatcgacgaggcgaaaggcgaacgaaatcgacttcgggatgaaaccgagcggctcgccttgcgaatcgcggagatggagcggacgctcgcacaaatgggagcggatgacattcgcgccgaaatcgcccgcattcaagaacggttggcgtctttgcgccgcgaaattccgcgccttgtcaacgaacgggcgcggacggaacagcagctcatgcgcctggccgaagaacgggaaaaagaggcgcggcgggaagcgttcgcccgcgagctcgccgcgatgtgggaaaagtcgtttgcccgtgaagcggcgcttgggcttgtggatcttgatcgttcccgctccctcctggagcaggcgaaagaagcgaaacaacggtacgaagcagtgttaaaagagacgcgttcctcgcttctggcgcggctgaacaccgtctttttccaagagtcgtccaacttgaccgaatatcgggcatccttcgagccgctggaagaacaaacgaagcccgaatggaccgccgctgccccagacgatgagatggccatgaaagccgcggactggcgggagaaacaagaacggcacgtcatttacctcgactacaaaggcgagcgcgccacgccgtttgcggtgctggcggaagtggagcgcgacatcgtcttgcagcacgagtatatgaaagaacaagaccgcgagctgtatgaggacgtcatcttaaaatcagtcggccgcattttgcgcagccgcatccagcgcgccgaacggtgggtgaatgatatgaataaactgatgggcggcctcgacacatcatcagggcttgtgctgtccattcaatggaagccgaaaacggcggagacggaagcggagctcgatacgaaagaattggtgcgcctgttgcggctcgatccgcggctgcttagagaggaagatttacagcgagtgacgaaccatttccgctcgaaaatcgcccgcgcccgcgaattgcttgaagagcgcggccaaggcagcacgctccatcaaatcattaaagaagtgctcgactatcggaaatggttttccttcactttgtactatgaaaaaacaaacgagccgaaacgcgagctgacgaaccaccgcttttaccaattcagcggtggggaaaaggcgatggcgatgtacattccgcttttcgccgcggcgtattcgcgctaccaagaagcgggcgatgatgccccgtacatcatttcgctcgacgaggcgttcgccggcgtcgatgaaaacaacatccgcaacctgttcggacttgtcgaacagctcggctttaactacatcatgaactcgcaggcgctttggggcgactacgacaccgtgcccgcgttgtccatttgcgaactcgtccgcccgcgcaatgcgtcgtttgtgaccgtcattcattaccgttggaacggccgcgtcaaacagctgatggtcaatgataaagaatgggagacgatcgagacgtga

SEQ ID NO: 51127 - DNA, 1221 bp, Geobacillus sp. 12AMOR1
gtgagcacggccaaggaggcggctgcctttttccgctctgaaccgggcttccgccgtctgtttatcgagatgaagcacaagtacgagtcgctcggccgcgtcggcggcgcggtgtctttagaggcgttcaccgatgaagagcgggaggcggtggccgcctttttcggcaaagacgtctcccgcgtctcccttatcgcgtttgaaaaacagctcggacagacgaggtttgcgggcgttgggcttgtcgagctgcttgaacagtacttcggcgccccgcttgtctcaaacaaagaacggcgccaggcggaggaagaggaacgggatcgtttttttgcgcgtctgaccgaggagcatcattgggttgagtcggtccgccctcagcgcttcgtccaaacggcgtacgaaaccgaccgccgtagcctggaggaggccatccgccttgtcagcgcggctctcggccgcctcccgctcccgtcatacatgcgcctcccgctctttgcccagcaagtggcgggcgacccgcatgcgttcgatttgtccacgctaccggggagattgttgctttcggcgttgcaagcgaccgtgcctggggactgggacatggcatctgtagagagcgtcaacgagttgctccagtccgtcggcttgctccgtgaggatatcctgaactttgtcacatgcgccaacattcttgctgaaaccaaggatggaccgcatcctgttttctccgctgcctgggaggcgaacacggcgctgaacatgccgcttagagatgtgctgtcgcttgtccgcgcccgccctgcccatggggggacggtgtacattgtcgaaaacgcgggcgtcttttcgacgctgcttgacacccgcgccccgcttgtcagcacgaacgggcaaatgaatttggcgacgatgaagctgctcgatcttctcgcctcttcaggcgccaagctgtattactccggcgacttcgacccagaaggattggccatggcagagcggctgcaggagcggtatggacaggccgtcaccctttggcgcttttccgtcgaggattatagggccgccaaccctgtcgtcgacctcacccccgagcgcctcgccaagctcgcatccgtaacgtcgacgccgctgcagccgctgaaagaggagatggcggaaacgaaaaaagcggggtatcaagaggcaattatcgggaggctgacagaggatatcaacgggtag

SEQ ID NO: 51128 - DNA, 1497 bp, Rhodococcus fascians
ctgggtgccgcgaatgcgttcgtggaggaagaccgtctcggtctcttctcgttcgccgtcgccgagaaaagatccgaatacctggcagtactgcgggcgttcgacaccgctcgcgcgaactacgtggtgttgctgcactcgggcgacgtcgccgatctcatcgctcgtagccccgggcgtcacgacgcgctgaccacactggacatcgcacccctgctcgatcaactccacgcctggggtctgctcgaacgcagctacgacggcacccgcgccgcgaccctcgccgaataccgcaaccggcacttcgtctaccagttcggtcaggccggctacaaggcctaccgtgcggtcgaggacgtgctcggtgcccgcctggacgacgcctcgctgtcccggctggtgttgcccgagctgctggccgacatgcacgagctggccgaggcgaaccgtcaggccgacggcgaccgcatctaccgcaagctcagcagactcgattcgacgttgtcggagatggcgacccgcgccgcccacttctatctggtgctgggcgacctggtgcgcaccaccgagatcacgcccgaatcgttcttggcgcacaaggatgcactgctcacgcacatgcgtgagttcagctccgatctcacccgctatgcccccaagttggcggaagcgatcgcactcgtcgagagcaccggcatcgaggaactcgtcgaccgtgccgcgatcagcgacgaacgagtctttctctccgtcgacgaacggcgagcggactggaccgaccgatgggccgggttgtcgcactggttcgtcgcggccgaatccgagctcagcgaatccgagcgcctccgcgagggcacgatgagcgcgatcgctgctgtgctgtcactgctgcggcgcgtcaccgaaactcggaagggcggtgtgagtcgcgagagccaactgcgtcacctcgccggctggttcgctgctgctcccaccgaggacagcgcacatgctctgtttcacgccgtgttcggcctcggccgaccccggcacctgtcgatggtccatcccgacgccgacatcatccccatgtcccgatcatggtgggaggcaccgccggtcgaaatctcgcgcacgctggccgagaccggacgtactccgacccccggcgttccagggcgggtacagcgcaacgacggcggcatcagacgactgcgagagcagcaactcgagtcgcagcgatcacgcagtgccgcggcgcagtcgctcgcctcggccggaatccacgaccgcattctgaacgagcaggaaaccgaagtgttgctgagcctgctcaacgctgcgttgactgcccgggtacgcgtgagcggacgcacctcggactcgtccggatcggacagtggcgtgcgcctgacgctgagcgacagcgatcgttcgacgatcgtgcgcaccagccgtggtcgattgcatctggaccgcctcgccctcgacgtcagtgaggtggcacgccggtga

SEQ ID NO: 51129 - DNA, 1416 bp, Rhodococcus fascians
gtgagagcacgtgagatctcctcgctcgctctggattcctaccagcgggctgctcgagtcgcattgtccaatcacctggtcaccgcgacgtaccccgatcgaatcgcgttaccgctgctgcgcaggtgggcgaccgaactgcgtgaggatctcctggagctgttcggctaccgcttcgaggtcaccgagacgaccgcgcgtctgttcccggtgatagatcgtctcgacgacagtcaacccgcgcgaacgccgtccgagcgggtgttcgaccgccgcaggtacgcgtatctggcgctggcgcttgccgcgctcggtcgggccggaaaccagatcactctgtccgaactcgccgatcacgtggcgacggagtcgagtcaggtggacggcgtcgaactcacgaccgaccgcgcgagcgaccgagacgcattcgtcgacgcgatcggatggctggccacgcgtggtgcgatctcgctggccgacggcgacgccacgggctgggcgaacaatccgacggccggtgaggccctgtacgacatcgaccgatcggtggtcgtcgcgatgtttcggccgccgcgtgccgtgcagcacctgcgttcgattcgtggcctgctggccggctcggatgccccgatcgatcccgaggattccgatctcggacacatcgagtccgggcgtgaggcagacccgaaggaaacgctgcgtgcggtacgccgagcgttggtcgaacaccccgtcgtctatctcgacgatctcgacggcgacgcacgcaccgccctgaccgcctcgcgcaccgtcgccgacgtcgagttgctcaccggtctcgttgccgagcgtcgcgccgagggcgtggccctcatcgacacctcgggacggttgtccgaccaccgctttcccagcaccggaacgatcgcccaggttgcgttgctcatcgcgggagaaatctccgatcgggtcgtggatcccgatgctccggcactgtccacgtatccgttgcccgcgagcgacctactcgtcgaacagttggacgacgcgatccccggcggcggaatcttcggtgacctggccgacttcggatttcccgccgatccgacgacggtcgagaactcggcggagcgcacacagtatccgttgatcgaggacagttggctggtctcggtcgtcgacgatctcgtggaccgattcggtcgcacgttcgcggcgcagtggcagaccgaccgggacggtctacgcatccgtgcgattgcgctgttgcatcgacttcgcttgatacacagcgtatccggcggcgtgttggtgctaccggtgatcgctcggtaccgagacgtgatggtcaacgtgcgtgaccgagccccgcaggactcgctcttcggcaccgaacaagcccccagtaccgatccatccgaagtagaggcctga

SEQ ID NO: 51130 - DNA, 4185 bp, Rhodococcus fascians
atgaccgcacactcgaatcgctttcggcccacgcgcgccggaatcgtcaacctgtgggattaccgcgatcaggagttctctttcgccgacggtcgattggtgctgcgtggtcccaacggatccggcaagaccaaagcgctcgaagtgctgtttcccttcgtcctcgacggccggatcgagccacgccgactcaacccgttcgccggtgaagaacgaacgatgaagtccaacctgctctaccgagggcaggaaagcgcacattcgtacgtgtggatggagttcggccgcggctcgcgcgaggaccccgaatcggtgaccgtcggaatcggtatgcgagcgagccgccacaacgacaaggtgacccgctggtacttcgtggccgacggccgagtgggcgtcgacttctcgttgttgggctccgacgaccggccgctgacgaagaagcagttggccgaacaactcggcagcgatgcactgaccgatcgtccggtcgactaccgcgccgcgatcgatgcccggatgttcgggctcggcgcgcaacggtacgaccagttgatcaatttgattctgacacttcgccgtccgcagttggccaagaatctcgatccgaaagggttgtcccaggcgctgaccgacggtctgcgtcccctcgacgagcaactggtgctcgaggcagcacgttccttcagcgacatggaggaagtcggacgcgcgctggagggactggcccaagccgatcaggcggccaggaacttcgtgtcggtctactccaaataccttcgcgtacaaacccgttcggatgtcgagcaagtctcgcgtcggctcgaagccgtgacgcacgcgaccaccgcgcacttcgccgccgccgccctgaaggaccggcgcctgctggaacgggcggccgcagagacgcggttcgacgaggccgagcgtgcgctcgaccaggccgtcgcagaccgagaaaccctgcagcgctcgagcgcgtacgagggcaagcagcaactggacgatctcgccgaatccgctgcgaagctggaggtctcgacggcgcagcaggccgatcgcgcacgcaaagcgcaagcagaactggagcagcgcacggccgaggcggcccgggcggattcggcactccgggactccgttgccggagtgactcgcgcagaggacgagctgcagactgcggccgaggacgcgggcatcgtgtggacaccgctgcccgggacggcgcgcagtgatcagatcagtaccgcgcttcgtgggcacgccgaggaacgggacggcgacgtacgtgcagtgcgtgaggcgctgactaccgtcgagaaggcgtcgacggaacgcgctcgcgcggagaaggccgcaacgaaggcgcgcgagttgctcgaagcagccgcggctgccgtcaccgaggccgaggcgacggtggacctggagaaggcgcagttcgcttcgggcctgcgggcctggtggtcgagcaactcgtcgctctactcctccgcgggcatcacctccgctgtgttcgaggccctcgacgcagccctggcaggcatcggcgacgacgacgccccgagcctggaatccgtgctcgccgagcagacctcggacggtatcgacgcgattcgcgcccggcaggcacaggcacgcgtcgacgtggccgcgcgcgaggccgaggtgaaggcgctgcgcgacgaactgtccctggtacgagccgaacacgacgatgccccgccatcgttcgcagcgcgcaccgacagccgagcagatctcccgggcgcaccgctgtggcaactggttcggtttgccgatgcggtctcctctgccgacgcggcggggatcgaatccgcgctgcaggccgcgaacctgctcgacggttggattcatccgaccgcagactcccccgtcgacgcgacgtcggagcaatatctgtcgccgctaccggtggccgcgaggccgaccggttcgacgctcgcgtccgtgctggaacccgagcccggtaccgccgtccaggaatcgcggatcctcgatgtgctgaattcgattgcattgcagcaagatcgaaacgactcctcggacagttctgtctcgataggcgtcgacggtcggtactggcagggagtgcagcagggtcgccacgcaaaaccggatgccgagtacatcggtgcgacggcgcgggcgcgtcggcgagagcagcgcatcgccgagctcggtgctgcgatcgattccgcgacagccgaactcgcgaccgcgaccgccgccgagctggcggcacgcgagctggtgcaggcgttgaacgcggccgccaagcagctcccccgagtctcggccatcgtgaaagcgcaacgtgccgtcacggcagccgcaggcgcgctgcgcacctcgaaagatgcgtctgcagcggcagatcgagaattcgaccaggcgatcgccgacctgtccgcgaaagagaaacaactgcgctccgtcgccgtggcccatcgcaccccgcacctgggccgcgatgtcgatgccctcgccgcagcgattcgccatttcgagcatcagggcgcagcggtcatccgtaaacgcagcgaccatgcacgcgagaccgagcgggcgcgcgaggccaccaaccgcctcgaggaggccaccggactggccgaggaactcgccgaggaagccgcgatagccgacgagagctatcgacaacagctgcagcgtctggaattgctgagcgagaaactcggtgccacggccgaacagatcaacaccgacctggacaatgcgcgtgatcgcatcgagaagtgccgagcggagcagcgagcagcccgaaaggcggacaaggaagccggtgaggcgatcggcaaggccgagggtgcatgcaacacggcgctcgagagcctgcgcgctgccgtgaccgagaccctgggtgatgctgtccgactggcaccgtacgcccgcaaggatctgctgcacatcctcggcgtgcacgagacgtacacgtggccggccagcgactcggcgtggctgacggtcgaacagatcctgtatcgggttcagcaggccgccggccccgacgacgacgtcccggtacttccaccggtggtgctcgcgctgcattcggcactcgacacggcgacggcgtcggtgaaagtgaccgactcgagccggaagtcgacacgaacggcgctgacgagcgcactgcaggagttcgactcgcaactggccgcttccggtcaggactaccgcctgcagtgggacgcaccggacgggttgacggtggtacgcgtgcaggacgagcagggctattcctcggtcggagacttcgccgaccgcatcggtgcggcccgggccgaccaggaactgctgttgaccgagcaggaacgccgaattctcgaagacgcgctgctgaccgggttggcgcagcagattcacgagcgcaccgtcgacgcgcgtgagctgatcgcccagatgtccgccgagatgaagcaacgccgtatgtcctcgggcaacacgatcggcgtgcactgggtgctcgcggacaacctcgacgacggggcgcgggcagtgtccaagctgctcgaccgcgatgcctcggcgctgagccaggacgatctggccgcgatgcgcgcacacttcgcatcggagatcaggatcgctcgtgcggcacatccggaacggtcgtatcccgagatcctgtccgcgacactggactatcgtcgctggcgggtgttcgcgttcacgctcatcagcggagacggcaacgaggatcgtctgaccgtcgctcgtcacagtgcactctcgggcggtgagcaatcggtgtcgctgcatttgccgctgttcgccgcggcgcacgtgatgctctcgtccgccgatccgcattcgccgcggttgctggcgctggacgaggcgttcgccggtgtcgacgacaacggtcgtagcgaattgctcggactgagtgtgcaattcgacctggatctgttcatgaccggttacgacctgtggatcacctacgcggacgtccccggttgcgcgcactacgatttggcgcactcgaccgccgagaacaccgtcagcgcagcacttctggtgtgggagaacggtgaattgttcgccgaacacgacggcaccgacctcgcagccgccctcggatcaccgttgacccgccgggtgccgacccgaaccgaaggtgggctggagtttggccggtaa

SEQ ID NO: 51131 - DNA, 1251 bp, Rhodococcus fascians
gtgggctggagtttggccggtaacagtgagtggcgaggcagcgtcgaattggcggcgctgttggacgctgcgcgaaagaagttggagtccaactggcttcgtgtcggcggtaacatcatcgtcgacctgagtgatgcgccggaactgtggcgtctgtgcagtgccatctcgaagtccaactccagcctgcactctcgggcacggagcacccggctcgatctcgagcggttcgacgcgtggttgagccatccgctcaacggcggtatcggtctgatcgacaccctcgccggtcaggcaccactgcaggacaagaagcgcattgcggccgacaaggctcaggtgcgcgccgatgcgctcgatcgggcgcgtgaggcgctcggcggtggtaccgatcgcgagtggatcgagcactggatcgcgtcgttgctcaatcaggacggcaccctcggtggccgcgtcgccgtcgacgcgctcggggtcgcaacgcaagtcctggcgctgctcccggtggacgggatgtcgctcaccgagctggcggaactggccaccggcgataccaaggccctcacgggcggcggtgccgcgaaactcgtcctcgatgcgctgtcgttgcgcgaaaacgtgcctcggcccgtcgatccggtgggcgtccgggcactgtgggaaacggccggggtgtcggtcgacgcactgtcgagccgggtactggttctcggctaccgcgtcgcagagacccacacggtggctcgctggctcaacgatgcagccgacgagggcgtgccctttcccgtcaccgtggacatgctcgcgcgcggccctctcaccaacagctcgtcgaccgtgttcgtgtgcgagaacgtcgctgtgctcgcggccgcagcccgctctctcggctcgaactgtgccagcttgatctgcaccgacggccaaccctcggccgccgtgcatcggctgctggctgcgcgcgcccccggcaccacgatcgaatggcgtgccgatttcgactgggccggaatgcacatggttacccgcgcactcacccggtacgacgcggtgccgtggcgaatggacgtcgactcgtaccgccgcgcactggacgcgcgcaactcggaaccactgaaggggcatcccacggacactccgtgggacccggaactggctgctgcactgcgtgattcgggacgagcggtcatggaagaacgcctgatcccggatctgctggcggatctacgcctgggggccacggactaa

SEQ ID NO: 51132 - DNA, 1494 bp, Bacillus pseudalcaliphilus
atggaacactatccaacgaaacgggtgaaggaagcgacgtatttaacggcggaaaaggcttggagttatcgggcaattttgcgttatttttatatacagcatgagcggatgcgtgaatttctattttcggaagagattcatgcttatttgcagagggattatgcttttaaaaaatatgaaatggaagagctgcatcaggacttagactcacttgtaagatggggcaatttaattgcaaggcaggaattaggaaaatcgaaaacaatcgaagagtttaagaaaaagagatttcgctatcaatgtaccccatatacggttgaatttgaacgaatgatcatccagcttgaaggcataggagagtcctttggtggttccttagaaaagaaacagtttgaaaggctttatcagacttttcttcgtattgagcgaatcattataggttcccatcatgaatcagatgaagaatgtgcccaggtttggaatgatgccttaacgtatttcaggcagattacccaaaatacatcggattatattgcctatattaatagtgaagaagtggaagagcgtatgcaaactgaagcattcctcatttataaggaccagtttactatgtatttacgcgattttatcattgctttgcaaagtacagcattacaaacacaagaattacttgtgtctataacaaataaggagcttgaggctttttttgttcaggtaacaaggcatcagcagcaaacctttcgttttaatgaaaataaagaaggggagggtaaagaggagaatccgttacaagaattatacgaaaagtggagcagtatcacttcgtggtttttagggaatgagcatggggagagtgagtttgtgatgcttgagctcaggacgaatgaagccatccggagaatgacacgaatcgttcaacgtcttggggagcgacaccagcattttcatagccgcaaaaaagactatatgcacttagctaaatggtttgacgggatcgatgatatagacttagcacatcagctttcctctgttgtttttggcgtttttcatagtcgtcatttccaaggaaatcatgtgccgtcagaggatatttatttagatgtttgggacgaagagccaatgattcatgaaacgaaacctcgaattagaaattatcgtgaaaaaacgaaagcgggagcgattattaataatcaaaccaaaaaacaagaattgaagcaaagatatttagaggaacaaaaaagggaaaaagctctaattgaaacctatatcaataataacgagattgatatggagcaattaggaaaggtagaaaagtcggtacgaaaggttttgctcatttggataggaaaagcaatggggaaaaaggatcgaattataaagacagattttggacgagaagtagaggttgtcatgagcagaaacgataatatagaagtagtatcagaggatggcgtattgaaaatgccgaaagtgatttttcgttttttgaattaa

SEQ ID NO: 51133 - DNA, 1119 bp, Bacillus pseudalcaliphilus
atggagaacttctgggtattacgtgccgtagaaccagatgtctatcaacaagtgaggcatagggagcatgtgatcaaaaggtatgtcacagaaaagcttggttttacgctcattatacaccagcattttattaagctagaaaaaattccggtagaaccaaagcaatggatgggtattcaagcttttcaagaaccaatggattatgcgattttttgttgcgggcttgctttcacggaaagacgctcggtcgatgatcaatttctgctctcagagctaacggaggatatcgccgatatgtatccgggcgagttttcgcttaattggacgaattaccagcaccgtaaatcacttgtacgtgctttaaagcagctggttgacttacatttaatcaaagcggttgatggcgatattgagttatttgcgatgaatgaggagcaggaagtgttatatgaagtaaccgtttatgcccgttatttcatgcgctcctatccggatgatttgtttcaatatgaaacgatggatgaaattcttgaaagtgagtggcaacggcatcaaggcgatgaacgacgtaagcgtgtctatcgccgcttgtttttatcacctgttatccaccgtagtgaaggtgaggactcagactttgcttatatacgtaactatcgaaatcgtttaagagaagatattgaagcccacacaccttttcgtttagaagtttttaaaaatgccgcgatgcttatgctcgatgagaaaaaacagcggtataccctttttccggatcaaaaaggggtcatggatgtggttttacaccttagcgccattttgagagagaatgtgcagaaggattttatcaatgatttaggcgagtggaagttgatgatgagcgaatgggagagcctgcttgagaaattacagaagaagtatcagcgcggttggagtaaacaatatcgcgatatgacgattacacagcttcgtcatgagctcattacttatttagttgaatgggagctaatggagtatgacaggcactctggagtagttgtcattaagtctgctttgccaaggatggtcggggaatatccaaaggattatcaagcgagggaaggtgaagaaagtgttcaataa

SEQ ID NO: 51134 - DNA, 4107 bp, Bacillus pseudalcaliphilus
atgaaccgtgcaggtttattaaatttttggtattacgatgaagagcaatttgatttttctgatgggaaattactgttaagaggaagtaatggttcaggtaagtctgtgacgatgcaaagctttttaccggtcttattagacgggaagaaatcacctgatcgtttagacccatttggttctaaggctagacggatggaggattatttactaggggaaaaagaggttgttgaccgcgatgaacggaccggttatttgtacatcgaatacaaaaagggaaacaccgatcactatataacgacggggatcggtttacaagcaaaaagaaataaaccgatgaagttctggggttttgtcattacagacaatcgccgaatcggtgagggtattgagctatttaaatatgaaaacagcagtgatgaaaagcaaaaaattcctcgttcacgtgtcgagttagaaacggttattggtgaaggtggctatatcgtccagacgcaaaaggaatatatggcattggtaaataaatatatatttggtttcgatacgttagaggcttatgaggatctcattaaattgttgattcaactaagaagtccaaagctttcaaaggattttcgtcctaccgttatttatgaaattctagaagcggcattgccacctttaacagaggatgatctgcgccatttatcggatacgattgagcaaatggacgaaacgagacagcagattgaacagcttgagcgcgagtggcacgcgattcaatcgctaaaccgtgcctatgatacgtacaaccaacggaggttagcagagcaagggcaggaatggataaaggctagtaaaaagctcggtgccgagcaaaagcttctaacgacttttaaggagcaagaaactcaattaatgacagatatagaagcgttaataggggaacagcaagtattaaagcaaaagcaagcagtaaacgaaaagcaaaaagagcgtttacgttcacataagatatgggatttagaaaaggagcttcagggcgagaaggatcgacgcaatgaggaagaattgaagcggtgtaagcaagaggagtcgttacataagaacgaacaaaaggaacatcagcttagacttaagaaccaagaatctgaaatgaaagcggaacaattagaggcagaaataacggatgccctcgaggatatggggcatagtgcttccgaagcttctttccaaaagcatgagatgaatgttgcggactatgaacgaaaaagtgaaacggtatttgattattctatttggaataaggaagcaaaggcccatttagaacaattgaccgtgctggttgagcaatttcgtgagtttgacagggtcaaagagctttatgaaagtagaaaccttgaccgagcagaagaacagaagaagctcgatcaaaaacgctcagaagaaaaagagtggcttcatctgtttgaggaagataaaaataaaaaaagagcagagcttcatgaatgggttcaggagatttcttgggtacacgatcaaagtgaaaagcttcagcaaagttcacgtttacttgaacagctttatgaatcgacacagtatgagcaagttagagtcctttattacgatacttatttagcctttcaaaatgaagaaaaccaaaaactgtctaggcttacttttgaaaggaagcagttggaagaacaaaggcaagccaaaaaggaggagtggcaagtatggaaaaatcaaaaggatcctgagccgccgcttgcaaaggaatctagacaggcaagggaacaattaaagaaaatgggtcatagctttatgcctttttacgctgctgtcgattttaacgatcacatctccgcagatgttcaaagccggatagagtcggtgttaatggaaacgggtattttaaatgcgcttgtcgtcgatagtgaagttcaagtagagcatgaccgagtccttacccctacccctgtctttttccagcagactctggctgattttatgaaacttgattctgacattgcctcacagaacctgcgtgaacaagttgatgcagtactaagatcaattgttgttaccaaaagtagtcgcagtacggtggttcaagatgatggttcatatcaaattggtctcttacaagggcatgctttaccatatgaagaagtgaggtatattgggaagacagcacgagcacgttaccggaaagaaaaaatgctcgagcttgaacaagaaattgcagtgctaacggagcgaattggacaagtagctgaacaaatcggtcaggttgagcaaaggttggttgatgcaagaggtcaaatggatggattcccgaatgatcgtgatttgcaagaaagctatcgtcaaataaagagtactcggtttgatattgaacaattaaaaggctatgtggagaagttagaccatgagcttcaacggatatatataagttatcaagagaaaaaatatctaattaatgagcaagcccgacattttaatattgaaaagaaactgtcctcctacatgttagcgaagcaggaaatggctaactataaggatcaattgtcaaagcttgaaaagttacacatcaaacgaatccatgagcttgagcttttgaaacgaaataaggatgagttagatgaagtcaaagagagcgtcgatgaattaaaaggtgaattaaatatcgccgatgaccttcttatccgccttcgtcaaaatatcgaaaagattgaagagcaaatgcggaaggaaggggcagaagatatccgtctgcaaataagaacggtggaggaggcacttacccaaatcgatcataatcttgaccgtacgaaacaggagcttccgaaaaaggaaaatgaacttgaacatgtaaaagaaaagataacaacacagcaacatttttgtttgttcttagaaaaagctgagactgcctgggcaacaacttttgcaatggaatatagctattatttcgtttggccaaaggagggattagaaggacttgaatcacgaaatattgccgagaaggctattaaggagtatgggcatctagtggtagaaaaggattcaagccgagttgattcgttactttctagtacattcttttctgaaggagcgaatctgatggagtatcgaatgagtgattatacgaagccagctccactctcagattggatgaacgaggtcccagatgaatatcgcctttatgtagagcaatggaagagtaaagcttcacggcggatcgtcgatttagattatcaaggtaagcgcgttagtccttattttgtccaagatgtgattgaacaagatagagagcagcgagaacatttattaaatgaacaggaccaacgtttgtatgaagatattttatataagtcagttggtagcaaacttcgaagtcgaattcgtcgggccaaagattggacgaggaagatgaaaagcttgatggaaacgcgtgatacgtcatcgggtttaacgttttcaattcgttggaagccaagaacagctgatcttgagtctgaattagatacccaggatttagttgatttgttaatgcaggatgctcgtttgttaaaggatgaagatcttgatcggattaccgggcattttcgttcaaaaattcataatgccaagcaactactagagcataaaacgcaagggcagacattaattcaagttcttaaagaagtgttggattaccgtaaatggttttcttttgttctttcttataaaagagaaaatgaaccaagacgagagctaacgaatcatgcattctatcaatttagtggaggggaaaaagcgatggcgatgtatatcccattgtttacagcgtgttattctcgttaccaggaagctgacgaggctgctccttatattatatctttggatgaagcctttgctggtgttgatgaaaataatattcgtgaaatgtttgaggtggttgaaagtcttggttttaactatattatgaactcacaggtgctgtggggcgactatgatacggtgtcgagcctatcgatttgtgaattagtacgtccgaaaaatgcagattttgttagtgtgattcaatatgagtgggatggtgctagtttgttattgagtggtgaaaaagaagagatccttacttaa

SEQ ID NO: 51135 - DNA, 1302 bp, Bacillus pseudalcaliphilus
attgaggaggcatatgtattttttcatcgttaccctgtctataggcggttatttcatttatttaaagacaagtatcaatcgcttggtaaaattgcaggtacggtcaaggtaaatcatttctctgcggaagatttggaagaactcgcttcatttttggcgataagttcaaaagagttggagttgaaggagaaaatatcgcttcttacgtttcaaaagcaattagcgagaacgaggtttggcgagattggattgcttgagttattagaagctttttttcacgagaaaatactcacaaaaaaagagttagatctgcaaaaacagcaggctatagaaaagacctttcatgagctgagaacacacttttcagagctttccttctggctttggtatgtgcaagaaaaaacatctgacacgtattggatccatcgtttactgaatgagaaaaaagggatttttcacatatatgtaaagcagttacatgatgcctatgtaggcttatcagctgagccagaaaggatcgccatttttagtcagcgagtgactggaaatccgcatgcttttgatcacaatacggaattagggaagctatttcttcatgtactagcactagatgaaaagttgaaagtaggtgaagcgcgagaagtacgacttccaactaatacagaatctatcaatcaattattagaaacttatggtctatttcgggatgatatcactaactatgtcaccgcggtgaatttaatggcagagactatagaaggcattgagccagtttggcaagcggcggcattacgtaacctacctgctgttttaaatattccgatccgtgagttaacatcattggaaaaagcttatccactaagtgaattggatgagaaaaaagtttggatcgtcgagaattcgggtgttttctcaaccttattagatcaatttccaaaagccccacttatttgtacacatggacattttaagttagcgagtctaaagctaattgatttgcttgtgcgaaacgggtgcaaacttatgtatgcaggcgattttgatccagaagggctgttgatgttgcagcgcttgcaggagcgttacggtgggcaggtcaagccgtggcggatggatgttaatcattatgtagagtcaaatccaagggtgaagttatcggaggagcgattaagcaaactcaagcaccttcatgagcctttgcaggcactgaagcacgaaatgcaaaagcgccaaaaggctggttatcaggaagcgattatgtcggcctacctccaagatttgtctatatatgagcggggttag

SEQ ID NO: 51136 - DNA, 1482 bp, Clostridium carboxidivorans P7; identical to SEQ ID NO: 50022

SEQ ID NO: 51137 - DNA, 1131 bp, Clostridium carboxidivorans P7; identical to SEQ ID NO: 50084

SEQ ID NO: 51138 - DNA, 4053 bp, Clostridium carboxidivorans P7; identical to SEQ ID NO: 50024

SEQ ID NO: 51139 - DNA, 1302 bp, Clostridium carboxidivorans P7; identical to SEQ ID NO: 50025

SEQ ID NO: 51140 - DNA, 1491 bp, Bacillus coagulans; identical to SEQ ID NO: 50897

SEQ ID NO: 51141 - DNA, 1164 bp, Bacillus coagulans; identical to SEQ ID NO: 50898

SEQ ID NO: 51142 - DNA, 4116 bp, Bacillus coagulans; identical to SEQ ID NO: 51023

SEQ ID NO: 51143 - DNA, 1299 bp, Bacillus coagulans; identical to SEQ ID NO: 51024

SEQ ID NO: 51144 - DNA, 1524 bp, Rhodococcus sp. RD6.2
gtgagtgaatccggcccggcacccaacgacgagcgcgaaggcggtctccatcagaccgacgacccgttcgtgacagcagaccggctgcggatgttcgcgttcgcgacggcggacaagcgcaccgactatgtgacggtgctgcgtgcgttcgaccatgccagggccaactacgtggtgctgttgcacgccggtgacgtggccgacacgctgacccggatggggacgcgggcaatgacggccgcggagatcactccgcttctcgaccaactccatcagtggggcgtactcgaacgcagctacgacgggtcccgagccgcgacgctggcggagtaccgcaaccggcacttcgtctaccagttcagccggctgggttaccaggcgttccgcgcggtccgggacgtgctcgcgcttcgcctcgacgaggccgccctctcccgtctcgccctgcccgatctactgtcggatctgcagcagttggcggaggcgaaccgccgcggcgacggcgagctgatctatcgcacgctgcgccgcctcgactccacgctgtccgacatggcgacgcgggcgtcgcagttctacctcacgctcggtgacctcgtccgcaccacggagatcaccccggaagcgttcctggtgcgcaaggacgcgctgctgacccacatgcgggagttcagctccgacctcgcgcggtacgcgccgaagctcgcgtcggcgatctccgacgtcgaagagagtggcgtgcgcgacctcctcgggcgggccgcgattgccgacgaacgcctgttcctgaccgtgacggagcgggaggccgactggacgcagcggtggtccgggctcacccagtggttcgtcgcctcctccgacggtccgagcgagtcggagcggctccgggagggcacgatggccgccatctcggcggtgctggccctgctgcgccgtgtcaccgagacgcgacgcggcggcgtcagccgggagagtcagctgcggcacctggccggctggttcgcgggcgcacccaccgaggatgccgctcacgcactgttccaggccgtgttcgatctgggtcggccgcggcatctgtcgacggtccatccggacgccgacctcatcccggattcgcggtcgtggtgggacgcgccgccggtggagatctcccgtaccctcgccgagacgggtaagcccgccgcggccggggcaccgggccgcgtgcagcgcaacgaggcgagcatccgccggctgcgggacgcgcagctcgcggcgcagcgtgcgcgcgcggaggcggcccgctccctggccgcgggcggtgcctacgaccgcgtcctcggcgaggaggagaccgatgtgctgctcggcttgttgaccgccgcgttgaccgcacgggtaccggtcagtggcgtcgtacgtgacagcacgggctccgagaacggggtgcgcctgaccctgtcgccgcacgaggaatcgacaaccgtcgagacggccaggggccgactgcacctggaccggctgcgggtgagcgtccagtga

SEQ ID NO: 51145 - DNA, 1371 bp, Rhodococcus sp. RD6.2
gtgagggcccgcgagatctcaccgctgatgctcgagtcctatcagcgggcagcacgggtgatcctggcgaaccacctggtgaccacgacatacccggatccgctggccctgccgctgctgcgccggtggacgaccgaactgcgggacgacctcctcgaactcttcgggtaccgcctggaggtgacggagacgacggcccgactgttcacggccgcggaccgcctcgatcccacagccccggccacgtccggggatcgcgccttcgaccggcggcgctacgcgtacctcgcgctggcactggccgcgctcggtcgcgccgggaaccagatcaccctgtcggagttggccgatcacgtcgcggcggaggccacgcaggtcccgacggtcgacctctcgaccgagcggttcacggaccgcagcgcgctcgtcgacgcgatcgggtggctcaccgcccgaggtgccatccggctcgcggacggcgacgcgaccggctgggcgtcgaatcccgatgcgggcgaagcgctctacgacatcgaccggtcggtggtgatcgccctgttccgtccaccgcgggcgctgcaacacctgacgtcggtacgcggactgctcaccgtggtcgacgagaccgccaccacacgggagaccgcgcgccgggttcggcgcgcgctggtgcagcatcccgtcgtgtacgcggacgacctcgacgaggacgagcggcttcagctcgcgttgccccggactgccgccgacgtggcgatgctcaccggcctcgtcgtcgagcgccgcgccgagggcatcgcgctgatcgaccagtcgggccgcctctcggacatccgcttcccgtcgaccgggacgatcgcgcaggtcgcgctgctgcttgccggggagatcgcggaccgcgtccaggatcccgacgctccggacccgatgcgaatccccctgccgaacaacagaaccgacgacctggtcgcgcagctcgacagcgcgatcccggcggccggcctcctgctcgaactcgcggacgattccccggagtcccggcccgaggcacgcgtcgacgcaccgcaggagacgcaggcgacctatccgctcgtcgaggacagctggatcgacgctgtcgtcaccgagctcggactgcggttcggccgcacgttcgccgcgcagtggcaggcggatcccgctggactgcgcaggcgctcggtcgacctgctcgacgcgcaacgcctcgtccgcaaggtcgagggcggcgtcctggtgctaccggcgttggcgcgctatcgcggtgtcgtcgtcaccgtccgcgaacgagagccccaactggacctgtcgaccgagctcgtgaactccgattcgtcggaccctgaggaatag

SEQ ID NO: 51146 - DNA, 4155 bp, Rhodococcus sp. RD6.2
atggcaagtgcgcgttttcgaccgacccgcgccgggatcgtcaacctgtgggactaccgggaccaggagttctccttcgccgacggccgcctggtcctgcgtggccccaacggctccggtaagaccaaggcactcgaggtgctgttcccgttcgtcctcgacggacgcatcgagccgcgccggctgaatccgttcgccggtgaggagcggacgatgaagtcgaatctgctctaccgcggcgacgagagcgcccactcctacgtgtggatggagttcgcgcgcggaaacccggatgatccggaggcagtgaccgtcgggatcggcatgcgtgcgagccggcagaacgacaaggtgacgcgctggcacttcgtcgcggacggccgcgtcggggtcgacttctccctgatcggcgcgggcgaccaaccgttgacgaagaagcaactcgccgagcagatcggcggcgacgccatcacggaccggccggtcgatcaccgtgccgcgatcgatgcccgcctgttcgggctcggtgcgcagcgctacgaccagctgatcacactgattctgacgctgcggcgaccgcagctcgcgaaaaaccttgacccgaagggactgtcgcaagcactcaccgacggtctgcggcccgtcgacgaccagctggtgctggaagcggcgcgctcgttcagcgacatggaagaggtcggtcgggcgctggaggggctgaccaccgcggaccaggccacccaggacttcgtctcggtctacacgaaatacctccggcagcaggcccggacggacgtcgagcaggtggcgcggcggttcgagtccgtcgaggccgccaccgccgccgtcgccgatgccgttgccgctcagtcgaaccgccaggaggaacgcgcggcagcggaggaacgactgaccgccgccgaacgcgcactcgacctggcccgcgccgagctcgagaccctgcagcgttcgagcgcctacgagggcaagcagcagctcgacgacctcggtgccgtcgtggccgatctgcgccgctccaccgaccagcaggcggacaagtcggtgaaggcacaggcgacgttggcccagcgcgccgaggaggccgcccagtcgctggcacgggtgacgcgcgccaccgaggcgttggcccgcgccgaggccgacctgcaggaggcggcgggcgacgcaggcatcacgtgggcggcactgcccgacactgctcgcggcgaccagatcacgtccgcggtccgcgggcacgccgaggagcgatccggcgacgttcgcgccgtgcgggaagcgctgaccgtggtcgagcgtgcctccgccgaacgcgttcgcgccgaccgtgccgcggaccggggacgcgagcaactggacacagccgccgccgcggtgaaggaggcccaggccgccgccgcgctggcccgcaccgaatgccagggatcgctccgccggtggtggtcgactcactcgtcgctgtacgcgcgggtcggggtgtcgagcgcgatgttcgtcgcgatgcacgacgccgtgtccaccgtcggcaccgacgacgcacccgggttcccggagatcctcgccgaccacaccaccgaaccgctggacacgctgcgcggccgacgtcgcgacgccgaggtcgcggccgaacggtctgcggccgctgcagccgagttcaccgcggaccgggtgcgggtcgcggccgaacacgacgacgcaccgcccgcgcatcccgcccgcatgggttctcggtctggtcttgccggggcgccgctgtggcggttggtgcggttcgccgacgacgtcgacgcggcaaccgcagcccgcatcgaagcggcgctggaagcggcgaaccttctcgatgcatggatcccggacggcgacgtcccccaggccgagtcggagttgttcctgatggcgctgccctcggatgagcggccgcggggacgcaccctggccgacgtgctgattgtggagccggatgcgggcgtatcggagaaccgtgtcgcggatctgctggcgtccatcgcattggcagacgacgcgacgacggcgaccatcgccatcggcatggacggccgcttccgccagggcgtccaggtcggcgtccacaccaagtcggacgccgagttcatcggcgcgacggcccggcagcgtcgccgcgagctgcgtctggccgaactcgatgccgcgatcgaggtggccgagtcggaacgggcggcggctcgggcagagcaggcggccgcagccgacctgctcgtcgagctcaccgcggcgggcaagtccctgccccgccctaccggtgtcctcacggccctgcgtggggtcgcggaagccgcgggcgccctgcgtaccagggacgaggcggcgtcgaccgcacagcgtgaactggaccaggcgatcgccgagctatccgcacaggaacgcacactgcgggaggcgtccgtccggcatcgcatcgccgatccggtgcgcggcatcgacgccctgtccgccgcgatccggcacttcgaggcatgcggcgatcacgtcgtccgatgccggcgcgaccgcgagaaggacatcgaacgcagccgcgaggccgacgaccgccacgcggaggcgagggacgtcgcggaggagttcgcggaggagtccgcggcggcgcaggagaacctggagcagcaagtccagcgtctcgcgaccctccgggaggcgatcggagccggcgccgacgacatcgaagccgacatcgaccgggcccgcgcccgcatcgacgcggccaccaccgagcagcgcgcagcgcgcaaggcaggcgacggagcggtcgaggcgatcggcaaggcggcgggtgcgtacggcgccgcggtcgagtcactgcgggccgcactcaccgagacccgttccgatgcgggccgtctcgcgccgtatgcgcagcgcgatctcctcgacctgctcggcgtcaccgacgcccacacctggccggcgtcggatgccgcctggctcacgaccgaacagctcgtgtaccggatcgagaacgaacccggcgaacccgccccggtggtgccggacgaggttgccgcactgcacgcggcgatcgacgccgccacgaccgcggtgaaggtgtcggaggcggcgggcaagtccacacgctccgcgctgacgagtgcgctgcaggaattcgacgcccggctcgccgctgcgggccaggactaccggttgcgttgggacgcggcggacggcgtgaccaccgcctccgtgcagcacgatcagggccagtcctcgatcgccgacttcgcggcattgatcggccgtgcccgcgacgaccagcagcagctcctcaccgattcggagcggcggatcctcgaggacgccctgctgaccgggttggcgcagcagattcacgagcggaccgtcgacgcccgcgacctgatcacccagatggctgccgagatgcgaggcagacgcatgtcgtcgggcaacaccatcggcgtgcactgggtgctcgccgacaacctcgacgacgggtcgcgggcggtgtcgaagctgctcgaccgggacgcgtccgcgctcggccccgacgaactggccacgatccgagcacatttcgcgacccggatccgaacactgcgcgccgcacatcccgaacgcgcgtaccccgagatcctcacggaggcgctcgactaccggcggtggcgggtgttctccttcaccctgatcggcggcgacggcagcgaggacaagctgacggttgcccggcacggtgcactgtcgggtggcgagcagtcggtgtcgctgcacctgccgctgttcgcggccgcgcacgtgatgctctcgtccgccgacccgcacgcgccgcgtctgctcggcctggacgaggcgttcgcgggtgtcgacgacaacgggcgaagcgaactcctcggcatgagcgtgcagttcgacctcgacctgttcatgaccgggtacgacctgtgggtcacgtacggcggcgtccctggttgtgcgcactacgacctgtcgcattcgacgcccgagcattcggtcagcgccacgctgatggtgtgggacggcggcatgctgatgcaggaacacgacgggtccgacctcgcgaaggcgctcgggtcgcccgggcgccgtaagaccctcgagcccggtgggctggagttcgcggaggtgtga

SEQ ID NO: 51147 - DNA, 1533 bp, Bacillus cereus
gtgtttgatatttccataatccaaacgccgataaaggaagctacttatttaaatactgataaaacacgtgtatatcgtcccatcatcaaatattgttatactcgttacctccaagccaatcggtttgtatatccacatgaagtgctagagttcctgcaaagtaaaggaggctttacatcatatacacttgatgatgtaaagcgggatcttgagtcacttgaaaaatgggggaatctagtcgccagacaggatgttcgaggccctgaaaaattagaagatgttttgaaaaaacgatatcaatacagtgtctcagaaatctcgattgggtttgagcagttcttagaaaaactagattctaaacgttctaatattacaggttctactgatagctctttggtatcccgcttattagaaacaacatatgctttaaaagattatgccatcccgaaggttaaagatatgaaggtaaatcaagagatttatgaactttggagtgatattttttatcgatttgaaaagctacaatttgactcggttagttacttatcgcatattgattatcaaaaaatacaaacggaagtagcgaagggtgaatgggcctttttacattataaggatgacttcattacttatttacaagatttcgttttgtcgctacaccgtacagtagatttgattatttctgttttcaaagaaatagaggtaacaaaattggagaaagtaattcttgcagcggccgagcataaatgctatcgtgaccgcttcatttttgaaaatgtttcggtggaagaacaaatacaagagtttgaagatagttggttatatatgatgcaatggttttccagtgattcatctaatcataacggtggctatgaatctctattaagacagacgcaagaaaccattgatcaaattgtgaaattcattagacaaattggtgagaagtatcgtcaggttaaaaatagacagcatgagtatttgcacgcagctgtactatttgaaaaaatgaataaatcaaatatggatgaatgccatgaaatgtttgcgtatctttttggtgtccagaatacgaaacacatcaaagcacattcaatatctactgaccaacaaaataatgatttgtgggaaataaaaggcgacaagttgaccctgctatctaaatacagagaacggaaagagagaaagaaacgaaaagcagtacaagaaaatttagaggaacggtataaacttctcaaggagtatgaaaaggaaagagaaataaaacaacagtatattgttagatacttatcgtcaaaagtgattcgggtacgtgatttagggccagttccagcttgtatacgtgaagaaattttagaatggttaagccgttctagtttcgagttttcagagaaaggtatattacgatatggatttacggatgatggtagaacatttgaagctatagccgttacagaaaatcgaataaaactagtttgtgatgacggaacacttgaaatggaagacttggaatttagatttaaagaggtgaggtaa

SEQ ID NO: 51148 - DNA, 1203 bp, Bacillus cereus
ttggaagaaaaaaacggtattacagaccatatgaaggaacttgtggaatatttatttgaatacatgtttattgatcgtaagaaaaatcgagatatctattatgaaataaggcggttgcaaaaacaaatcacttattatgtaagtgaaaattttaagtacaacttacttgtccatccagactttattaaattagaaaaggttacaacatcacctaaaccatggatgggcattgaacgttttaaaggaccgagagattatgtaatcttatgttgttttatggtttttttagagcagcaaatcacaaatgaattcattactgaagacctaacaaaagctattaaaaattactttcctggagaagaagggctacagtgggaaggtaatggtggttatcagaatcgtctttcccttataagagtggtacgagctttggaggaatttggaattatcgtgattttagatcaaaatatcgatgattttaaagatgatgataaaaagcaagtgttatttcaaaaacaaaaccaaagtcattactttatgagaaatctcccttttgatattacagtttgtcagtccccacggtctttaaaattgaaaagggtactagaaaaagagttaacaggcatcctaccaaaacacgaattgaataggcgtttatttatagaacctagtattcgaaagcaagatttggatgaaggtctgtatgactacttaaagaggaatatcgaacaagtggaatcctttgtggaagaaactagttcgtaccaattggaattctataaaactggggcaatgttaaccaggacggaaacctataaacctcttaccacatttccaaatttgaaaatggaaagtcatcttactatgcagctatctttttatgttagggaacttatcaaggagaaaagggtccataaagaattggaaggggagattcaaatgacacgctctgagttcctacaactaatagattcattaaaggagcgaaatggcaatgaatggaccgcaagttatagacaaatgagtgctaagcaaatatgtaaagagtttattcctttcctaaagagttggggcttttgcaatgaactacaagacagagaaaatcttgtattatatgattcgcttggccgggtaagtggtacttatgacatggaaatgaaacaaactgaatgggaaagtggaggagttgaaaaaacgtcatga

SEQ ID NO: 51149 - DNA, 4203 bp, Bacillus cereus
atgacaaaagatactcgatggagaccaaaccaagctggattccttaacttttggttctttaaggatgatatatttgagtttatcaacggaaaattgcatctaatgggagaaaacatgagtggaaaatcagtcaccacacaaagtttaatcaccatattgctagacggaaagaaagatgcaacccggctggatacgttcggtagtcgctcccgaactttacgggatacttttttaggaagcacaggggataaagacaaacaagaaagacataatcaagataaactagggtatacctatctcgagtataaaaggggtattcatgatgaatacattacaacaggaatgggtctgcaagctaaagcgggtgttcaagacttagattattggttttttatcattttagataattctagaatcggaaaacgtccccaggatattaaactgtacaaagaagagcggatagatggatatgtgaaaaaaatcccactttccaaagaagaattacgagaacaattaggagaaggtgggaaaatttatacgactaatgcagagtacatgaaagccgttaatgatcatctgtttcaatttagggagattcaagtttttgaacatctgattaaattattaattgctttacgttccaataaattaggtgggggacaaaagccaaaaatggtgtatgaaatcttaaccaattccctatcatcattatcatcagaagaactaagtccacttagtaacacgattgaatcaattgatacaattgaaagggaattaactgaattacagtttgcctacgactacatagaagttatcacaagtgtatatgaagcctatcatgaagtgtatttagcagaagtggcaaatggatatttaaaggctgaaaatcgtttacagaacctttatgaacgtcagaggtataattcaaaccagttaagtattacccaaagtaatgtagtaaaactgaccgaagaaatatcccatttagaggcaaaagaaaagaccttgaatgagcggattgaagcgttgcgtagtaaggaggcaaaggacctctctatacaaaaaggaaggctcgaaaatcaaaaggtagatattactcgtctaatgaaaccgaaacaagagcagaaaaaaaccaaggaaacaaaaattaaagaaataaatcagctatttgaagcaacaagtacaaatagtctaaagtggataaatcgcatgaaagatgaattgtcagaaatggagcgctgtgctttagagtcgtcttttaagcagcatagccgacatgcaggacactttatcactcgatatgagtattttgattatgattttttcttatggaatcaagacattcaatcttatcaaacattcattcacgacatacaaaaacagatattcgagctcgaaaaattaggacataagaaatcagttcttacggaagaaaaaaatgaagctacggttctccttaatcagaaacaggaagagcttcgtatgatgagaaaaaaacttgatgaactgaagaaaaccttcagtaatgaaatggatgaatggttagaagataatgaattcttagttatgaatgaagaagagaaagagcaattgttaaaaaaattgtaccattttccttattccgtcacagaacgagaactaactgaaatgattgagcagcagtatactgatgtaaaaaggaaaatcaatgatgaaattcatcaagtagatagattagagggtgaaatcagacaaaagcagtctagtgtagaggaagaactcaatgaatggattgtcggcaagatgcctaaaccttttctttcaaaagagaaagaatcagtattagaagcaataaaagaatggaatattccgcatatcttattctatgatgcggttgagtttcaagatggtctttcagaaaaggaaatggcttccattgagtctgcattagaagatactggccttctaactaccgtaattgcagatccaaaatgggatatacagctaagtgagcatacaaaggttccgaacaagcatggaactccatttatgtttaacttaacccaatatctaaaaccaagtaagaaatcaggaaagctggctgtatgggttgaagagctgttaagccacgtcggtatttcgaaagatgaagagtgttttattttatccaatggtaacttcaaaaatggaattattaaagggcaagcatcgcttaaagagtcacctcagtaccttggtgaaagggtgcaaattcactataaaaaacaaattatgtcatcgttggaaaatatgttagacgaaatctcctatgaactagagaaattacaacaagaaaagagcgatttatttctacagctggatttgttggatgatgaatatcataatttaccagatagcaatgaaattttagaactatatcaagcttcaaacgggaatgaacagagtataaatgatatatttgagactaagttagattctgtaagaaaaaggcttaccacacttcaaaacgaaatggatacaatgactagacgtattcaggtagaagcagattttacagaaattccattaacatctgaagcgtttttaaaagtgagagatgaaatgcactgttatgatcgtcatttgaatcaaattaaaatgacttatatcgaattaaaaagtattcaacaatcgatggactcatacaacacacaaaagcagtcattactagaggatgtagataatttatccgcagagatttcgtcacacgaaaaagaattacagaaaattgaagttcaaatcagtgtcataatggaagagatggaacattcggggctacttgataatgaaaggcaaattctagaatatatgaaagaattacagtccattcctgataaaaaggactatctcagaaaaaatttgcttaaagaagaaagtaaatcattgcagttaagtgagaaaataagtttcatgttaaaagagcaaggcgttagagaggttattcgagatgcatgggaaaagtattttagctctctcttcacgttaggtgaaaatgatactttgagaagagtagctgaggagtatttggaaattgctcgtaattatctggtcgggaaagaagatttaaggagtctttgtacacggtctgaaaaagagttattaaatgaattctataagtctagacaagcaattgcacagtattctccaattcttgatgaatacgttagtaacattgaggataacctggagattccatcagagttagaggaattgaacttagagacggaatggaacaatctcatttctctacgtaagtacaaacttgttctagacatacaaattaacggcattatccaacgaagagaaccacgttatgtgctttccgttctcaaagaacgcatggacttgcagcgagctaatttaagtgatcgggataagagaatgtatgaggaaattctattaggttccattggtcgaacaattaagcggaaaattgttcaaacgaaagagtgggtaaaaaacctgaatgaaattatgatgaacattaatacggggggtgggcttcagttcggaattaagtgggtaccattgaaagctacaactgaagaagaactaaatactagagaaattgttcgtttactcgaaattgatgctcctttgttaaaacctgaagatcgagaaaaattaattgatcatttcagaagtaaaatagaaataaggaagctagaacaaggtttagaccaatatactggtttcgatttaaaagaaacatttaaagaaatacttgattaccgcaattggtttgaattccagcttatatcaaagtacgttaacgaagaagaattcactcttgtggatcaagataagtttggaaagttcagtggcggtggaagagcattagctttatacattccgatattagcagcagttagttcttgttatggcgaagctcattatgactcgccacgtattatttcaatggatgaagtttgggctgggattgataataaaaatattaatgaaatgtataagttacttgaggaacttgagtttgactttatttcgaacagtcaattcgtttctggttgttctccggctttgaaagggttatcgatttatgaactaatccgaccaaagaacagtaaagaaatcaatttcggaaggtatatctggaatggaagatacaaagaatatgtggaaaatagcttattaagcgaagactatcctggttcggccaatatgtaa

SEQ ID NO: 51150 - DNA, 1362 bp, Bacillus cereus
ttgtattctcaaattcaagaaacagtgaactattttcgttcaaaaggtggctacgaccgccttttttatttgtttagagaagaagttattcgatacggaagagtaaaaggcgttgtaattttaaaaaatgcaacagatcaggaaaaggaatgtttagatgggataatgcctaacatcaattttaaggataccgatattaaagtacgcttacttacttttgagaagagattaaaagaaaaaacagtttatgatagcataaatttgaaagatttattagaatgttatttttctcaaaagattgttagtaaaaaagaagtggataagcgtaaaagaggcagaaagtttcaatttattgaagaagtatctaaatacacaagccacccttattatcaatactatatagactcaataaagagaaaaggaagaggatataaacgttttatgaatttgtatgaggaatcaactaccactttgagggaatatttatcccacttaagccagtcgatacggattttacccttaagcaaaatgacgcatgttgctatgtttgcagctaaaatgacaaaaaatcctcatgcttatgatatacaaacctcattaggcgacttattttttgatatgttgacaattgcctatgagaaggaaacaacaaatacgcaattatcatctaaattatctatagaagacatcaatgatatattaaatcattgtaatttgattagagatgatatttctagtgatgtgatattcacaggtctttatgccaaagacataagaggtttaccaatagaatatattgatttagcaacaaagcatgacactgttttgaagttacctttatgtgagcttataaagatagaaaaattttatccaatggaatcattcaaagttgtttacgcatttgaaaatcctattctttacaaggtttttattgaatcagtaaaagaagaagttgggtgttatcctccttctgtgtgtacgagtgggcatttttcttatgcattatggaagttcttcgataaacttatcccatataactctactgtaatcattaaaactaatttcgatatggatcctgaaggattaaaaatgaatgataagctatatagtcgctatggagaggtgatccaacctatcgcttattctaaagagttacatcaagagcagcagtcggataagaaaattaatcttaaccgactaaagcaattagataatcttacacatggtgttctaaaggaaatgggtgagttgttaaaagaaacatgccaggcatcgtatcaagaaaactttcttgaagcttgtttagaggatgctattagtcaatttaagagacgagtaagaattatttcaaagaagatatag

SEQ ID NO: 51151 - DNA, 1572 bp, Tetrasphaera jenkinsii Ben 74
atggaccccgaagagacgctggcaggcctgcaagggcccgcactgccaacgtctccgccggtcgatcgccagcggctggaggcgctgcgctatgccgtcaatgaggagtcgggccagtacatcgccatcatgcgagtcttcacgaccgggctcgcgggcctgctctcggatcagtccgccgtggacgtgcgggaggcgctgaccgcgcagggggtgtcgctcgacctcgacacggtcgacgcccgcctctcctatctcgtagagcacggcaatatcgcgcgaagcccccgcgagaccgaggcccgcacgctggccgactatctgcgcaaccgggcccgctaccagttgacgcaacgaggtgagctggtccaccgacaggtcgaggagttgctcggtcacagtgagtccgcgcgcgaggtgtcgagccagatgctaggcggcatcctcgccggcctgaccgctctcgcggcgctggatgcgacccatctcgaaggcgtcgagccggaccgacttgcccgcgacatcaccaccgtcttcgcccagttcgatgaactcgtgcacagcacgcgcgagttctacacctatctgacccaagtcctctcgcgcttcgacctcgaccggtccgagttccagctgttcaaggtcgcgctgatcgactatctccagcgcttcgtcgatgagatctcccgacacatgccgcagatcgcggacatcttggccaccctcgacccagctgtgcccgaccttgttgctcgggccaacgccggcgaacgtttgctcgacaccggtggccgcctggcccggcgctcggcggggctcgacccgctcgactggcggagtctgcgagcctggttcaccggtgagggaggtcgcggcagcgacgccgacggggtgcgcaatctcgcgacatcggcgatgcgttccctcctgaccaatctgcggcggattgccacgtctgccgagcgtgagcatgggcggtatgccgatctggttcgcgtcgcgcgatggttcgacgatgctgacgacgacaccgcacacgccctctttgccagtgtcttcgggctctactccgcccgccatctcggctttatcagcgacgacccggagcagccggcctctccgatgacgtcttggtggaccggtccacgcgccgacgtgccggtcatgctcagggagcagggcgaacgcaccatcgccgggcgatccgggcgccgcgaagactttgccgttgccaaggcggcacggctggccgagcgcacgcgtgccgagcgagaccgggcggcggccttcgcggagatcgtcgcccacgagggacgactcggacgagtccgtgtctccgacctcgcgcgcgatctcctgctggagttgtatgccggtgcgctggccgccgcgatcgacggcgatgctcccgtcgtggccgtcccaggcaccgccgcagtcctgttcgtccacgaaaccccgggtgacgggaccgccgtgacgagccccgccggccgcctcaccctcgtcggccgcactcttgaagtgcgtgccgagcaggctgtccgcaccgatcacaaggtggcgcagtga

SEQ ID NO: 51152 - DNA, 1224 bp, Tetrasphaera jenkinsii Ben 74
gtgacgaccaccgccgatcggatcgccgcgaccgccgacccgcaggacctcgccgaacgccgccgggcggctcgggcgctcctcaaacgcccactgctcgccagcggcagcacggaccccgacgacctccggcttgtccgccgccaccaaagtgagctgatccagctctttgccgacgggctgggctatcgcctccaagttgatcccacctcagcccggctcttcaagaccggactcggccccgactccacgcgaccgctgcgacggcgcagcggcgcttccttcacgccgcgcgcgtatgccctgctgtgtctcacgatcgccgccctaacgcgtgcgcgcacgcaacttttggtcgacgaactcgttgcccaggtccgggcggctgcggtcgacgccggccttgacgtcgacctggacgcaattggcgatcgacgagcgcttcatgcggcgatcgtcgtcctggtcgatcttggggtcctgcgtgagcgcgatggcgacttggagcactgggccgatcagcgcacccaatccctcctcgacgtccgacgagacctgctctccctcctggtggctgccccgctcacggccgcctcgtcggccgccgatctgctcaccctcgcggctctgccctcggccgtcggcggtgcgcgcatcgccacccggcgagccctgctggaacgccccttgctcaccaccgatgacctgacagctgagcacgccgagtggtggcggcgcaatcgcaatcgcgaacgcgattggtatgaaacgcatttcgggctagagctggagttgcgcgccgagggtgccgcggtgatcgacccggacgacgacctgagcgacgaacgcttcccaggaaccgacaagacccgacaacttgccctcttggtcctcgaagcgttggccgacgaggtccaccgcaccgcgcccgggggcgcaggcaccgcgtggcgcggactcccgctcaccacggtcgagcgctgtgctcaggacgtccatgccaggtggcatgatcggctgcgccgagaccaacgcgaggaccccgaccgcgccctccgcgaggccctgggcgtccttgctcggttcgggctcatccgccgcgaggacggggccgtgttggtccacgccgccgccacccgctacgcaccccgagtggcgctgctcgcccagagtgcgaccggcgagacctcccttttcgacgacctgaccgacggcgaggactga

SEQ ID NO: 51153 - DNA, 4062 bp, Tetrasphaera jenkinsii Ben 74
atggcgatcgatggcagccgattccggatgcggcgcgctggcgtgctcaatgtctggcaatacgacgagcaagtcttcgacttcgccgacggccggctactgctgcgcggggccaatggcgccggcaaatccaagaccatggagatgttgctgcccttcgtcatcgacggggacaagtcacggctgacctcatcgggtcgccaccacaccagcctgctctggctgctcctcgacggctacgacggatccgcccgcactggctacgtgtgggttgagttcggccgcgacaacgccgacggcacaaccgacgtgatcacctgcggcgtgggcttgcgggccaccgagaaggcacgagccgccacgtcgtggttcttcacgaccccccgccgggtcgggcatgacctcgctttggagaacgcggccgggccgctgagccagcctgcgctcgccgcggcactcgaggacgagtccggggcgagccgcgtcttcgacaacccccggcactatcgcgagcacgtgggcgcgctgctgttcggcctgcccctggaccaatacgaatcgttgctccggctcctttactggctgcggcagccgcaggtcggggaggacatcgatccgcggcgcctcgccgagcaactcgtcaatgccctgcccaccctggatggcgacaccctgagcgcagcgggcacgaccttcgatgaactcgaggcgttcggcgaggacatcgaccgtcgcgaacgcgccgccgccgcgctcgccaccttcgtcgagacgtatgccgcgtacgcccgctccgtcgttactgaccgcacccgcgtcgctctggaggccgcgaaggcggtcggcgccgcccggcgacgattgcggcggagcgagggctcgctcacggaggtgaccgagggtctctcggcggcggcgatggcgatcgacgcggccgagcaagcacagcgggaagccgcatcgcggatcgccgccctcgaacagagcccggaagcgcaggcgcgaaccgatcttgcgcagtccgccgagctggtgcaaaccctggagaaagcagccagcgacctgcgggctgtggccgagaaggcacacgtccgggcgcaggccagtgcccgcgaggcgtcagcggccagcgaccgcctgatggaccgggctggtgaactgcacgacgcgaccgagcgcgccgaggctgctcttgccgcgtgtggggccgaggctgcccccggtccgacggcggcccaggtgcttagacgaccggattggcgcgatgccgacgcggccagcgccgtggaatcggcggtcgcgcacgcggggcagacacacgccgagtgggccgagactggcgctcgcgccgcgggtcaagtcggcgcggccatcaccgtggtggaggaggcccgcggcacccatgtgcgtgctcaggagaccacccggcgggccgaggccggggtcgatcgcgcggaagccgcggagacggccgccctggctgacctggagaccgcgcggacgcggacgcaaactcgcgagcgcgagctgaccgacgccttgcagacgtggcaggccgccccgggcgccgtctcggtcgtccttccgacgctggacgcggacggcttggcgcacctggagtccatcgtcgcggaggcagccgcgccggaccaggagcggctggcgacgcaggtcgcggaggcgagcgcgcggcatacgcagatcgtggccgccctcgcccgactcaccagcgagcgcgccgcgatcgaggcggagcgagatcctgctcccgccgtgccggcgtggcttcgagacgaccgacgcaacctccccggcgcccccttgtggctcctggtggacttccgttcggaggtcgaggcgcaggtgcgcgccgcggtggaagccgccctcgaggggtcggggctacttgatgcctgggtgaccccggacggcaccctgctcgatcccgcccgccacgatgtcgtcctgaccgcaaacccggtgccggttgcggcagatgccagtctcctggccatcctgggcgcagacccctcggcccacgaggccgtgccggcgcgggtcgtcaccgacctgcttggctcgatcgcgttcgcctcggctggtgccggacaacacggcgcacgggacgaggtcgccgccgtcgtcgcggcggacgggtcgtggcgcctcggacccgcgcggggccgcacagcaaagccggttgcgcagtacgtcggcgcctccgcccgggcgcaggagcgtgcccgccgcctcgccgagttggacgagcgcatccgtcaggaagagcaggcgcgcgacacggccaagcaggccgctgccgaggcacagcaggcgctcaccgccctgatggcgtggctgcgcgcgcggcctcgacacgacgccgtcctgacggcctgggccaccgaagccgcgcgaaccgccgtcgcggagcgcgcctccgccgaagccatgggtgcgcgggacctcgcccgggatgcccggtcgcaggaggccgccgcgctgagcgacctcacggcgaccgcggcacgacacggcctgcccatcacgcacgaggggctcgccgctcgccgcgaactggtggcgagggcagggaaggacctggaccgggtcgggtccgcccgacgcgccctcgacaccgccttggacttatggcgcggcgtcgtcgcccgcgcgaccgacgacgccgccgaggccgacctggggggcacccgggcgcgcatcgcccggagtgaagccgccagccgacgcgccgcccacaacgagttggtggcggctcgcggcaagagtgtcgaggacctggagcggcgcctcgcggagcagcgcacgctgcgccaggaggccgtcgaggcacagcgccgacaccgcggcgaacacgatcacctgctcggccggcaggggcagctgcggcaagaggcggacggtcaccgcgcggccctcgccgaggccgagccggcgcgggacgcggcatacgacgccgtccgcgcactgcatgcggttcccggcttgattagcgcggccgacgtcggggccgatccggcacgcccgccgacggagcgggacgagatcacctccctgcacgagcgagcagcggccggtacgcaggcgggcgccaacgcggtccttgcggccctgaccggccttcaaaccgggccggcctccatcgtcgagccgcggttggccgagctcgacggcactttcgcggcactcggacgggacgagtcggcgggcgatatcgccctcaccgaactcgccaaccgcctggctgcacaggtcgccgccgaccgtgagctgttgaccgaccgggagcgacacctcttcgagacgcacgtgctcggccagctcggcgacacccttcgcggcgtccgccggcaggccgacgagctggtcgcggccatgaacgtgcagctcgggcgagtctccacctcccagggaatccgggtgcggctgcgctggcggctccgcgacgacatcccctcggatgcccgccgcgcggtccagctgctcggcgaggccagcggggcgctcctgcccggggagcgcaccgagctgcgcgacgcgctgcaccggctcatcgacacctcccgggtcgaggcgcccgaggagtcctacaccgagcacctcacccgggcactggactaccgtcaatggtttgccttcacggtccaatatcagcggcccgagtccggcgattggcgcgacctgcaccgcaagagtccgttgtcgcagggcgagcaaaaggtgctgtgctacctcccgctcttcgccgccgcggctgcacatttcacgtccttggccggcgccgcaccgcacgctccccgattcgtgctcctcgacgatgccttccccaaggtcgatgcccgcacccatcccctgctgttcggcttgctcgtcgatctcgacctcgatttcgtcgtgaccagcgaacgcttgtggggcacccacgcaaccgtgccatcgctggcgatctatgaagcgctgcgcaatccggccgaacgcgggatcgcccaatacgagcatcgctgggacggccgccagctgaccgcggtcggggcgcgtgcctga

SEQ ID NO: 51154 - DNA, 1227 bp, Tetrasphaera jenkinsii Ben 74
gtgcctgacggctggtggaccgcgccagccttggagcggtcctggctggccgtcgccgatcgccttgagcgggcgggactggtcgcgcagggccgcgtgcgcctgcgcgacctgcatcgcgacgagcagcaggccctctccggtctgctcggccgcagcatcgtcacgtccagcgtggaggtggacttggcctcgctcgatgaccggctccgctcccgcgcgggcatcgacctcattgacgccgccgccaccgtcaccggccgggtcctggtcgatcgcccggcccggagggcggataaccgtgagcgccacgaggcccctacacgagctttcgccgcctggcaccaagcgcatcccgatgctggcctgccgccgctggcggagtggctggacggacttcgccgcgacgggctactcggccggcggggcggcgatccagccgctttggtgactgctgccctcgacgtgctcgcccaccgcgccgagcacctgaccggtgtcggtctgtctccgccgatcgcccggaccgagctcgcagcgcgacttttcggggacgcgcatgcactggacgacgaccgattgctgacacgcgcgatcctgcgcgcggtccctgatggcggcgaaggcaccacccaacgggcctcatgggagcggctcggggtgctctcggaccggatctcgtcaacctgcctaacgttcgggctgcgctgggccgccggcgcggcgggggcgcgcgcctcggcatacaccctcgagagggccgtcctgcacctgacctggcgtgacctcgatgagggcctcgagccagcgccgggccagaccgtattggtctgcgagaacccccgcgtgctggaggccgccgccgagatcggggtcacggtcggcgtcgtctgcaccagtgggcgagcaaacctcgcgacgattgaactcctggaccgcatccagtccgcgggcggccagctgctctatcacggcgacttcgactgggccggtgtcgcgatggcgaatcatctgcgcgcgcgatgcggcgtgcagccgtggcggatggacgtcgatgactatctggcggcgcccgcatcgctcgccctgaagggcagccgggtcgacgcgagctgggacccggaactcgccgccgcgatggcgcaccgtggccgggccgtgcacgaggaggcactgctcccggccctgcttaagggcgtacactcaaaaccatggtctacaccgtag

SEQ ID NO: 51155 - DNA, 1332 bp, Lactobacillus ginsenosidimutans
ttggctgattatactgctgaccaactggataatgatctgaatttgttgactgaatggggtaatttgcaggctcaacaagagatgactcatccaaagacaattgaagagtatcggaataaacattttagatatcaaatcacgacggtaggaattgccattgaagaattcatacagtcattgccaagtgaggatgagaactcgggggatttggattcacatttattcgaaagattgctggaagtcttaaacaaattgaactcgtttgataatcagaaattattggatggatgggaagacttgcatgataggtttgacaaaattcgccgtaatgcaacagggtatgtggcctatttgacctctagtaaggtagaagacttaatgcagaccaccgagtttctagtctataaattaaaattcatcgaatatttacgagaatttattcgtaagatgcaacagaccagtgtggcgattgaaactgcattgaatggtgtatctgaggatactattcagaaaatcattaagctacaaactgaacacgatgagaagaaaccaacttttacaaagcaaagttctcaagaaactgccgggagaataactgaaacttggaagcatattcgtgactggtttattgatcaagaggggcgtgacagtgaatacactaatctgattgcccaaactaatgaggcgatgagtcgtgtaaccagcattattcaaactattactgaaagcaatcagcaacatcgaagtcggtctaaggattatttgcaaattgctagttggtatcaatcaattgtcgatagtgcatctgatgaagaagctaaattgtctgacgcgaataagctatcatcattactctttagctttggaaaaactagacatgtgcaggctgctgccatgaatgtcaccaaccaattggatgaattatggaaaatggaagtaccaaatgctgaattgacatctaaaagtcggaagaatagagccagggttgtaaacaagccttttgttaaggatccggagaaacaagctcaagtacgtttggcatatcaaaagaaacaacaagagactcgagcaatgtggaacaaatatttggaaggtggatcacttcaattgtcgaatattcacgaacttccgattgaaatgcgacatgatttaattagatacttttcatcagcaatggttgcgtcagatcaccgagttgctactaagctaggctgggtttttgaagttaaaattgatcggaaacgactggtaactgtgcagttttcagatggatatttaacgatgccagatacggaattcaaaattgtgggagggcaagaaattgaaaaatga

SEQ ID NO: 51156 - DNA, 1101 bp, Lactobacillus ginsenosidimutans
ttgaaaaatgatgaagatattcgaatttgtttagatgctttgcttgaaaatcgcgtaattttagataacaagcaatcggaactgtttcgactaatcaagaaaaatacttctgatttgagaaagctctgccttaacgaccttgggatgagattaattgtgaatgcgcattttattaaattggaaaaaattccagaatatccgcaatcgtttatgggaattgaaaattttgatgaagttgaagattatgtcatgtttgcttgtgttatgtctttccttgaggagactggtccggatacaccttttttgttgccggatttaaccgacaatctgaaaagaaatatgccagtgaagattgattggactgagtttcaaattagaaaaaggttagtcagagttatcaaacaattggtagaactatccgtgattaatgtcttggatggtaactatgatgagtttgaccgcaatgaaaacgaagaggcgttgttcacagcaacaaattattcccgttacttgttacgaagattcccggagaacttacaaaatttagaaagttgggaacagcttaaatttagtcccgatgaacacgctactagaattaaggttatccaaagtttatttatttcccctggaatttgccgcacggaggaaactgaagaattattcagatatatgcggaatcaacaaaaattcttaattgattattttgaacgttattcttattacgactttgaactatctaaagatttaggattgttggttagccacaaccgacgcgcccaaattaaatacattcctgataatagcagtgctggggacctgttgatgatagttggggataaattgcgtgatggtcagtttaatactgatgaatatggccaaatccatcttggaatctcacagtggcaaagtattgtgtctgaggctgtgattgataatcaagaacttttgtcaaaaacatatcgggaaaaatcacttgaactattggctaaagaattattagctcaaactaatcagactggcttgactaagttaaatgatactgggattgttgttacaccaatttttgccagattgagtggcgaatttattaaaaacgactag

SEQ ID NO: 51157 - DNA, 4077 bp, Lactobacillus ginsenosidimutans
atggaaaatcaatatgttttaaatcgattgggattaataaacttttggtattatcaagatcagatttttgaattaagcgatggccatttactcctgcgtggtagtaatggtgcgggtaaatcagttactatgcagagtttgatgccagtcctacttgacggtaacactgaagctagtcgtttagattcttttggtagtcgcgaccgtaaaatgttggattatttgcttggcgagaaagatgtcagtggaaaagacgaagcagttggatatttatgggcggaatataagcttggtgataaatatataacgactgggatagggatgcatggacgcagaaattccaccaaccttgaccgctggtactttgtaattgaagatggtcgaagaatcggtgctgattatgacttttcacttctaacaaatgaaacggaaaactctgccacgaccttaagcaagaaacaattgaagaatcagttagttcaaggtggcaatgtttttgataaagctaaggattacgcgaaatacgtgagcaaccatatttttggattcaattctatcgaggattttgaagatacgattagtttattgattcaacttcgtaatcctaaactgaataaagatttcaagccggatgatttggaaaatattttggcatcatcacttccaagcttgacggatgacaatgtgcaagcaagcgcccagactttggaccaaattgagagagcaaattcgaatattcaggatagcaagaatcaggaaaaagcgcttcaaccacttcttagagcatttaacaaatatcgtagagatcaattattaacgctagcccatacatcgaagaaacattcagatgcttatttgagtttgaacaaaaggcttaatgatgttgagaatgaaaaacaaaataatctacaattacaagatgagttgactcagtctgtcgataatttggaaattgaactcactgctcaaggagatcttcgaaacaagctttccagtaataaactttttgggttggctgaaaaagagaccaagctagagaaggaccttgagaatatttcgaaggattatgagaataaacataatcaagtattacaaaatcaagtaaatattgatactcaacaagataagcagaacggactgaattataagaaggctgaaactgagaatgagttgaagaaattgagtgagaagatgcaaaacattgctgacaagcttagttttacaattcaacatcaattgataatctcttcaacttctgagaaaacagatattgactttaaacattggattacagaagctcatgagtatcagagtaatttacgagcaatcgtcaatttatttgagaaacagtcccgagttgaagaaaatattgatcgattagacaggtcgttgagtgtggagaatgataagctctcaaagatgcagcttgaacaacgtgactgggaatctagttacaatgaatatttattcaatttaaagcaagcgttgatggattatcgtgactctttgagctttgaaattactcatgaagttatcggaaccgtgcagtctaatttggataaaatttatacctctgaagtttctgatttttctgttgctgtgaaaccaattatcgatgaattcactaataaaagtgccgaacttaaaattcaagaaaaagaagttacagctgagattgaccaaattgatcaagaaattggtgatttaaaagcagagcaggaaaatatccgttcgcaaaaatatcctgttccggaacgattatctagacgtgaaaaagcacgtgatcaacagtcagatggtgttccgttttatcaactgctggactggaatcctgatatttctgctgatgttgccggtaaattggaaggtgcattactagagagtggcattctagatggattggttactcaagatgggaaaattgtggttggggattccgttttggtagctgaacccttattaatgcagcagactttagcggattatttgaaagctgatttggattccgatgttaatattgaaaaatcccaaattactgaactgttgaatagtattgccgttgatgatactaatcatgatgttcaaaccatgattaccgttgatggtgaatttagagttggaattatttctggaaaagctcaaccggattatgtttctcaattcattggtgcgactgctcagaaaaaatatcgtgaatcacaaattgagaagattcagggggagattaatcaaaagcttagtgacagagagttgacaaccaaaaggcttgaggaaactcgtcaagaaattgttcgtgttgtcgacgatcaagccaaattacctacagatgatgatttgcatcaagctcatcatcaggtagaagtatgtgaccacaatattgagttgcaaagaaacacggtaagtcaagctagtgtggcacttgaagctgaaaaagaatcctctcagaggattagattgggaattaatcagaaaactcagaatattaagattgctaaaaatgaggaagcttttgttcaagcgactcaatcgatggaatcttatttgtctgggattaatgaatggaaacagtttgcaaataacatcaataatcagaatgaacgaattaacgatgttattgaaagactagctgaattggaaaacgatttggttgaaagaaaaactgagttaacgacattatatgaaaagaagcaacagattaactttgcattggcctctaataaaaaattgcagggtgctgctggtgatctggctgatattcgtaagcaaataaaggatatcgacgatagaatagaatcaatcaagcaccagcaaaaaggtaacaataagcgactgcatgagcttgctggtaaggttgggtcatatgaaagtgatatcaatcttttctcaacacaactcgagtttgaaaaacctttttcagcattgttgattcaaacatttgataaagaattgagcattgaagttggtgacgatgagtcggaccaagatacgttaagaactgaattgttagacgagcacatgccagaagctgacaagctaagtcacgatattgaaatcgtcaatcgacaattcaatacgcaaagtaatgacctcttggatttcggtcctaaacaacgaagtcggtctactttgactgagccagattggattaatgacttttcagattatcaagctgaaattgataattggcgcagagatttgaatatccagcaggaagtattagtcgagttatcaggtgtcgacagttccgttactcagttggacgaaaaactgaagcaacaaatttcgattaaccaagaagctatgacacaaggtgaagaggaattattccgaacaattatttttgacagcttaggtaaaattattcgccaacgaattaataaggctcaggattgggtcgataagatcaaccttgtccttcgtcaacaggaaaataattctaacttgaaattgaatattaagtgggagattaagcctagtgacgagttgagcgatactgataatcaagaaggcgttaatttgctgaagaaggatcctaaggccctaactgatgctgacttgaacaagattaagcgtttcttgaatagcaagattaatgctagacgtgctgaatatgaggatgaaggcaagtcagttcaaatgactactgtcttgagggatgcactcgattaccgtgagtggttccagtttagaatgttttacactcagaatgggaagaacaagcgccaattgactagggctgttttcaatagattctctggtggggaaaaagctattacgatgtatacgccattatttgttgccatgtcggcaaggtatgataatgctagtgattttgcacctcgaattattactttggatgaagcatttgctgggattgacgagagcaatatcagtcagcttttcaaaaccatcaatcaactaggattcaactacatcatgaattctcaacagttacaggccgaatattcaactgtcccaagcttgaacacctatgaattattgagagccaaaggtgaagctggagacttggtgacgacaattaagattcattggaacggaaagaatagggaagaatag

SEQ ID NO: 51158 - DNA, 1218 bp, Lactobacillus ginsenosidimutans
gtggcgaaggaagcattagattcagcaataaaatatttcaaatcgagtccggtgttcatcaaactgatgaaggaaatggctggcaaatattattcatatggtgaattcaaaggaaccatcgataaggaattattgggtaataatgcatctctactggctttcttaggagtaaataagtttcgatgggaaaaaactaagcggtttaaagtatctgattttgaagaagctttagagcatagtagatttgccgggattagtatttttgaactcgttcaaggagtgattggaaagaagttagtcaccaagcaatcgattgacgaggaaaatgaaagagcgtttcaacgatttttgacttctgttcaagtatcaaatcccaaagtgtgtagtattttatctgaatcaaaaataaaatcgtattacacccgcgatgcaatccttgatgattttatacaggtcgaaaaatgtcttaataatattccagctcaaccgactagattgcctgtatttgcatttctgatactaaaaaatccccacgggctcgacaaaacaaccaccgtagggaaaatgtttttagaatgtattaagttattaaggcctaaactgacagacgggaatgaaatttatttgagtgtgaacatagttaaggatgatattttgaattttgttacagttcaaaacattgatgctaatgacgatttatttcatgcggcttcgagtcaacacatggtttggaatgttcctctcatgaaactacttgagcttgattctgcttttccatcaaagggtaacaaggttttcttaattgaaaattccagtgtctacgcaattattgttgataaacttaaagatataccaattattatgacaagtggtcagttcaaatattcaacgtggaaattattaagcttgttgccgaaaaatgttgaaatataccattcaagtgatttggatccagccggactaattatgtctaataatttaatggaaaaatttggagacagagtccatctttttggaatgtcgtcagagatttatcttaaaaaagtagattccggtgtaaaacttacaaatgagaatctttccaaagtaaagggtattaataacccaactttacagtcactcaagcaaaatctgattacacaccataaagcggtatatcaagaatctgaaattgaagaattgattgatgaaattcagataatttcggaaactgattaa

SEQ ID NO: 51159 - DNA, 1518 bp, Thauera humireducens
atgccctattcggacacatcgaccgacctgttccgacacgtcagcgcagacaaggccggcatctaccgcaacatcatggcgagcttcgccgcggcaaaacgccagttcaggctccacatgcgacccgacgaggtgctggccgaagcccggtggagcgatggcgtaccgaagctcgaggaggttcagagcgcgcttgctcagctcaccgagtggggcaacctcgaggcgcaacccgataccgcgcgcgttgccagcatcagcgacttctaccgcgcccgcttcctctaccgcctgtcccatggcggcgaagccgtcgagacggccctcactgccttcgccgaagcgctcggtcggcgtgccgagttgcagacggtcgcgctcgaagacatcgccagccggctcaagaccttgctcgcgctggccgacgcaccggcgctcgatgcggcgaagctgcacgaaaccctgcgcgatctggtgcgcgtgttcgaaagcctcgccgacaacgcccaggccttcatggccggcatggcacgcagcatcgagctgcagcaggccgacgccacggcggtggtcgcctacaagcagcgactgatcgactacctcgagcgcttcatcggcgacctcgtcgggcgttccggtgcgatcgcgcagcacattgccctgctgcatccgcgcatcgatccgctgttgtgggcggccgcgcagcgcgaagcgcgcgacgccgcgcccggggatgaacaagcgcaggccgatgcactctcgcagcggcagcaggcctggcgcgagcgctggaggggcctgcgcggctggttcgtcagcacccatcatgaaccgccgcaggccgaggtgctgcgctcgaaggcacgtgcggcgattccgcagttgctggccgcggtcgcggcgctcaatgagcggcgcagcgggcgcagcgatcgctctgccgacttccgcgtgctcgccggctggttcgcgacctgcggcagcgacgacgacgcgcaccgcctggggcgtgccgccttcgccctcaatccggcccgccatttctcgctgaacccgggcgccggccatgagctgccggccaccacgccgtgggccgaggcgccgccgctctccatccatccgcgcctgcgcgagtacggcgaggccgccccgcggggccccttgcccaaggtgcgcgagcgcagcgaagagcgcgccctgctcgcgcgccagttgcgggaggaacatctgcaggtcgaggccgcgcgggtgcgcctggcgaccggtcgaacgacgcgcctgtcggagatcggccacctcgatccgcacgccttctcgctgttcctgtcgctgctcggcgaggcgttgacggcgcaatcctcgcccgacgacgtggtcgagcgccagaccggcgacggcctgttgcgcgttcgcctcgagccgctggaagcgcacacccgggccgaagtcgtcaccgatgccggcgtctttgccggccgcgaccaccgtatcacgatcaccgccacgcaagcgccctga

SEQ ID NO: 51160 - DNA, 1239 bp, Thauera humireducens
atgacaaccgacagcaccgcgatcggccagcagcaggccctccatcaacgcgaggagttcaccgccgcgctgcgcgccctgttgatgacgccgctgatgacaccggcacacgcggaattcgccgccgtgcgccgccacgccgatgccttgcgcgaatggttcgtccgcgaggccggctggcccctgcatatcgaacgcgatgcggcgcgcctgtacaagcgtccggccgacgtacacgacgccacgcgtgggctgcccggctacgagcgccgccgctatgttctactgtgcctcgcctgcgcggtgttggagcgcgccgacccgcagatcacgctgcgcgtgctcggcgaccggctgctcgccctcgccgcagacccggcgctggccgcgctcggcttcagcttcacgctccaggcgcagcacgagcggcgggagctggtcgcggtgtgccgcacgctgctcgagctcggcgtcctgcatcgcgtggccggtgatgaggagggcttcgtacacggcggcagcgaaggctcggacagtctccatgacgcactctacgacgtgcagcggcgggtcctcgcaggtgtactcgcggcatcgcgcggcccgtccacgtggcccgcggatgacgctccggacacgttcgaggcgcggctcgccgcgctggtggcggagctggtaccggacagcgacgagggccggcgcacggcgctgcgccaccatttggcgcgccgcctgctcgacgacccggtgatctacctcgaccgcctcgacgccgaccagcgcgcctacttcatgaaccagcgcggcacgatggccacccggctgtgcgacgccaccgggctggtcaccgaacaacgcgccgagggcctggcgctgaccgacgaggacggcgagctgaccgacgtggcgatgccggccgaaggcaccgaagcgcatgtcaccctgctcgtggccgagttcctgactgcgcgtgcaaacagccgcgcaagcaccgacgaagtcgccgcatttattgccggcgcacgccagcgcttcggcaaattctggcgcaagtccgcgcgtgaagcgggctcggagcacgagttggcggcgaccgcgctcgaacgcctgcagcgtcttcaactgctcgaacgcgacggtgccgaagtacgacccttgccggcgctggcgcgctttgccgtcggcgaggccgagctcaggccggcggcacccgccaccaccggcaccctgttcgattga

SEQ ID NO: 51161 - DNA, 4164 bp, Thauera humireducens
ttggatactccggataccctgctcgacaccccgtccgaccttgcgacggccgacgcccgcccggcgctgcctcagccgacgctggcccgctggcaaccgcttcgcctcggcctcgtcgagctgttccactacgacagcgaggaattctggttccgcgatggccacctgctgctgcgcggcaacaacggcaccggcaaatcgaaggtgctgtcgctgaccctgcccttcctgttcgatgcccagctcaagccctcgcgcatcgagcccgacggcgacgccggcaagaagatggcctggaacctgctgctcggcaagctcgaccgccgcatcggctatgcgtggatcgagttcggccgcatcgccgacgatggcgagcccgactatctgacgctgggctgcgggctctcggcggcggcggcgcgggcccaggtcgatgcgtggtacttcgtcctcgaaaggcgacgcatcggcgaagacctgtggctcaccagccccgcccgcaccgtactcacccgcgagcgactgaaggaagccttgcacgagcacggccaggtgttcgacaccgccgccgcataccgccgggcggtcgacgagcgactgttccagctcggtgccgtccgttatgcggccctgatggacaccctggtccagttgcgccagccgcaactgtccaagaaacccgacgaaggcaacctctcggacgcgctgaccgaggcactgcctccgctgtcggccgagctactgaccgacgttgccgacgcgctcaaccagctcgaggaataccgccgcgagctgcaggattacgaagcgctggctaaggccgtcggccagttcaaccagcgctaccagcgttacgccgcgatcaacgcgcggcgccaggcccgcgggctgcgcagcgcacagagcggctatgacaccgccagccgcaatctcaacgaagcccgcaccgagttgcaaacctcgcagcacgccgaggcgcgggcgaaaggccgcctcgatgccgccgaagccgcattgctcgccggccgcacgcggctcgaccagctgcagtccgacccagggatgaaggacgcgaatcgcctgaaccaggccgaacgtgactccgaatcgcgagccgccgacctcgtcgacgcgacgcgcatgagtgacgaggcaaccgcccgcctcgagcgcgaacgtcgggcgctcgatgaacggggcacgcgccggacacaggccgaagaggccctcgccacagcacgcgaaggcgtcgccgcagcggcgctggccagcggcatcggcgagccgtggcgagacaatccgctggcggcgcttccggccgccgaactggcaaccctcggcgacctgcccctcgacacggccctccaggatctgcgccaggcaacccaggttcggcgcgaacagctcgccctggtacagcgccgcgtagccgaggtggcgcaggccgaggccacccacgcaagccgacaacaggcccgtgacgaacgacaggacgaagccgaagcggccgccgcccgccgcagcgtggccgacgccgcggtcgagaccgaaggcagccgcgtcgtcgaggcctggcaggcgcacttcgcgaacctgcaggtgctgcaggtggctgagccgccgctgtccgcgctggccacgtgggtcgccaacctgcaaggtgacaacccggcccgtgccgccttgtcgtccgcccagcagcgcgccgccgacgagttggccgggcagcgcgccgcacagctcgctgcgcaaaaaacgctgcacgacgagcaggcgacgctgcgcgccgagcacgagcgacttgcgcagggcgaagacgccaccccgccgccgccttatacccgcggcaccgaggccagacggcaacgggccggtgcgccgctgtggcagctggtcgattttcacgagcacgccgacgccgcccagcgtgccggcctcgaagccgcgctcgaggcggccggacttctcgacgcctgggtcacccccgatggccggctgcaggcggccgacggcgcgccgcccctgcacgacacccagtggctggagcggccacgctgtgacgcctcgctcgccgcctggcttaccccgtccgccgcggcggcaacgcccgcaatcgatgccgcgctgctgacgcgcctgctcgaaggcatcgcctgctccgcgcaagacgacggccgggccgaaggctggatggcccccgacggccgctttcgcctcggcgccctagccggcgcgtgggccaaaccgcaggccacgtacatcggctacgcggcccgcgccgccgctcgagcgcgacggctcgccgagatcgatcttcgcctgggcgagatcgccgacgcttcacgccggatcgacgatgcgctgaccgagcttgcgcggcgccaggagcgggcggccgccgaatggaaggacgcaccgtccgacgagagcctgcgcgccgcccacgccgacgccgcggcccgcgagcgcgagttccagactgcgaagagccggctcgacgaagccgagcggcagctgcgcgcagcctgcgacgccttgcaaagccgccgcgatgcgctggccgccgacgcggccgatctgcgcctgcccaccgatgccgcggcgctggaagccgtcggcgccgctctgttgcacttcggcgagaccctgcacgggctcttgcgggtagcgcatgagctacgtctgtcggcaacggaactcgcccgccagcaagcgcggacgagcgaagccgaggccgacgcgcgccagcgcgccgagcagttcgccgagcgcggccggctcgcccaggaggcgcaggtgcggcttgccaccttgcgcgaatcgatcggtgcgcaggtcgatgagctgcaacggcggctgcgcgaggcgcgcgctgcggtgagcgagggcgatcaccacttgaaggcggcaggcgaggccctgcgcaccgccggcgaggcacgcgcgcgcggcgagcagaaggtgctcgacgccgacgccacgctgcaggaacgcgccgatgcccgccaacgcgccatcacacagctgcagggctttgccgccaccggcctgctgtccgccgcgctccccgaggccgagctgcccgacctgcgtgcgccctggacgatcgagccggcgctcacgctggcccgccgcaccgagcaggcactagcgcaggtggcggacgacgacgaggcctggacgcgcatccagagtcagatctcccacgactacggcgaactcgggcgcgccctcacggcgctcggccagcaggcccaggccgacaccagcgactacggcatggtcgtcagcgtcatctaccagaaccgtccggagcgccccgaccagctgaccgcccggctggctgccgagatcgcccagcgccgcgagctcctgacggcgcgcgagcgcaccctgctagaaaatcacctccaggccgagatcgccgccgaggtgcagcggctcctgcaggcggccgagcggcaggtcgatgcgatcaacaaggagctgaacaagcgcccgacctccaccggggtcaagttccgcctcttgtggcaaccgctgcccgagggcggcgagggtgcaccggtgggcctagaggccgcgcgcaagcgcctgctcaacaccagcaccgacctctggtcggccgaggaccggcgggtggtcggcgagatgctgcaccagcgcatcgccgccgaacgcctgaaggccgacgccgtcgacggcagcctgctcgagcagctcgcccaggcgctcgactaccggcgctggcaccgcttccgcgtccagcgctggcaggacgggcagtggcgtccgctctccggcccggcctcgagcggcgaacgcgcgctcggcctgacggtgccgctgttcgccgccgtgtcgagcttctacagtcaggccagctacgcttttgcgccccgcctggtgctgctcgacgaagcctttgccggcatcgacgatgccgcccgtgcgcattgcatggggctgatccgcgagttcgacctcgatttcgtcattaccagcgagcgtgaatgggcctgctatgctgagctgcccggcgtggcgatctgccagctgcagcggcgcgagggcattgacgcggtgcatgtgtcacgctggacctgggatggacgggcgcgccggcgtgaagacgatcccgatcggcgctttccccccgaatga

SEQ ID NO: 51162 - DNA, 1194 bp, Thauera humireducens
atgaccgtggatgcccgccttcaacggctgctcggcggcgaaccccttgcggcgctgcgcaagcggctgcgccaacgctatgcgcgcggcgcgccggccgacgttctgcgtctgggctcgctgagcgaggccgagcatgccgccctcgcggcactttccggccgaccggcgcgccctgtgcggtcgatgcagatcgacgtggcggagatcgacgcagcgctcgcccgagccggtctcgcctcgtccttgcgcgatgcgctcgaacaactcgacggaccgatcatcgacgccagggccgaacgcctgcaggttcgctggcaatggcagcaggtggtcgagggctgcgcacaccccggcctgcgttcggcgctccagacatccgtcggactcgggctgctgaagcgcttgtgtgccagccagcccgaggctggcgcccgcttggtcctcgacgctgatcaagtgttgcggcggctgcccgcaggggggattccgcgggcgcagctggccgttgctactctcggtaatgcgcacgcgctcgacgccggcagcccggtcgccacgctggtcctctcggccctgcgccagggggccgcgcccgacgatgacgccgaccgggtacgggacctctgggccgcggccggcgtgctggtcaatgagctggcgcggcctgcgctgaccctcaacctccccggaccgacgggcacggaaccgggcgaaccgacctatttctcgctacgcagcctggtacgatcgccgccggcctgggccgtcacgggccgcccggtcttcgtctgcgagaacccgaacctgctcgcgatcgccgccgaccagctggggctgcgctgtgcgccgctggtatgcaccgacggcatgccggccgcggcccagcgcgtcctgctcacgcaattgcgcgccgccggagcaacgctgcattaccacggcgacttcgactggccgggcctgtgcatcggcaaccagatgatccgtgagcacgacgcccggccgtggcgcttctcggccgccgactatcgcacagccgtcatcggcgcaccacgtcccggtcgcctcctcgacgatgccgccgtcaccgcgctgtgggacgagacgctcgccggcgcgatgctcgccgaacgactggcgatcgacgaggaaggactcgccgacgtgctgctcgacgacctgcgacattgctga

SEQ ID NO: 51163 - DNA, 1476 bp, Clostridium citroniae WAL-19142
atggaatattttgaaccaattaatgagacatcttatttagccgttcccaatgcaccggtataccgtaaaattatgcggtgtttttaccgtgaatatgagaagatgcatttccagatatataaagaagatatataccagatgcttaagcaggataagacgttcacggattataccatggaacagctgatgacagatttggaagccttggtcaagtggaaaaatcttactccgatccaggatccgggaagggtttacaccatagcggattacaagaataagcagtatcgctataccatgtcggagtatgcggttgagattgaacgtctcacggtgcgtctggaaaatctctttttggaatccggaaatttatccacgaatttttttgtgcgtttggaaaaaagtctgcaaaaggcggaagaaataaaagacagcagcctgaaggagatcaatgagtggtggggaatgcttcaggaggattttaagaggttaaaccagaattatcaggattatctgcgggatttctattccggaaaaacggaacagctcatgaagtcagtggaatttgttgtacataaggacaagtttattaagtatttgaatgaatttgtgcaggaattgcagcgccattccaagcggattgagcagattctgacagataatatgtccgtaattgaagagaatattctggaaagagtgatacagagtgaattggacattccacatgcggttttgcagcttcatgggaatgcggagccgggtattcgtgaaaatgtgatgggtaaatggaattctttgaaaaactggtttatagattctcagggaaacgaatgtgagtgcaaaaaagttctgaaaatcacgaatgacgtaataagaagtattattcagaatgcagcgctgatcgttcagttccagaacggcggaatcagcaggaaggatgattatcgcaagtttctggagctgtttttgaaatgtgaggatttggaagaggcgcagaaattgtcggctcatgtctttggagtacaaaaaattcagcattttaagacgttggaaccccgcgagggggatggaatcaatgaaagcatttataaggatgagcctgctgtttttctgctgaaacctcatacaagatcttatcgggagaaaaaagaccggagaggatttaccgacaagtctttggagaaatacatacagagggagaagtatctgcagaagattaaacggcagaaagagattgttatgcattacatcaaggctgacaagatcacgttttcagagatagaagaggttatttcagaggagacaaggattacatttttgcagtggatcacgcaggccaatatgaattcccggaaaacaggaaggacagaatatgggcaggaatatcgtttgacacgatcgaaaggaaaatgcgtgttaaagtgcgaggatggggatctggtcatgccggcgtttgtattggagtttaaaacattatga

SEQ ID NO: 51164 - DNA, 1137 bp, Clostridium citroniae WAL-19142
atgaatgaattcagaacactgttagagaatttctggatttgtaaggattcggataaggaaacgtattataaagtgaaacgagatatttcgaattttcagaggtttgtcagggagcagctcggctggaaactcgttcacacggaaaatttgttgaaattagagaaaagaccggcccatgcggaatcgtttatgggaatcggagaatttttggaaatcagggactactgtattttgtgcgtggcgctgatgtatctggaggacaaagaggaacaggagcagtttctgttgtcggagttgattgattatgtggaaacgcagctaaaatcttatatatccatagattggacttctttcactcagagaaagtctctggtccgtgtcctgcaatatatggagaaactgcagatgctccgggtatatgagggacgcagcgaggcctttggctcggaggccgggcatgaagttttgtatgaaaataccggatattcaaagtattttgcaaccagctttccaaccggcatctccgggtttgaatcctgggaggattttgaaaagacggattttgaggaatttcaggaaaacagaggcgccttgcgcatcaaccgtgtgtatcggcagctgacggtgtgtccgtctatgtactgggaaagcagtgaggacgcggattcactttatttaaaaaatcagcgtcagtgggttgcaaaatatatcaatgataatatgggaggcaatctggatctatacaaaaatatggcatgtatctcattggacggggatgactgttatggttctgttcatccaagagatgccatgcttccggagattgtgcttctggtctgtgggaagatacagaaagaggtagcggaaggaactttagaaaagcaggaaaatgaatgtatttacatgacaagggaacgcatttcggacgtgattttgtcctgccgcagagagtggaacagcggatggagcaaagaataccgggaaatggatgaggacctgcttctggaacatgtgttgaaatatatgaaatcctggctgatgattcgatatgatggaacgcagattgttatatttccgtctgtgggaagaacagcaggagtttatccggaggatttcgagggaggtaccggggagtga

SEQ ID NO: 51165 - DNA, 4071 bp, Clostridium citroniae WAL-19142
gtgaaagaccgctttaaaatgaaccgcatagggttcgtgaatttctggttatatgatgaagaagattttgaatttgtgaatggaaagcttctgctgcggggacaaaatgcgtctggtaaatccattacgacccagagctttattcccttcatattggacggtgaccgtacaccgagccggctggatccctttgggtccagcgaccgtagaatggagtattatttcctgggggaggaaggaaaggacgaatccacaggatatttatatttggaactcaaaaaagagggggcggaagaataccgtaccattgccatcgggcagagggcaaaaaaaggaaaacccattgacttctggggatttgtcattttggacggacgaaggattggttatgatttgcagctgtacaaggagatcggttcgagcaaaatccctttagacaggagggaaatgaaaacagagcttggagaagacaatttttttacgacaagccaaagtgaatataaaaaagcggtcaaccagtacattttcggattccggaaagcagagcagtatgaacagtttattaaattgcttgtgaaggtccgggctcccaaactttccaaggaatttaagcctaccagggtatatgagatattaaatgattctttgcagacgctgacggatgaagacctgcgcgctatggtggacgccatggagaaaatggatgagattcaggacagtctggagattttgaagcgggccttcgatgatgtgaagatcatacggaatgaatatacccggtataatcaatatatgcttgctaaaaaggcacaagcttatatggcgatgaagcagaagatagaggcagaacagtgtcagcttaacatacaggaacagaaaagccaggagacagaggcggccaggaacagcaagagtcagcgtctggctgacttagaagagcaaaaaaagctaaaaggaattgagcgggtcggactcctggacgcagatttggaggaaatcgaccgcaagctggagcaggccaggggagagaaagaagaggctgcggggaaggttaccgcttgggagaataaaatccgggattatcaggaaataatctggcgggaagagcgcagaataaaggaaattaaggatcacctggatcaaatacagcaggagataggggatgccaagtcggaactgggagagcagcaggaaatccttcagtggaatcagcacgaagaggctcttcagatgatagacggagtagatcatgagaaaagtggggaaattgcaaaaagccttgatttgctgaaaaaactgttggctgaatgcaagagagaaatacgtgagtatgaggagttatccggacagtacgatgaactggcggcgcagctggaaatgcttcagactgaaaaagcagaggatcagcagaaacttaagactgcacaggaagatgttgtccgctgtatggatcagtggatcacagctgtctatgaagcagagaaaaaatctgctcagtggaggcctgacagtgagctgcttccaaaactggaggagaagatccgggagtatcagtcggcagcagatgcagaaatggtgcaggagcttttgcgcacggattatgagcgccagcgtcaggagctgatggatcaaaaaagcagtctggagtatcagaagaaaatccagaaggaggaactggatcaggaaaaagaaaaactcacatgtctgcaaaattctggggatctggagccggagagggacgagagtgcagaaggttcaagaaaggcgctggagaaggctggtatcaaagcagtacctttttataaaacggtggaattttctgagaatctggatgagacgggctgtgcaaggctggaggcgcagctccagaaaatggggattttagatgcgcttgtagtatccgcggatgatttcgagaatatcaggaagcagtgtcccggttttttggatacggttttgtatgtgaaagagggcggaacttccggtttttccaagctgactgccagtgaagaactggaacctgctctgaaagagactgttcagaggattctaagcaatatttatgaagagaaagaacatggacagggaattcaccttggaaaagacggaagtttccaacagggaattctggctggaaaagcaggcaaaacaggtagtgctgagtttgtgggagttctggcaagaaaaaggcggaaagaacagaaaatccgtgagctggaaggccggatttctgagataacagaagcaattgtaattttggaaaaagagattacagcggtgcgggagcatttggaaaaattgcaggaggaatatcagaagctgcctggtttttccgagattaacgctgccctggaccaggaaaaagaatgtgaatacaagctgcagaagatatgtgaggaatgtggaaaaaaagaagcgcaggagcggcagctgatattaaaaaagaaccggcaataccagacaatgcttcaaaagtgcaaaccatttccatacggaagaacagaagaggcctatgaggaagccgatgatgcgctggaagaatatagccgtatctggcaggagatccggcaggcgttactgcagtttaggacggatcaggagaatctcagggcagagaaggataggctcattcaaagtgaacagctgatggatgatgcttttgtggagaaacgcagctggagcacaaaagaaaaagagagcgggattcggatccggcagtttgaggagtaccttaaccgtccggaaattgcagaaaaggcaaaccgcttaaaacagctgaagaaagagctggacgagattgggaccgagtgtgatgctttaaaaagagatctggctattctggaggaaaggctgcgggtgattctggaagatgagccaaaacaaaaggagagtctgcggcagaaaatcatagcagaaacctgcctgagaaattattttgaagaggaacttgcactaaagctggtatttgccagagaaagccaggggatttttgagtgtgccaagagagcggtgtcggtacttcgggaaagcgataagaacagagagccgacggacctgctgcaggcgcttcatcaggtatatcagcgccataacggcagtctggtcaattacggcacatctctggaggaatgctttgacacgccggcagaggcggctctggaaacagaggccgcggcgggcgcaatacgaaagcgggtacgggtcgtttcctcgtggaatgggaaaaaggtatatctggaagaattttacggaatcctgaaacaggccattgatgagacggaactgctgatccagaagaaggacagggagctgtttgaggatattttgtctcagaccatcagccggcagcttacggaccggattgcggaaagccggaaatgggtttcggatatgtcgcagctcatgaaggaaatggatacctctatgggccttatcttttctctggactggaaaccctgcaaagcggaaaatgatatggaattagataccgcagagcttgaacagattctgctcagagattatacgcttctgaccatagaggatattgaaaaggttgcggcgcattttcgaagcagaatccgcacggaaaagcagaaactggaagaaaaaggcgatatgatcaattatatggaccttgtcagggatgcgctggattatcgcaaatggtttgaattccacatgtttttcagacgtggggaaggggagcggaagtttttgaccaatgcggcgtttaaccgtttcagcggcggagaaaaggctatggcgatgtatgttcctctttttgcggcagtcaatgcacagtataaaaaagcggagcaggaagaccatccgcgaatcattgctttggatgaggcatttgcaggagtggatgacaaaaatatcagcagcatgttcgagcttgtgcataagctggattttgattatattatgaattcccaggcattgtggggatgttttgagacggtaaaaggacttcggattgcagaactttcaaggcctcaggattcacaggttgtttcggtgatccgttatacatggaatggacgtgagaagatattagatgtgcaataa

SEQ ID NO: 51166 - DNA, 1299 bp, Clostridium citroniae WAL-19142
atgtgcaataataaagaatgtgcaaaatactttaaaagccagcaggcatatcatagatgttttgaagaattttggaaaaaatggagatcttacggaaaagctgccggaaacattacgcttaagcggacttcagaggaagagcggcgggcggtaggcggcataatcggcaaagtgttttatgaggaaacaatccggttttctttcctggaatttgaacaaggactgcaaaaaacacgttttgcgccggttgatatgaaagaggtgctggaggaatatttcggagagacgcttattactactcagggccggcagaaagaagagctggagagaaaaaataagtttctggacagaatctgcggatattttgaaaaaaatgccggcagtaattcggcggcgcttttatggatgcgtgaaatgatttctgagaaaaaatacggatatcagctgttgatgagggagtatgcaaaagatgagaagcaggcggaacaactggtgcaaaatgtgggaaacgcagtgtttaagctaaaagagccggaaaacggcgaagaggaatatccgttagccgtgctggccgctgagataacagataatcctcattatttcgaccgtggcacaactgccggactgctttttatacacgcaatttgctggtgcgaaaaaatgaaattgcccgaaagcgcacatcagtggcggaaactgctgatgcaggtttcaattgttccggacaacatatcttccatggtccacggttatgggcttcggctgctcacggaacagggatggcatttggcctatgatacgttctgcgaccgaaaagaaacatatgtgattaccatggagaatatgaaagggatcatcggcgtgcaggcagttggggagaaggtgtatgtagttgagaatgagatggttttcagctatttaatccataatctgaaaagttcggaccatacccttctgtgtacttccggtcagccccgttccgtggcccagatactgataccctatattttggccagtggggccgaagtttattataatggggatattgatccggatgggatctgtatcgccgacaggctttggctgaaattcggggattgcattcatatatggagaatgacgcctgcggattatgaaaaaagcctgtcaaaagaaaaaataggggatatcggaaaatcaaagcttgaaaatatcagccatcctatattgaagaaaacggcggaatgcgtgaaggaaaaacggctggccggatatcaggaaaatatgctgaaagagctgctcgaggatatgaaaacctga

SEQ ID NO: 51167 - DNA, 1476 bp, Clostridium clostridioforme WAL-7855; identical to SEQ ID NO: 50210

SEQ ID NO: 51168 - DNA, 1137 bp, Clostridium clostridioforme WAL-7855; identical to SEQ ID NO: 50427

SEQ ID NO: 51169 - DNA, 4068 bp, Clostridium clostridioforme WAL-7855; identical to SEQ ID NO: 50428

SEQ ID NO: 51170 - DNA, 1299 bp, Clostridium clostridioforme WAL-7855; identical to SEQ ID NO: 50213

SEQ ID NO: 51171 - DNA, 1170 bp, Mycobacterium tuberculosis
atgagcgacgacgacctcgcacggcggcgggcggcgctgcgggcgctgctgaagcgtccgctgctgaccgcggagtccgatcccgaggacctcgtgctcgtccgccggtggcaggccgaactgcgggactggctgagccgggagacgggctggcgcctccaggtggacgccgagaccgcccgcctgttcaagacggcgccgaccctggacgacgggacgcatccggcgcgcggcaaggccggggaggcgttcggccggcgccgctacgtcgtgctgtgcctggcgctggcggtgctggagcgcgccgacgcgcagaccacgctcggccggctcgccgaagaggtgctgaacgccgccgccgagcctgaactcgccttcccgttcacgctggacagccgcgcggagcgctccgacctggtggccgtggtgcgactgctgatcggctggggcgtgctgcggcgggtgtcgggcgacgaggagtcctacctgtcggcgtccggggacgtcctgtacgacgtgcgcagggccgtcctcgcgtcgctgctgaccggggtgcgggggccgtcgacggtggccgcaggaggcttcgaggagcggctcgccgagctgaccgacgagcccgtcccggacaccgacgaactgcgcaaccgggcgctgcggcgcgggctgacccgccgcctgctggacgacccggtcgtctactacgacgacctgaccgacgccgagcgcgcctacctggtctcgcagcgcgcagcgatcacccgccggatcgaggaggcgaccgggctcgtcgccgaaccgcgggcggagggcatcgcgatggtcgaccccgacgacgagctgaccgacgtgcggatgcccgagcagcgcaccgacgggcatgtgacgctgctggtcgccgagtatctcgccgggcgcgccgagaccggacgggacgaactggaggcgttcgtccgggacgcggcggcgcggcacaggtcgttctggcgcaagggcgtgacggagcccggcgccgaggtggagctggtcgacatcgcgctcgggaagctggccgcgctgcgtctggtggaggtgccgcccggcggcggcggcgtccggccgcgccccgcgatcgcgcgctacgcggtggaggaaccgaccgtccgggaaccgaggaggaccgttcagtga

SEQ ID NO: 51172 - DNA, 4089 bp, Mycobacterium tuberculosis
gtgacgcaggcgcccgtgccgaagcccgtaccgacgcccatgccgacgtccgagcgctggaagccgctgcgcgccgggctcgtcgacatgttctactacgacgtcgaggagttccggttccatgacgggcggctgctgctgcgcggcaacaacggcaccggcaagtcgaaggtgctggcgctgacgctgccgttcctgctggacggcgagctgtccccgcaccgggtcgagccggacggcgaccggcagaagcggatggagtggaacctgctgctcggcgggaagcacccgcatccggagcggctcggctacacgtggctggagttcggccgcctgcacccggacgggacgcccgagtaccggacgctcggctgcgggttgaaggcggtgaaggaccgcggcatcgtccggcactggttcttcgtcaccacgcgccgcgtcggcgccgacctcgcgctcgtctcggagaccggcgtctcgctgacgcgggagaagctgcgcgaggcggtggacggccacggcctggtctacgaccgggcgtccgactaccggcgcgccgtggacgacgcgctgttcgggctgggcgagcaccgctacgaggcgctggtcaacctgctgatccagttgcggcagccgcagctgtcgaagaagccggacgagcggctgctgtcgcgggcgctgaccgaggcgctgccgccgctcagccccgcgctgatcacgacggtcgcggaggcgttccgcggcctggacgaggagcgggacgcgctgcgcgccctggaggaggcgcacaaggccgccaccgacttcctcgggcactacgtccggtactcccaaatcgccgcgaagcggaaggcggccgggccgcgcctcacgcagagcaggtacgagcacctgaacagggacttcaccgaggcggagacgcggttcacggcggccgagaccgaactggccgcggccgcacggctgctggaggagctggccggcgagaagacccggctggaggcgcgccggaacgcccttgaggccagcccggagatgcgcgacgccaagcgcatcgaggagatcggcgaggaggcgcgccgccgcgacacgtacgcgacccggctcgaacgcgacctcagcggcctgtccggcgagatcacccgcaagcaggcccgcgccggcaaggcccgttcgggtgccgcccacgccgaaacgtccttcgcctcggcccgggaccgatcggtggcgctggcccggctcgccggatgcggccccgcccacaacgaggcgatggagcggtgggaggccgatctggccgggacgcgccgcgaggtcggcgcactcgccgagaacaggtcccgcgcgctcacccggctcgaccagctgatgtccgcggtgaccgccgcccgaacccggctggacgccgccaccgcagaggcggaacgcctggtcggcgagttgcaggccgcggcccagcggatcgcggcggccgaggcgcggacgcacgccggcacggcggaactactgaacgcatacgtcacctacctcgccgggctcgtccagatccaggtggacgacccggacgcggtactggcagaactggaggaatgggcccagaccgccgaggggcagaaccccgccacgaccgccgtggacgacgccgcccgtgcggcgacggcctcgctcggcgggcgggaggccgacgcgagatcccggctgcgggccgaacgcgagcgcgagacatcgctcggggaggagatcgagcggctggagtcgggcggccacgacgtcccgcctgtcccctacacgcggtccggctcccgggccggcctgccgggtgcgccgctgtggaaggtcgtcgacttcgccggcgcggtgcccgccgaccaccgggccgggctggaggccgcactggaggcgtccggcatcctggacgcgtgggtgacgccgcagggcgcactcctcggtgcggacgacacgttcgtcctgaccggcgaggccgtcgaagggccgtcgtgcgcgctggtgctgcgtcccgccgtcgaccgcgccgacccgcaggccgccgcgctgtccgatgacgccgtccgggccgtcctggccgggctgggtctcgggccgggcgcgcggacgtgggtcgcggtggacggccggtgggcgaacggcgccctcggcggttcctggcacaaggacaccgccggcttcatcggcgaaggcgcccgcgaggcggcccgccgcgcccgcatcgcggccctccgcgccgacctcggcgagacgcgggcccggatcacggcgatcggcgaggaactgaccgagctggccgcccggcgggagtcgctggccgccgagcaccgggccgtcccgcgcgacaccggcctgcgcgaggctcacgtgcggctcgccggggagcaccggcgccgccgcgacctggacaccgagcacggccatgccctcacggccgtgaacctgtgccgcgacgaggcgtccgaggcgcaggaacgcgccggggagttcgccgccgacgtcggcctgccgaccggagaggccgaactcgccgaggtccgggcggcggtcaccgactaccggctggcgctggccgagctgtggcccgccgcgcaggcgctgctgtcggcgcgggacgcggcacgcgaggccgccgaggacctcgcgctcgtccgggaacgcctggacgaggcggcggaagaggccgccgaggcgcgcgggcaggccgagtcggcggccgagcagcaccgggcgctggtcgagacggcgggcgccgccgtcgacgaactgttccggcgcctgaacgaggtgaagcagtccctccgcgaacgggacgcggccgagtcggcggcccgcgaccgggaacggtcggcgctcggcgaacgcggcgaggcgaagggggcgtgcgaccggctgcgcggcgagatccacgaggccgcgaccgtccgggacaaggccgtgggcgacttccgcgcgttcgccgccaccggactgctgaccgtcgcggtgcccggcctttccgtccccgacccggcgcaggagtgggcggccaaccccgccgtgcagctcgcccgcgccgtcaacaccggactcgacgcggtggacgacggcgacggcccgtgggaccgcgtccagaagaaggtctccgaggagcacaagctgctgtcggacgcgatgtcccggcacgggcactcggtcggcctcaccgtccacgacgggatcatggtcgtggacgtggtgttccagggccgcgcccgcgacgtccccggcctggcggacgccctcgaaaccgaaacggagcagcgcgcacgtctcctgtcggcccgcgagcgggagatcctggagaaccacctgctgaacgaggtcgccggcaccctccaggagctcatcgccgcggccgaggacgaggtgcgggagatgaacgccgagctgacgtcccggcccacgtccaccgggatgcggctgcggctcgtctggaagcccgcgaaggacgcccccgacgggctcgaccgcgtccgggagaagctgcggcagaccatcgacgcctggtcggtcgacgaccgcgccgccgtcggccggttcctgcaggagcagatcgcgcgcgagcacgccgacaacccggcgtccgggtggacggagcagctcacccgcgcgctggactaccggtcgtggcacgggttcgcgatccagcggctgcaggacgggcagtggcgccccgcgaccggccccgcgtcgggcggggaacgggtgctcgccgcctccgttcccctgttcgccgccgcgtccgcgcactacaagtcggcgggcaacccgcacgcgccgcgcctcgtcgcgctggacgaggcgttcgccggcgtcgacgacgactcgcgcgccaagtgcctcggcctgctcgccaccttcgacatggacgtggtcatgacgagcgaacgcgagtggggctgctacccgcaggtgccgggcctgtcgatctgccagctgtcccgccgcgacggcatcgacgcggtcctggtgacgccgtggcgctgggacggccgcgaacgcacccgcgccgacctgcccgaacccgaaccggcgtccggtcagacggacatcttcggatga

SEQ ID NO: 51173 - DNA, 1224 bp, Mycobacterium tuberculosis
atgacggcggacctggcgcggctccggcggctgctgggcgggccggacaccgcctggctggtccagcgcgtccggtcccgcctggaacgcggcggcgcgctcaccggcaaggtcacgctgaccgaagcgactctcccgcagcggcgcgcgatcgaactcctgctcggccgccgcgcgggcagcgggacgtccctctccgtctcgctcaccgaggtcgacggtgtcctgcgcaccagcggcgcgtccccgcacggcctcgccgcagccgtcgaactcctggacggccccgtccgcgacctggcccgggagaacgccgaaacggccgccgcccgggcctcggccttcgccccactggacgaggccctcatctcccgccccgaactggcggagtggcgcgcctggctggacgcgaccggcctggtccggcgtctgacgtccggccccgccgaagccgcacaggttctgcgatgcctcgccgccgtggtgaggcgcctgccgtcccccgacatgcccctgggccggttcgccgccgagacctgcggccacgcccacgccctggacgacggcccgctcgccaccctggccctctcgtccgcccgcgccctcgccggcctgccgttccgcgcggacggcggcgctgaatcccgccgcgaaacctgggcggcggtcggcgtgcacctggacgaactctcctcgacggtcctgtgcctgggcctgcccggcgacgcgcacacccccaccggccggatgctcgccgccatgaagggcgagccgatgtccctcactctccgccagcttcgccgccacacgtcccccatccaggccggcctggtccgcatctgcgagaacccggtggtggtggccgccgcagccgacgccctgggcccgtcctgcccgcccctggtctgctgcaacggccgtccgtcgacagcggtctggcgcctcctggaactcctggccgacggcggcgccgagttcgcctaccacggcgacttcgactggggcggcgcggcgatcgccaccgccgtccacgcccgcatcggctggcgcccctggcgctacgacgcgacggcctaccgcgcggcgacctcgaccacgcccctcaccggccgccccgtccccaccccctgggacccggccctggccaccgcaatgcaggaccgcgccgtccgcgtggaagaggaacaggttctcggcgacctcctcaccgacctggcctcctga

SEQ ID NO: 51174 - DNA, 1572 bp, Nocardia farcinica
atgcgtgccgtaggcgcgggcggcgaccggcccgctactaccctgttgccggtgaccgactccgaggacgggccgcgcggcgacgagctggacgagcggctgcggctgttcgccttcgccacggcggagaagcgcgcggactacctgcgcgtgttacgggccttcgacagcgcgcgggcggcctacgtggtgctgctgcatgccgacgacgtggcggagtggatccggcgggcgggcggcgccgagttgcccgccgccgagatcgggccgctgctggaccagctgcaccggtggggtgtgctggagcgcagctacgacggcacccgcgcggcgacgctggccgagtaccgcaaccggcactacgtctaccagttcacccagcccggcttccaggcgttccgcgcggtggccggggtgctggacgcgcgcggcgaggaagcgtcgctgtcccggctggtgctgccggaactgctcgccgacctgggcgcgctggccgaggcgaaccgccgcggcgacgccgaactcgtctaccggacgctgcgccggctggacgccgcgctcaccgacatggcgagccgggccgcgcacttctatctctcgctgggcgacctggtgcgcaccaccgagatcaccccggaggcgttcctggcgcacaaggacacgctgctggcgcacatgcgcgagttcagcatggatctggcgcggttcgcgccgcggctggcggcggccatcgcggaaatcgaacagaccggcgtcgcggcgatgctcgagcgggcggcgcggtgcgacgaacgggtgctgctgagcccggccgaccgggaagccgattggcgggcgcgctggcagggcttgcgcggctggttcgtcgccggtgagagcggcgcgaccgaggccgatcggctccgcgaagccaccatgagcgcgatcgccgcggtactggcgctgctgcgccgggtcaccgagacccgccgcggtggggtcagccgggagtcggcgctgcggcatctggccgcgtggttcaccgcggcgccgagcaccgagagcgcgcacgcgctcttcgacgcggtgttcgggctcgggcggccgcggcatctggcgatggaacatcccgatgccgacatcgtgcccgcgagccgatcctggtgggacgcaccaccgttggagatctcccgcaccctggccgagacgggacggccaccctcggcggcggcgccgggccgcatccagcgcaacgacgcgagtatgcggcgcctgcgcgaatcgcagctggccgcgcagcgctcccgggcggaggcggcgcggtcgctggccgccgcggacgtctacgagcgggtgctcgacgaccgcgaaaccgacatgctgctgcgcctgctggacgcggcgtcgacggcgtgggtgccggtgagcggacgggtcgcgggcacctcgggcagcgacaacggcgtcaccctcacggtgtccgagcatccgggcccgacggtggtgcgcaccgcgcgcgggttgctgcatctgaacaaccgcaagctggaggtgcgcgttcgcggaccgcgcacgtcgggaggtgcggcgtga

SEQ ID NO: 51175 - DNA, 1353 bp, Nocardia farcinica
gtgatccacgcgcaccgcatcggttcgctggagctggacaactatcagcgcgccgcccgggtgatcctggccaatcacgtggtcacccgcagctaccccgaccgggtggcgttgtcgctgatccgccgctgggccacggagctgcgcgaggatctggccgagttgttcggctaccggctcgaggtcaccgagacgaccgcgcgcctgttcccggtgctggacgaactcgacccgggccgtcccgcgcgcaccgtcaccgagcgggtcttcgaccgccgccgctacgcctatctcgccttggcgttggcggcgctgggtcgcgcgggcgaccagatcacgctgtcggagctggccgagcaggtcagcgcctacgccgccgagatcgacgggctcgagctcgcccccgaccgcgccgccgaccgggacgccttcgtcgacgccgtgggctggctggccacgcgcggcgcgctgaccctcgccgacggcgacgcgggcggctgggcggccgacccggaggcgggcgaggccctctacgacatcgaccgtccggtcgtcttcgccctgttccggccgccgcgggcgctgcagcatctgcacagcgtcacgggcctgttcggcgaggagccgacgaccgaggcgggtacgcccgccgcgctcgcccgggccgtgcggcgggcggtggtggaacgtccggtggtctacgccgccgacctcggtcccgaccagcgggcggtgctggcccaggaacgggtgatcgccgaggtggaggcgttcaccggcctgcgggccgagcggcgcgccgagggcgtggcgttgatcgacacctccgggcggctgtcggatgtgcggttccccggcaccggcaccgtggcccaggtggcgctgctgctgatcgccgagatcgccgacctggttctcgacatcgacaatccgctgccccagcgcgcgccgggcccggacgcgggcgccgagctggtcgcggcgctggacgcagcgatcccggcctcgacgctgttcgccccgatggtcgaggacggcgacgagcctgcgacggaacccgaggcggggcccgagccggtgcggtatccgttcgtcgccgccgaccgggtgcgcgaaaccgttggcatgctggccgaccgctacggcgccaccttcgccgcgcactggctcgccgacgtgcccgcgctcaccgccgaagtggtcgagctgctgcgccggttgcggctggtgcgtccggtcgccgacggggtgctggtgctgcccgcgctggcccggtaccggggtgcggtcgtcaccgtgcgtacgcggcgcaccgaggaattgttcgtcggcaccgggagggaagggatctga

SEQ ID NO: 51176 - DNA, 4209 bp, Nocardia farcinica
atgtcggtcatccacggcggagtgcgtttcatcccgaccagggccgggatcatcaacctgtgggactaccgcgatcaggagttctgcttcgccgacggcaggctggtgctgcgcgggcccaacgggtcgggcaagacgaaggctctcgaggtgctgttcccgttcgtgctcgacggccgtatcgagccgcgccggctgaacccgttcgcgggtgaggaacgcacgatgaagtcgaatctgctgtatcgcaagctggattcagcgtattcgtatgtgtggatggagttcgcgcgcgggcggtgggccgatcccgaggtcgtcacggtcggcatcggcatgcgcgccacccgctcctcggacaaggtgacgcgctggtatttcgtggccgacggccgggtgggagtggacttctcgctcatcggccccgacgaccgcccgctgacccgcaaacaactcgccgaacagatcggcaccgacgcgatcgtggaccggccgatggagtatcgggcggcgatcgatgcgcgcatgttcggcctcggcgcgcagcgctacgaccagctcatcaatctgattctcacgctgcgccgtccgcagctggccaagaatctcgatccgcgcgggctctcgcaggccctcaccgacggcctgcgcccgctcgacgatcagctgatcctggacgcggcccgctccttcagcgacatggaggaggtcgggcgcaccctcgaagggctcgtgcacgccgacaccgccacccgtgctttcgtcgacgtgtatcgcaaataccttgcggtccaggcgaaaacggaggtcgaccaggttcgtgcccggctcgacgcggtcacgcacgcgagcacggcgctgttcgccgcgagcgcgctgcggcagcggcgcgaggccgagcgcgccgccgcgcaggaccgcgccgacgacgccgaccgcgcctacgagcaagccctcaccgatcgcgaaacgctgcaacggtcgagcgcctacgagggcaaacagcaactcgacgacctcgccgacgcggtgcgcaggctggagagttcggcggctgtgcaccgtgcgaaggcggtggaggcccagcagacggtggcgcagcgcgcgcaggagctcgaccgggtgcgcgcggacgtgcgggaggccgccgcggcgctcagccgcggggaggacgaattgcgcagcgccgccgaggccgcggggatcgcctggacgacgccgtcccgcgacgacgcgctcaccaccgccgtgctggccagggccgaggagcgcgacgccgacgtgcgcgcggtccgcgcggtgctcgcgcgggtggaggcggcgcaggccgagcggacccgggccgagcggctggccgagcgcgccggcgccgaccgggagcgggcggcggccgatgtcgcgcacgccgaggccgccgtggagctggctcgcggccgcgcggcggcggcgctgcgcgaatggtgggacgcacacggcgagacctacggcgccctcggcgccgaactgttcgaggccgtcgacgccgcgctgggccaggccggttccgacgaggccgccacgcccgccgaggtggtggccgagcgcaccgaaccgttgctggaggagttgcgggaggcccggctggccgcccgcacccgcgcggccgccgcgacggcccggatcgccgacctcgaggccgaacgcgacgccatcgccgcccagcgcgacgacgctccgcccgcccggcacacccgtaccgacgcaccggacgacgggcggggcgcacccctgtggcggctggtccggttcgccgacgacgtgccggccgagaccgccgccgggatcgaggccgccctggacgccgccggcctgctcgacgcccgggtcggcccgggcgagccgcccgccggttatcgttccgatcagttcctgatcccgctgcccccggatcggcgccccaccggccgcacgctcgccgatgtgctcgtggtcgaggacgattcgcccgaactggccgttccgggcacggtcgtcgccgacatcctggcctccatcgcggtgcgcgacgccgccggttccgacgaggtcccggcgcatcccgcgctcgacgtcaccggcggctaccggcacggcgtgcaggtcggcaggcaccacaaaccgcacgccgagtacatcggcgccaccgcccgcgcgcgccgccgcgaggagcgcctggccgaactcgacgccgcgctggctgccgccaccgaggaccgcgaatccgccgaggcggccgcgaaacaggccgatgccaccctggcggcgctgaccacggcggccaaggcactgccccgcgccaccgccgtcaccggcgcgctgcgcgccgtcgccgaggcggcgggtgtggtccgctcccgcaccgaggccgccgcccaggccgaacgcgaactcgatcaggcggtcaccgaggtcaccgcgctggagaagaagctgcgcgccgcggccgccgagcaccgcacgccccgcaccgccgccgatctcgacgccctggccgccgccgtccgccatttcgagagcaccggcaccgccctggcgcggctgcgcgccgatcacgaacgcgcgctcgaacgcgaacgcgagggcgccgaccgcctcgacgaggcccgcggcctggccgaggccttcgccgaggaagccgaagccgcgcgcgccggttacgacgagcagcagcgcaaactggcgacgttgcgcgaggcgctgggcgcgggcgccgccgagatcgatgccgaactcgcgcgggcccgcgagcgcatcgacgcctgccgcgccgagcagaaggccgcccgcaaggccgccaacgcggccatcgaggcggtcggtgacgccgaggccgcctaccgcaccgcgcacgaggcgctcggcaccgccctcaccgaggtgctggcgcaggtccgcgcgctcgccccctacgcgcaaccggatctgctggcactgctcggcgtctcccccgagctgcgctggcccagcagcgacgccgcctggtcgacaccggatcagctgctctaccgcatcgcgcaatcggatcccgagaccgagccgcgggtcctgcccgacgaggtggccgcactgttcgaggcactgtcgacggccaccgcgacggtgcgggccggggaggccgcgcgcaaatccacccgcagcgccgtcaccgccgcgctgcaggagttcgacgccgcgctggccgcctcgggccgcgactaccggttgcgctgggacgccgccgacgggctcaccgtcgtgcaggtgcaggacgagcacggactgtgcccgctggccgatttcgccacccgcgtcgcgtccgcccgccgcgatcaggagctgctgctcaccgacgccgaacgccgcatcctcgaagacgccctgctcaccggcctggcccagcagatccacgaacgcaccggcgacgcgcgcgaactcatcgccaagatgggcgcggagatgaaacagcggcggatgtcctcgggcaacaccatcggcgtgcactgggtgctggccgacgacctctccgacagcgcgcgggcgatgtgcaagctgctcgaccgcgacgccgccgcgctgagcccggaggatctcgccgccatccgcgcgcatttcgccgccgagatccgcgccgcccgtgccgagcatcccgaacggtcctacccggagatcctggccgccaccctcgactaccgccggtggcgagtgttctcgttcaccctggtcggtgccgacggcagcgaggacaagctcaccgtcgcccggcacagcgcgctgtccggtggtgagcaatccgtgtcactgcacctgccgctgttcgccgccgctcacgtcatgctcgactccgccgacccgcaggccccgcggctgctggcgctggacgaggcgttcgccggcgtcgacgacaacgggcgcagcgaattgctcggcctgagtgtgcaattcgacctcgacctgttcatgaccggctacgacctgtggatcacctacccgcacgtgcccggctgcgcccactatgacctggctcactccgcggccgagcacaccgtcagcgccactctgctggtgtgggacagtggcgatctgctcgccgagcacagcggatcggatctgaccgccgcgctcggctcccccaaccgccgtcgggtgccggtcggcatcgaaggcggcctgaccctcgacgacatgccgggcgccccggcgcccctggcctga

SEQ ID NO: 51177 - DNA, 1491 bp, Geobacillus stearothermophilus
atggatgccacatggctcaaacccattgtcgaaaccaaatatttatcgaccgaaaacgcgcaccgctaccgtgcgattttgcgctatttctatattcagcacgagcggatgcgccaatatttgtttccagaagaagtgtacgcttttttaaagcagcacgaggagtttgccgattacacagaagatgacttgcagcaagacctcgaccagctcgtgaaatggaacaacttgatcgcccgtcaagagacgtcccacgtgcggacgattgaagagtttaagaaaaagcgattccgctaccaatgcagtccgtacacggtggagatcgagcggatgatccgcacgcttgagcagcttggggattcgttcggaggatcgcttgagaaaacgcggtttgaccgcttgtatgcttccctttcccgcatcgaggcgatcatcgcctccgggtttcaggaacagagagatgaaatgtaccaagtatgggaagagacgttcgattatttcaagaaaatcatccaaaattccgcagactatatggcctatttacatagcgaaaacgtggaagagcggatgacgtccgagtcgtttctcgtctataaagagcagtttacggcgtacttgcgcgattttatcgtcgccttgcaaaaaacgtcgatgcagattgaacaattgcttgaagatctgccggaagaaggggttcggcagttcatcgggcatgtcgtcgactatgagcggtcgatcccgcgctttgccgatgcaccgccgccgcgcgctgtgcagattgaagaaaaatgggagacgtggcgcagcttgtgtgaatggtttttaggccgcaacgggcgcgagagcgagctttcgtttttgcaataccagacaaatgaggcgattcgccgtctgacgcgcgtcgtgcagcggcttggcgagcggcatcatcattttcgcagccgcaaaggcgactacttgcatttggcgcgctggttttcccgccttgaatcgattgaagaggcgcactgcctgtcagcggtcgtattcggctgcttccatacgaaacatctcgtcgctgatgcggaggcgaccgacaacatataccgcgacgtatgggacgagccgccagccgagtgggtgacgaagccgcgcgtccgccattacggggaaaagaaaaagccgcaggcgattgaagacaaagaacgggagaaagaagaagcgcgccttcgctatttggaagaaaaagagcgcgaggaagcggcgctcagacagcttgtgaccgatggaaaaatcgtgctggctgaccttcccgaggtgactccatatgtacgaaaaacgctgctcggttggatcgccaaggcgatggggcgcgaggggcaagcaatgaagacggaaaacgggtgggtggtcaaagtggtgaacaaagaggggacgatttgccttcgtgcagaagatggggaactcgtgatgccgaactacgaaattcatgtgctttcgggaggtgagtga

SEQ ID NO: 51178 - DNA, 1197 bp, Geobacillus stearothermophilus
atggaaacggcgtttgacgacaaggcgaaagaagcgctcgccgcgctgtttgagcagttttggatcattcgcgaccaagagccggatttgtaccagctcgtccgcgagcgtgaacatgtgttgaaacggtatgtggaggagaagtttgggtatcgactcatcgtccaccgctatttcgccaagctcgagaaaattcccgccgatcccgagccgtggatgggcatcgagtcgtttcaagagccgctcgattatgcgctgttttgctgcttgatggcgtatttggaaggcaaggcggtggaggacaagtttttgctttctgacgtatgcgaagaaattcgcgccatgtacccgggggatctaccagtcgattggacgaactacgcgcatcggcgcgcgctcatccgcgtgttgaaaacggcggaacaaatcggtcttgtccgccggatggatggggagattgaagcgttcgcccagcatgtggaggaagaagcgctgtacgaagtgccggtgctcgcccgctattttatgcgtacgcatccgaaagatttgttgcaatatgaatcgatcgacgaattgctcgccgaggagtggaaagcctcgccgcaagattatcggcgccatcgcctgtatcggaagctgtttttatccccggcggtgcatcggacagaaggggacgagcaagatttttactacttgcgcaacttccgccatcggctgcgcgatgacatcgaagcgcatacgccgtttcggtacgagttgtacaaaaacgccgccatgttgatgttgcctgagcggcaggcgccgtacaccgtatttcctgatcagaaaggaacgtcggagatcatccttcattttgccgccttggtgcgcgagcggcttggggaatatccaccggatgaatacggccgcatccggttgacgtctgaacaattttccgcctggcttgccgattgccgccgccgttacggggcggggtgggggaaaacgtaccgcgacatgtcggctgccgagcttgtccgcgaagtgcttgcggcgctcaacgaatggcgcatggccgatgtggagcacgacaccggaatgatcgtcctttaccccctcctcgggcgggtgtcgggacggtatccagatgattttgacgcgaaagagggaggagaacatggcgaatccatgggtgcttcatcgtgcggggctgattaa

SEQ ID NO: 51179 - DNA, 4122 bp, Geobacillus stearothermophilus
atggcgaatccatgggtgcttcatcgtgcggggctgattaatttttggtattacgacgagcagtattttcatttcgctgacggcaagctgctgttgcggggaagcaacggggcgggcaagtcggtgacgatgcaaagcttgatcccggtgcttttagacggcaagaagacgcccgatcgcctcgatccgttcggctcacgggcgcggcgcatggaagactacttgcttggggaaaaagacgtcgtcaatcgcgatgagcggacggggtatttgtttttggaatacaaacgaaaagcatccgaccaatacgtcacaacgggcatcggcctgcgggcaaagcggcaaaaaagcctcgacttttgggggtttgtcatgttcgacaaccgccgcatcggctatgactttcagttgtataaacaagaaaaaacaggtgaaaaaatcccgctgacgaaacgcgagctcgccgcattgctcggtgcgggcgggacggtcgtcgagacgcaaaaagagtatatggagctcgtcaataagcatgtgtttcgctttgaatcgctcgaggcgtttcaagaattgatcgaactgctcattcaactgcgcagcccgaagctgtcgaaagactttaagccgacggtgatttatgagattttggaaagctcgctgcctccgttgaccgatgacgagctccgccatttatccgaaacgattgaaaacatggaccaagccaagcagcagcttgagcagctcgaacgcgacgaacgggcgttgaagcgcctttgcgatcaataccgcctgtacaacgaatatatgatcgccgaaaaggcggcagaatacgtaaaagcggtcaagcaggccgaacagctcgccgccgagcaacaacgccttcacgatgaagaagaaaagacgcgaaaggcgcttgatgagcttgaggagtccatcacccgcctcggccgcgaagaagacgtgctgcgagcgcgcgaaatcgacttggctggccatgaagtgttccagcaggcggaaaagtatgaacagctgaaagccgaacggcagcgcctagaggaacggcgggagcggcacgagcagacgattgcggaaaaagaacgacaggaacgtcagcaccgccgccgcctcgatgaagcggaagcgcggctggatgaccttgagcggaagcttgaagacgagctggagcagctgcgtatggatgccgacgaaggatccttttccttgcatgaaacgaacgaagacgattttcaccgccatcgccaaaagcaacaagagttttcgtttgccgcgtggaaacaggaagccgaccgccatatcgagcagctcgaggagttggcgcgtctttggcgcaggcatgacgaggtgaaacgacgctatgaagaagcgagcagcgaagcgggcgaaaggcggcgggaaatggacgaatggcgccaccagcaatggaaatgggaagagctgttcgaagaggagaaagagcggtttgaacaagccgtgcttgcctgggtcgagcagggaggaatcgacgtttccgaaacggacattcaggcgtttttgcaacaaatgggcgccctctatgaacagtattcgctcgatgatttgaagcgcccattcgtgcaagcgtattacgatgccgtcggcaagaaaaaggatgagaaatggcggctcgagcatgacatccgtatgttggaagaaaaacgggcagagcgcgaggccgaactgcgtcaatggcgggaacaacgcgaccccgagcctgaacgggatgaacaaaccactgccgcccggttggcgctggaggagaaaggcattccgtttgtcccgctttatgccgcggtcgaatttgtcgacgatgtgcctgacgatgtgcgcgagcgaatcgaatcggcgctttcacacgcggggctgcttgacgccctcattactgctcgcgagatcgacgtcgcctgcgaccgtgtgctcattccgaaaccggtccatatggcgcacacgcttgctgattatttgcgcccagatgccaatgcccctgtgtcaatggagcggattgacgaagtgctccgaagcatcgtcatcaccgatgccgaccaagaaggcggcatgacgatcgatgaaacggggcgctattcgctcggccttgtccgcggccatgcgccgcggagatcgaaggcgatgttcattggccgtgcggcgcgcgaacggtggcggcttgagaacatcgcagcgctggaagccgagatcgccgctgtggggcaagagatcgaccgtctgcgcggggcgcatcaggcggtggaagcggccatccaagcgctcgccgactggttggcgtccttcccatcggaccgcgatgtgcgcaccgcgtttgacgaagcgcaagaagcgcgccgccaagccgaaagcaaagaacgggaatggaagcggcaagaagaaaaagccgctctcttggcgcgcgaatggaaacaaatcaaacaacagctccacgacgagtcggccgagctcgatttggcctttactttagacggttgtgaacaagcccagctcgccatgaaatcgtacgtccgccatgtgcacgaactcgaagtgctttaccgcgaaacgtgccataccgaggcgatgatcgcccaacagcgcgagcggctcgcggcgctggaaacggagatcgacgaagcgaaaggcgaacgaaatcggcttcgggatgaaaccgagcggctcgccttgcgaatcgcggagatggaacggacgctcgcgcaaatgggggcggatgacattcgcgccgaaatcgcccgcattcaagaacgattggcgtttttgcgccaagaaattccgcgccttgtcaacgaacgggcgcggacggaacagcggctcatgcgcttagtcgaagagcgggaaaaaggggcgcagcgggaagcgttcgcccgcgagctcgccgcgatgtgggaaaagtcgtttgcccgtgaagcggcgcttgggcttgtggatcttgatcgttcccgatccctcctggagcaggcgaaagaagcgaaacaacggtacgaagcagtgttaaaagagacgcgttcctcgcttctggcgcggctgaacaccgtctttttccaagagtcgtccaacttgaccgaataccgggcgtccttcgagccgctggaagaacaaacgaagcccgaatggaccgccgctgccccagacgatgagatggccatgaaagccgcggactggcgggagaaacaagaacggcacgtcatttacctcgactacaaaggcgagcgcgccacgccgtttgcggtgctggcggaagtggagcgcgacatcgtcttgcagcacgagtatatgaaagaacaagaccgcgagctgtatgaggacgtcatcttaaaatcagtcggccgcattttgcgcagccgcatccagcgcgccgaacggtgggtgaatgagatgaacaagctgatgggcggcctcgacacatcatcagggcttgtgctgtccattcaatggaagccaaaaacggcggagacggaagcggagctcgatacgaaagaattggtgcgcctgttgcggcttgatccgcggctgcttagagaggaagatttacagcgagtgacgaaccatttccgctcgaaaatcgcccgcgcccgcgaattgcttgaagagcgcggccaaggcagcacgctccatcaaatcattaaagaagtgctcgactatcggaaatggttttccttcactttgtactatgaaaaaacaaacgagccgaaacgcgagctgacgaaccaccgcttttaccaattcagcggtggggaaaaggcgatggcgatgtacattccccttttcgccgcggcgtattcgcgctaccaagaagcgggcgatgatgccccgtacatcatttcgctcgacgaggcgttcgccggcgtcgatgaaaacaacatccgcaacctgttcggacttgtcgaacagctcggctttaactacatcatgaactcgcaggcgctttggggcgactacgacaccgtgcccgcgttgtccatttgcgaactcgtccgcccgcgcaatgcgtcgtttgtgaccgtcattcattaccgttggaacgggcgcgtcaaacagctcatggtcgatgacaaagaatgggagatgatcgaaacgtga

SEQ ID NO: 51180 - DNA, 1221 bp, Geobacillus stearothermophilus
gtgagcacggccaaggaggcggctgcctttttccgatccgaaccgggcttcaagcggctgtttgccgaaatgaaacgcaagtacgagtcgctcggccgcgtcggcggcgcggtgtctttagaggtgttcaccgatgaagagcgggaggcggtggccgcctttttcggcaaagacgtctcccgcgtctcccttatcgcgtttgaaaaacagctcggacagacgaggtttgcgggcgttgggcttgtcgagctgcttgaacagtacttcggcgccccgcttgtctcaaacaaagaacggcgccaggcggaggaagaggaacgggatcgtttttttgcgcgtctgaccgaggagcatcattgggttgagtcggtccgccctcagcgcttcgtccaaacggcgtacgaaaccgaccgccgcagcctggaggaggccatccgccttgtcagcgcggctttgggccgcctcccgctcccgtcatacatgcgcctcccgctctttgcccagcaagtggcgggcgacccgcatgcgttcgatttgtccacgctaccggggagattgttgctttcggcgttgcaagcgaccgtgcccggggattgggacatggcatctgtagagagcgtcaacgagttgctccagtccgtcggcttgctccgtgaggatatcctgaactttgtcacatgcgccaacattcttgctgaaaccaaggacggaccgcatcctgttttctccgctgcctgggaggcgaacacagcgctgaacatgccgcttagagatgtgctgtcgcttgtccgcgcccgccctgcccatggggggacggtgtacattgtcgaaaacgcgggcgtcttttcgacgctgcttgacacccgcgccccgcttgtcagcacgaacgggcaaatgaacgtggcgacgatgaagctgctcgatcttctcgcctcttcaggcgccaagctgtattactccggcgacttcgacccagaaggattggccatggcagagcggctgcaggagcggtatggacaggccgtcaccctttggcgcttttccgtcgaggattatagggccgccaaccctgtcgtcgacctcacccccgagcgcctcgccaagctcgcatccgtaacgtcgacgccgctgcagccgctgaaagaggagatggcggaaacgaaaaaagcggggtatcaagaggcaattatcgggaggctgacagaggatatcaacgggtag

SEQ ID NO: 51181 - DNA, 1491 bp, Geobacillus stearothermophilus; identical to SEQ ID NO: 51177

SEQ ID NO: 51182 - DNA, 1197 bp, Geobacillus stearothermophilus; identical to SEQ ID NO: 51178

SEQ ID NO: 51183 - DNA, 4122 bp, Geobacillus stearothermophilus
atggcgaatccatgggtgcttcatcgtgcggggctgattaatttttggtattacgacgagcagtattttcatttcgctgacggcaagctgctgttgcggggaagcaacggggcgggcaagtcggtgacgatgcaaagcttgatcccggtgcttttagacggcaagaagacgcccgatcgcctcgatccgttcggctcacgggcgcggcgcatggaagactacttgcttggggaaaaagacgtcgtcaatcgcgatgagcggacggggtatttgtttttggaatacaaacgaaaagcatccgaccaatacgtcacaacgggcatcggcctgcgggcaaagcggcaaaaaagcctcgacttttgggggtttgtcatgttcgacaaccgccgcatcggctatgaccttcagttgtataaacaagaaaaaacaggtgaaaaaatcccgctgacgaaacgcgagctcgccgcattgctcggtgcgggcgggacggtcgtcgagacgcaaaaagagtatatggagctcgtcaataagcatgtgtttcgctttgaatcgctcgaggcgtttcaagaattgatcgaactgctcattcaactgcgcagcccgaagctgtcgaaagactttaagccgacggtgatttatgagattttggaaagctcgctgcctccgttgaccgatgacgagctccgccatttatccgaaacgattgaaaacatggaccaagccaagcagcagcttgagcagctcgaacgcgacgaacgggcgttgaagcgcctttgcgatcaataccgcctgtacaacgaatatatgatcgccgaaaaggcggcagaatacgtaaaagcggtcaagcaggccgaacagctcgccgccgagcaacaacgccttcacgatgaagaagaaaagacgcgaaaggcgcttgatgagcttgaggagtccatcacccgcctcggccgcgaagaagacgtgctgcgagcgcgcgaaatcgacttggctggccatgaagtgttccagcaggcggaaaagtatgaacagctgaaagccgaacggcagcgcctagaggaacggcgggagcggcacgagcagacgattgcggaaaaagaacgacaggaacgtcagcaccgccgccgcctcgatgaagcggaagcgcggctggatgaccttgagcggaagcttgaagacgagctggagcagctgcgtatggatgccgacgaaggatccttttccttgcatgaaacgaacgaagacgattttcaccgccatcgccaaaagcaacaagagttttcgtttgccgcgtggaaacaggaagccgaccgccatatcgagcagctcgaggagttggcgcgtctttggcgcaggcatgacgaggtgaaacgacgctatgaagaagcgagcagcgaagcgggcgaaaggcggcgggaaatggacgaatggcgccaccagcaatggaaatgggaagagctgttcgaagaggagaaagagcggtttgaacaagccgtgcttgcctgggtcgagcagggaggaatcgacgtttccgaaacggacattcaggcgtttttgcaacaaatgggcgccctctatgaacagtattcgctcgatgatttgaagcgcccattcgtgcaagcgtattacgatgccgtcggcaagaaaaaggatgagaaatggcggctcgagcatgacatccgtatgttggaagaaaaacgggcagagcgcgaggccgaactgcgtcaatggcgggaacaacgcgaccccgagcctgaacgggatgaacaaaccactgccgcccggttggcgctggaggagaaaggcattccgtttgtcccgctttatgccgcggtcgaatttgtcgacgatgtgcctgacgatgtgcgcgagcgaatcgaatcggcgctttcacacgcggggctgcttgacgccctcattactgctcgcgagatcgacgtcgcctgcgaccgtgtgctcattccgaaaccggtccatatggcgcacacgcttgctgattatttgcgcccagatgccaatgcccctgtgtcaatggagcggattgacgaagtgctccgaagcatcgtcatcaccgatgccgaccaagaaggcggcatgacgatcgatgaaacggggcgctattcgctcggccttgtccgcggccatgcgccgcggagatcgaaggcgatgttcattggccgtgcggcgcgcgaacggtggcggcttgagaacatcgcagcgctggaagccgagatcgccgctgtggggcaagagatcgaccgtctgcgcggggcgcatcaggcggtggaagcggccatccaagcgctcgccgactggttggcgtccttcccatcggaccgcgatgtgcgcaccgcgtttgacgaagcgcaagaagcgcgccgccaagccgaaagcaaagaacgggaatggaagcggcaagaagaaaaagccgctctcttggcgcgcgaatggaaacaaatcaaacaacagctccacgacgagtcggccgagctcgatttggcctttactttagacggttgtgaacaagcccagctcgccatgaaatcgtacgtccgccatgtgcacgaactcgaagtgctttaccgcgaaacgtgccataccgaggcgatgatcgcccaacagcgcgagcggctcgcggcgctggaaacggagatcgacgaagcgaaaggcgaacgaaatcggcttcgggatgaaaccgagcggctcgccttgcgaatcgcggagatggaacggacgctcgcgcaaatgggggcggatgacattcgcgccgaaatcgcccgcattcaagaacgattggcgtttttgcgccaagaaattccgcgccttgtcaacgaacgggcgcggacggaacagcggctcatgcgcttagtcgaagagcgggaaaaaggggcgcagcgggaagcgttcgcccgcgagctcgccgcgatgtgggaaaagtcgtttgcccgtgaagcggcgcttgggcttgtggatcttgatcgttcccgatccctcctggagcaggcgaaagaagcgaaacaacggtacgaagcagtgttaaaagagacgcgttcctcgcttctggcgcggctgaacaccgtctttttccaagagtcgtccaacttgaccgaataccgggcgtccttcgagccgctggaagaacaaacgaagcccgaatggaccgccgctgccccagacgatgagatggccatgaaagccgcggactggcgggagaaacaagaacggcacgtcatttacctcgactacaaaggcgagcgcgccacgccgtttgcggtgctggcggaagtggagcgcgacatcgtcttgcagcacgagtatatgaaagaacaagaccgcgagctgtatgaggacgtcatcttaaaatcagtcggccgcattttgcgcagccgcatccagcgcgccgaacggtgggtgaatgagatgaacaagctgatgggcggcctcgacacatcatcagggcttgtgctgtccattcaatggaagccaaaaacggcggagacggaagcggagctcgatacgaaagaattggtgcgcctgttgcggcttgatccgcggctgcttagagaggaagatttacagcgagtgacgaaccatttccgctcgaaaatcgcccgcgcccgcgaattgcttgaagagcgcggccaaggcagcacgctccatcaaatcattaaagaagtgctcgactatcggaaatggttttccttcactttgtactatgaaaaaacaaacgagccgaaacgcgagctgacgaaccaccgcttttaccaattcagcggtggggaaaaggcgatggcgatgtacattccccttttcgccgcggcgtattcgcgctaccaagaagcgggcgatgatgccccgtacatcatttcgctcgacgaggcgttcgccggcgtcgatgaaaacaacatccgcaacctgttcggacttgtcgaacagctcggctttaactacatcatgaactcgcaggcgctttggggcgactacgacaccgtgcccgcgttgtccatttgcgaactcgtccgcccgcgcaatgcgtcgtttgtgaccgtcattcattaccgttggaacgggcgcgtcaaacagctcatggtcgatgacaaagaatgggagatgatcgaaacgtga

SEQ ID NO: 51184 - DNA, 1221 bp, Geobacillus stearothermophilus; identical to SEQ ID NO: 51180

SEQ ID NO: 51185 - DNA, 1491 bp, Geobacillus stearothermophilus; identical to SEQ ID NO: 51177

SEQ ID NO: 51186 - DNA, 1197 bp, Geobacillus stearothermophilus; identical to SEQ ID NO: 51178

SEQ ID NO: 51187 - DNA, 4122 bp, Geobacillus stearothermophilus; identical to SEQ ID NO: 51183

SEQ ID NO: 51188 - DNA, 1221 bp, Geobacillus stearothermophilus; identical to SEQ ID NO: 51180

SEQ ID NO: 51189 - DNA, 1542 bp, Streptomyces acidiscabies
atgacgtcgacgccctccgaacccacccgagccgagtacgcccccttcgcccatctcagcgcgcccaacgcggccctctaccgccgggtgatgcgcgtgttcctcacggccaaggagcgcttcgcggtgcacctgcggcccgaggacgtgcacgcggcgctggagccggaacaccgccccgccgaccaggacaccgtggccaaggccctcgacagcctcgtcggctggggcaatctgcgggcggacccggacacgtcccgggtgacggcggtcgaggacttctaccgcaagcgcttcatctaccagctcacccgagccggcgaggccaccgagcaggcgctgtccgtgtacgacgaggcgctgggacggcgcggcgcactccaggcggtggccctgcacgacatcgtcacgcagctcagggccctgctggtgctcaccggtgatccggacgcggccaaggcacatctggccctgtccgcgctgaccgcccggttcgaggcgctggcggagaacgcgcgggcgttcatgggttccctccagcgcacgatcgacctgcacgaggtggacgtcgaggtcttcctcgcctacaaggaccggctgatccagtacctggaacgcttcatccaggacctgatcaccctgggcggccggatcgccctgctcatcggcgagctggaggagcggagccgggtcgacacgctgctgcgcctggcggcggcgcgggaggcggccgacgccgctccggacgaggccgtcgatgccgaggcgcgggcgtacgagcggtggtcggcgaagtggtcggggctggccgcctggttcgtgtcggcggacggccgcgagtcgcaggcccggctgctgcggggccgcgccctcggggcgatcccgcaactcctggcggtggtccggcagttgaacgagcggcgggccgggcgctcggaccgctcggcggacttccgcgcgctggcccgctggttcgccgaggcccccgacgacgcggcacgccaccgcctgtggcgggccgcgttcggcctgtacccggcacgccacctcaccgtcgacgccgccaccctcgaccggcgcacggcccacccggtggccgcatccaccccgtgggccgaggccgaaccgctgcgcatcagcccgcagttgcgccgtacgggcagctacgagcggcgcggcaaggcccgccgggtgcaggaccgctccgagcagcggcgccgcctggccgagatcgccgcgaagcagacgcaggagatcgcggcggcccgcgcccgcctggcgaccggcggcatcacccggctgtccgcgctcggtgaactggacccactcaccttccgcctcttcctccaactgttgggtgacgccctcgccacctggcggcccggcatgacgacgaccgtggcgaccagcaacgacggcacgatggagatccggctcaccgccctggcggacggcacgacggccgaaatacgcacgcccggcggtgtcttccgcggccctgaccacaccgtcgagatcatcactggagaagggcggccatga

SEQ ID NO: 51190 - DNA, 1215 bp, Streptomyces acidiscabies
atgaccacaccgttgggcgaggtactggagaaccggcgcaccgccgagttccacaaggccgcccgcgccctgctcaaggagccgctgctgctcgcgcacggcccgcacgccgacgagttccggctggtgcgccggcacgccgtcgacctgcgcgactggttcgaccgcaacaccggctggccgctgcgggtggacgcggaggcggcgcgtctcggccggacgcccggcacgctggccgacccgacgcatccggcgcgcgaggcgtcccgtgcccgcgtccccttcacccggcgccgctatgtgctgttgtgcctggcgctggccgcgctggagcggggcgaggcgcagatcgcgctggggcggctcgccgaacaggtggtcctggacgcagccgatcctcatctggccgcagccggtatcgcgttcacgctggagcgccgcgacgaacgcctcgacctggcggccgtcgtccggctgctcatgcgctacggggtactgcggcgggtggccggggacgaggacgcctacgtcagcggggcgggcgacgtgctctacgacgtccagcgccgcgtcctggccggtctgctcgccgcccgccgcggcccgtccctgatcggctccggcggtttcgaggaccggctggccgaactgaccgccgagagcgccctggacagcgacgaactgcgcttccgcgccgtccgccagcgcctgaccaggcgtctgctggacgacccggtgctgtactacgccggcctcaccgacgaggagctcgcctacctgacccgtcagcgggccttcatcgccgcccggatcaccgaactgaccggcctggtcgccgaggtgcgggccgaggggatcgccatggtcgacccgctggacgacctgaccgacgtccggatgcccgagcagggcacccacggccatgtcaccctgctgctcgccgagcacctggcggcctcgaacggcgcggtgagccgcgccgagttggagcgccgggtgcgggaactggccgtcgaacacggcgggttctggtccaagagcgcccggcagccgggcgcggagggcgagttggtggagctggcgctggccaagctgaccgcgctcggcctcgccgccctcgtccccgggggtgtctccccgctgccggcgctggcccggtacgcggtcggcgagaccgtcgtcaaggaatccccacgaaaggcgcagcgatcgtga

SEQ ID NO: 51191 - DNA, 1239 bp, Streptomyces acidiscabies
atgagcgcttccgacggctccggcccgcacgtcgaccgcgaccggctcgaccgcctgctgggcgaccccggcctcggctggctggtcgagcgcgtacgccgccgtctggagcgggacgaacctctcaccggcccggtcaccctggccgctcccagcgccgccgagcgggccgccgccgagcgcctgctgggccgtgccccgcgcaccggaggctcgctgaccgtgcgcctcgacgcggtggacgccgtcctgcgccgctccggcatcagccccgggggactcacccctgcggtgaccgcgctcaccggccccgtcccgcgtctcgccgacgtccgcgcgcaggaggcgagcgcctggcgggacgcgtacgccccactcgccgcgctcccgtccgaactcgccggctgggcggaccggttgcgcggcgacggcctcgtacgccgtctcgcccgcaccccgcccacggcgaagagcctcctcgccggcgccgcgacagccctgcgggcgctgcccgccgaccccgccatgtccctggcggccttcgccgcgggcacgctcggtgacgcccacgccctcgacgacgggaccccgctcgccacgctcgtcctgtccggcgtccgtgccctgaccggcttcccggacggcgccggagccgagtggcgccgcgaggcgtgggcgtcggccggtctgctgcgggacgccctctcctcgaccgtcctcaccgtgggcctgcgcggcacgcccgccctcgactggatgaccgacgcgggcgaaccggccgtcctgaccctgcgccagctcacccgcaccccgccgaggacggcacccgcggtcgtccacgtctgcgagaacccggccgtcctcgccaccgccgccgacacccacggcccggcgtgcccgcccctggtctgcctccagggccagccctcggccgccgccctcgccctgctgcgccacctccacacccgaggatcccggctgcgctaccacggcgacttcgactggggcggcctgcgcatcgccggcgcgctgctgagccacgtcccctggagcccctggcgctacaccgccgccgcctaccgcgccgcagccgtcgccgctcccctggccccacccctgaccggcacccccacgaccgctccctgggaccctgagctggccccggccctcgccgaactcggcctgcgcgtcgaggaggagaccgtcctggacgtcctgctggccgacctcgcgccctga

SEQ ID NO: 51192 - DNA, 1599 bp, Streptomyces stelliscabiei
gtggccgatgctcgtgaggtcgtgggatacctggtgcggccggaggccggtgactacatcgcgatcatggacgtactggaagggtcggtaaccgatctgaccgtcagtgaggtcgcgacagcactggctgccgggggactccgcctggacgcacgcctggtggaaaagcggttggacgttctgaaagacatcggggcagcctcggtgcggtcggacaccagtcacgcacgccgctacgccgagatcctggcccggaactggcgttacaccgccagcccagcgggccggcacgtccagcgcttctaccgtcaggtcctggcggggacggcgaccgtacgggagatcccgattgtgtcgctgaaccgcatcgtgtcccatcttgagcagctcgccacggccctgggcgctgcagagcccgacgccgcgcatttcgacgccgccgtactggacgcagtgagcgccgtgttcaccagccacgatgatctcgacgcggctttggtcggtgccgaggacgcgctggtaggtctcgccgaccggttcgacctggacgagggacgtaccaacgacctcaagggcctgctggtcgactatgccacccgtgtggcggccgaactcgactccggctccgcacgggccgcggcagcactggtggtgctgcagccgtggtttggtctgctggcgcaggcggctgtcgacgcctcccaggctcgcgacctcattacagccggtgccctcagcgcttcccgcggcggccgcgcggaggactgggaaggactgtgtgcctggttcgacgcccgcaccggacgagcggcacggttctcgctgcgcctggtgcgggcactgccgggcatgcatgccaacctgcgccggctgcactcctcggccggtaccgcctccacccgcagccgtgccctggctctggcccgggcggtgctgaccccggagatcggtgtgcagatcttccaggctgcggtgggcgaccactcctggcgcaagctctacggtcgggccgacgaggacgacacaggccgcaacccgtcctggcggggcggcccgcaggtgccggtgccgacgctgctacgcacagcgggccgctccgggccgcgcggtcgaggcgctgcgccacgcgacgacgctgctgccagagcgcaggtcgccgaggcccgggcacgccgccaggccgagcatgagcaggcggtcgtcgcggtcctggcatcggttcccggacagcaactgggcgaggcggctgcccgggctgcgctcgccgccctgatggccgccgcccgatctgccccggtcggcccgcgtcgcaccgccgctagccacggactggcctgcactctcgtccacacaggcaccggcaccggcatgctgagcgcccccacctggcacgtgctcctgcccggccgcctccccctgttccaccagcccggccgccgccccaccaccgccgctctcgaggctcttgccggccttgcagtggcggacgacctctccgcatacgcaacgctgcgcatcaccccggccccgtccaccggcccaaggtctcttcgtagcgaaacagcccacgccgacacccggcaggaaggcgcagcatga

SEQ ID NO: 51193 - DNA, 1242 bp, Streptomyces stelliscabiei
atcgcggccaccccgtggctggtcggcggccgccacgacgaactcatcgctgcggtgcgccgcaacgagcacgcgctgcgttccgccgtggcccggctgggctgggtactgatcattgaacgcgacctggtgcgtctgcggaaaagcccgccaccacgcggggaggcctgggcttgccaaggaccgagtccagccgcctgctcctggttcttcctgctgctggcagccgctgagtcgatgccgccgcgcaccgcactgggacacctggtcactcaggcccacgctgccgctgccgaggcgggactgcccacccaccatgacattgcagagcgccgcgccactctggccgcactgcgcatgctcgacgaacgcggtgtcatcgagcgcctcgacggtgacttcgacagctacctgcacgacgaacaggcacccgtgctgctggccgtgcaccacacccggctggcctacgtcatcgccaaccccggcaccctcgacccggccgccgacccgcccgcatggctggagcaggcccagcgtgaaccggacgtggcccgccggatgcgccgtgcccttgtggacgacacttgcgtgcacaccgcgctcctcgacgaggccgaggcacagtggctgagccagcgcgtccgcggcgacgacggaggccccctggcggacgccttcgggcttgtgctcgaacgccgcgcggagggcgccgcattcgtcgtaccggacgaagccttccgccatatgaacgaactcggcccgatgcccttccccgcaccgggcaccgtcgcacacgccgcgctgctgctcctcgaccacgcggcactgcacggaaccaccgacaacgggcccggaccgggctggcggggcctggccgagggccaagtggtggatgcgctggcggcattcgctggcaccaaggcttccgggcgcggcggctggggcgccgagtacgcgcaggaccccctcctgctggccgacaaagtccgggacctgctggccggcacccaccttgcccgactgacccatgccgccccgtcggacggcgacaagaccaccccgatgtggtggttcgcgcccaccggcggccgctgggcaggagaaggcaccgccgattcccaggccacccgcatccgttcaccccgcggcacgccgccgcgacaacgcccacgcacccctgtccagcagggacttttcaacgacatggagaccgaagaaaacatggaggaccacaccccgtga

SEQ ID NO: 51194 - DNA, 4251 bp, Streptomyces stelliscabiei
gtgagtgacatcctcgacctggacttcgctctgccgccggtacctgccccgtccggtgacacgggccggttcggcggccgctggcggctggtcggcgccggcctgtcgaacgtgtggcgctacggcgacctggacctgtctgccgtatcggggcggctactgctccgcggtcccaacgggaccggcaagaccaccgcgctggaggccctgtggccctacctgctcgatttgaacccggccaagcttgccgcaggcaaggcacgtcccaccaccctaaaactcctgatgagcgagggagccccggcaaagggccgccgctacggctacctgtggctgagctttgccgctccggacggcgaaccggcagcgagcccggcgcaggagacggtagcaggcgacgggatcgtgagtttcggtgtccggctgcagtactcgccgagctccacccccgctgtcagggtcgtccccttcacagtgcctggccgcccgctgaagaacctgctcctgcgcgcctccaacggcggggcgctggagcacgaggagttctccgcccgcgtcgagaccgtcggcggacgggtgttcgccgaaccagaggactacatcgaagacctggcccgccgcgtctggtccaccacctccggcgaactgcgtcttctcgcctcacggctgcgggaagtacgcaatccgaccctgctgggcgacgtttccccggccgcagccgccgatgcgttgcgccagtccctgccaggcgtggccggcgacgttctcaccgcgaccgcagaagcccttgccgaatccgacaccacccgggaggcgttcgaacgcgacgagtacgccgccgctctcctgcaggagtttgcccgcgtgtggaccggccacgtcgtcgacgtcacccgcgccgcccacacggccgcccgacaggcccacaccgatgccggcacgcgccgtggccgcgtccgacagtgcaccggcctgctggaaacggcgaaagcagcagccgaccgggccggcagtgacgttcaacggctcgacgacgctcaccaagaggcccaggccgctgcccgcgccatcgagaccagtgacgcctaccggtcccacgggcgcgtcatggacctgcgtaaacggctccgagccgaacagagcgcggcagccagcagctatgacaacctgcacgccgcggccgaacaggcccgtacgcagaccaaggacggccgggacgctctcgacgacatcatcggcgacctcgaggaaaccgtggccgacgcggaggccgccggtgcccagccggttgcgctggagactctgctcgcccaccacccccgcgcccgcgtcacccgcccggtcgccgaccgtgtctccgatcctggccctggtatgaccctcacccacgaccacagcggtctcgaacagcttgccaccgggtggacagaccgggcccaaaagtactgttccacagctgacaaggccgcgctgatcctgcgcgaccacgaccccgttgccacggccgacaagacagccacgaccgcacaccgcaaggcagccgacgccgaaggcgtctacgacgaagcaagccaggcccatgaccgcgccaccgcagaggcccgctcggccgcccgccaagcgctcgccgacgtcgcccggtgggcgctcgcacatcctgatctgcgcggcctgcacgacacagcggccccgggcggagacgagcagcaggtgtgggacatagacgacgtcgaagccctcacccatacagaacccgccgccgtccgcgaccagctcaacgcctgggccgaccaggctctgcacatcggtgaagctctcgccgccggtcacgagagcgcagccaaagaacacctcgccaccgcagcaagcctcgatgccgccgccgtgcagcaccgcaccaaagcccgtcaactgcgttccggacgactcctgccgctgccgcgcccttcctgggccgggcagggcgacgacgataccgcgctcggcgccctgctcgaatggcaccccgcccttcaccacatggacgatcagaaggccctgctcgaactcgccctcgccgactccggaatcctcggcgcccacctgcacccgggcggcgccaccacccacacctggcacatcagccccacaggcgccgtccaggagcagaacctcaccactgtcctcgacatcgcccccggccatccgcacgctgacctcgcccgcacagtcctgcagcgcatcgccctggccgacaccgccaccgcctcaagccacccaggcacgccggcactcctgatcggacgcgacggcaccttcaccgccggccccctcaccgcagaccccgccaccgcgctgcgcgccacaggcagccagatccccaccgcctcgcacatcggcgcccgcacccgcctggccaaggcacgtgccaaagccgacgaacttgacgcggccgcacgcgaactcgagaccggagccagcgacgagcgcaggcgcgccgccgaccgttgcaagcaccgcgacgcagtccgctgtgaaggacgagccttccccccacgggacaaactgaccaccgccgagtccgaccgtgcccgcacagcaaagacagcgcacgatcgcctcagcaccgcacggaccctgcgcggacgggccgacgacgccgcggccgaacacacccgcctgcgcaccgcctgggaggaccgcgcccgcagcctgagcatgccgacggatcccggcgacctgcccaggctgatcgacaagagccgctcgtgcgccgagaagctgaacgactgcgcgagccagctcgccgcccggctgctgcccaggctcgaccgcatcgtgcgcaccctgcccgacgaaaccgccctcaccgagcgccttgccggactccagcacaccgcccaggacatgcacgccgcggtgctcgagacccgggcagaactcgccgagacccagtcccatggcgacgccgacgacgcggcacgccgctacgaacaggccaccacacaggccaaagaactccacaagcagctcgaatccgcccgggagaagggcgttgtcgccgagaaacaactcagcacctgcgagggcgacctcactgtcgcccaagagcggctcgacgaagcactcccgctccagaaaacgacgcgcgcccatctgaccgcgttgctcgcctggcctcctctggcccaagccctcggtaccgaacccgcttcccgggacgctgactccactgacggcgccgtcctgttcgacaccgtcgaagccctgctcgcccgccgacccaccgcctccaagaagaccctcggtgagcgctacgacgccgtccgcgccgacctcgcccagacctggaccatcgcccgcgacgacccgcctgtcggcatcgaagaactcgatgccttcgtcctcacccacgccgagacccactacgaccccctcggcgcagcggtccgcgcacagaccctcgccgaccgggccaaagccgcactcgacaccgcggaagcagcagcgctgcgcgattttgtcatcggccgcctgcccgccgccatcggaaccgcatggaccgccctgacggactggaagaagacggtcaaccgcaagatgcgcgcagcccaggcatcctccggggtcggagtccaggtgcacatagcgctgcgcgacgacctcgatgcggcaacccgcaccgtgtacgagctgtcctgcacggtcggtgatgccctgcgcacagatgcacagaaggaacaggtcggcaaggcactgcagtccctgctggccgccgccgacggctccaccatggcagaacgccttgccggcgctgtcgacatccgcaactgggtcgaggtccgctacctcgtggaacgccccggccccgacggcacacccgtcacccgccaatggggctcgcgcaccggcctgtccggcggggaacggcgcctggtcgtactggcccccatgctcgccgccatcgccgccaactacgaccgcctcaccagcaccggcctacgcctggtcccgctcgacgaagtccccgccgaagtcgatgaacgcggccgcgaaggactggcccgctacctcgccgaactcgacctggacatcctgtgcacctcctacctgtgggacggcgcacccggcgcgtgggacggcatcgacgcccacgacctcgaagcaggcaccgacggaaccgttgttgccttccccatgctgatccgcgcaggccagaccctaccgggggacacggatcccgcactcttcctcgggaagggatcggcatga

SEQ ID NO: 51195 - DNA, 585 bp, Streptomyces stelliscabiei
gtggactgcgacgacctgctcggcggactcatcgtcaccggcatcacgcccagagggtggaggatcccgagcggcgcgaccttcaccctgcctcccagagagctgaccagcatcgcctgggagcctccccctgccgtcggcgcatgggtcttcatcacggaaaacccgtccgtgcttgcggcggcgagcaaccgggccctggcccaggagacgatggtgacaccacgggtgatctgcacggctggcacaccgtcgcaactggaatgcgaggcagtcggcgccttgtcacatgctggctggcgcatcgctgtccgcgccgatttcgaccaggccggcctggcacacgtgcgcgcccttctctccgctgcaccggccgcggttccatggcggatgggggcggccgactaccttgcgtccgccccggagggtgccgacaccctgcaccttaaggagtcggacgctccttgggacaccgacttggtgcccgtgatgctggagcattccgtgccggtgtacgaggaggacctccttcaccagttgcttggcgacatcacggtcggcgcgccgggggcgtccatggcctaa

SEQ ID NO: 51196 - DNA, 1557 bp, Streptomyces stelliscabiei
gtgcgtagggttccacccgagatgttccggttcacgacggtggagcggtccgatctgtacggggcggtgctggaggccttcggcgcggccggcgagcagctggagacggcgctcggccccgaagcggtccgggagcggctgcgcggggtgggctgggcggcggccgtggaggacgacgacctgcacgagacgctcagcggactcgtgcggtgggagctgctggacgtggtccaccaccacgccgagactgactaccgcacgaccgaggagtatgagcgccgcaacctgcggtactcgctgacccgccggggcgaggccgccctcgcaggggtccggcacgcgctggaggtgctcgcctccacgggggcgctgcagacggccgtgctggaggcgatcgccgaccggctcgacgaactgggcctgctgtccggcgaacccgcctcggccgatcgccggatcttcaccaccctgcgtgagctggaggggcacctggaggccctggtggagaacaccaaggccttcaacggcgaactccagcggctgctgcgcgccgagagcgccgacccggaggtgttccacgaggtcaaggccgccaccgtcacctatctccaggagttcctggtcggcctcgaccggcgcggccggacggtcgccgccgccgtggtccgggtggaggaggcgggcatcgccggcctgcacgagcgtgcgctgcgcggggccgaactgtcgccggtggccggtgaggaccccgcagccgggtggctggagagccgccgtgcccgctgggcgggactgcggtcgtggttcctgccggacgacggggcacgcccccgtgtcgagcagctgcacgacatcgcccgccgggccgtcgtctcgctcctgcaggcgctggagcggatcaacgagtcacggcgccgcccctccagcgccgtgcgggactttcgggaactggcgcgctggttcgccgccgccccggcggaggaggacctgcaccggctgtggtcggcggccttcgggctcggcccggcgcgccacgcccacctcgcccaccccgacccggagctgatcccctcgtcccggtcctgggccgagaccccgcccgtggaggtgtcggcgctcctgcggaccagcggacggacggaacgcttcacccgcacggccagggtccgcgacgtcgcggcggtccgggcggaacgcgccgcgcgggcccgcgtcgaacgggccgaactcgccctcgcctggcggatgttggagacccgcggacccgtgcggctgtccgccttcggcgagctggaacccgccgtcctcgaccgcctgctggacctgctcggccgcgccctgtccgcccggccggacgcgggcggactgcggcgcgccacgacgggcgacggccggatggagatcgcgctggccccgcctcccgacggccgcaccgcactgctgcgcacggcgaagggcacgctggccgcaccggactacctcgtccacatcacggaggcgggcggtgccgccacgctcccggccccacccgccgcgcgccgggaggcgaccggatga

SEQ ID NO: 51197 - DNA, 1293 bp, Streptomyces stelliscabiei
atgagcaccttcgccaaccagctggccgccgccgaacgcgaggaggtcgcccgcgccgtacgcctcctgctggcccgccccctgctcaccgagacctccgacccggccggcttcgagctggtacgacgccgtcgcgagccgctggcccagtggttcgactacacctgcggctggagcctggtggtggagccccgccgcggatacgcccgcctcgccaaggtccgcgtggacccggacggctcccgcccggcccgcacggcgcgttcgggccgggcccccttcgaccgccggcgttatgtgctgctgtgcgtgacggcggcagagctgctgtcgatgccgatgaccaccatcggcctgctcgccgaccgtgtcgtccgggccaccaccaccgatccggcgctgcccgggttcgacccggtccaccgcgcggagcggacggccttcgtcgacgtgctgaagctgctggagtcgtacggggtgctgcgcgcggtggacggctcgaccgcggcgtacgtcgcctccgtggacgccgaggtcctctaccgcgtggacaccgccctgttgacgcgcctgcccacggcccccgtcggcgcctcccgcctcgccgtaccccccgacgaggtgcccgcccggttcgaggacctcctcgcgggactggtgcgcgaacgccgctacggcgccgtctccggcgacggcccggcggacgacgaacacggggggacggccgccacggacgcccagcgcaacctgcggctgcggcactcggtgctgcgccgcctcttcgacgaccccgtcctgtaccgctcggacctcaccgacgacgaactggcctacgtcacctccctccacggccgccagatcctgcgccgctcggtcgaacaggccggcttcctcctggaggaccgcgccgagggcttcctgctcgtcgacccggacgcgctggccaccgacgtccgcttccccgacgacacctccatcgcccgggtcgccgcgctgctcctgctggaacccctctgcgccgcgcccgccggactcctgcccgagcagctcgccgaggccggcaccggcctgctgcgccgcttcccgcgctgggccaaggcgtaccggtccgaggacggcgcggcccgcctggccgaggacgccttcggcgtcctgcgtgacatgggtctggcccaccgtgccgggggccgtgtcgtcgcgcgcccggccgcccaccgctaccgcctgacggggacgacgagttcggcaccggaggcactcgcaacagaggacacagaggaagacaggcagtga

SEQ ID NO: 51198 - DNA, 4146 bp, Streptomyces stelliscabiei
gtgagcgtgacagagcttcccgttccccggcggcccgagtcccccgagcccgcgcgcacaccggcgcgagcggccgaggcgccccgcggccgctggcagccgtaccgcgcgggcatcctcaacgtctggcgctactacgacgagacgttcaccttccaccagggccgcctgctgctgcgcggtcagaacggctcgggcaagtccaaggcgctggaactgctgctgcccttcctcttcgacgccagcctccgccccaaccgcctctccacgttcggcggttcggagcgcaccatgcactggaacctgctcggcgagggcgccaccggcaagacccgcgtcgggtacgtgtggatggagttccgccgcgtcgacgacgacggcaccgagcgctggttcggctgcggggcacgtctgcaggcgagcgtgcacaccaccggggtgcacgccgactacttcaccaccggcgcccggatcgcccaccccgacggcgtgctcctggtcaacgaggcaggacagcccctgacccgtgccgccctcgccgaggccctgggcgaccggggcgacgtacacgcctcggccgcggaccaccgcacggccgtacgacgcgcgctcttcgccggaatgggggagcagcgctacgagtcactgctgtccgccctgctccagctgcgccagcccaaactgtccgaacgcctcgacccgtccctgctctccaccctgctgtcccgggcgctgccgccgctgggcgagggcgagatcgccgaactcgccgagggcttcgaacagctggaccgccggcgggagcatctgagacggctcgacgacgaggtggcggcggccgagaccgtcgccgcgcggcagcgcggctacgcgcgacgggtcctgcgcgccggtgccgccgcgctgatcgccgccgcgaccgagactgacgacctcgcccgcgccgcccggaccagcgccgcggagttcgaacaggccctcgcgcaacgcgagtcggcccgcaccctgcgcgaggaacaggagctgcgcgcacacgccctggaggagaccgtcgagggcctgcgggagagcgacgcctaccagcggggccaggagctggaccggctccgccgccgtgccggggacggggcggcggccgccgcccgggagcgcgccctcgcccggaccgccggggagacggcgcggaaggaccggaggcacgccgacgagacggcggaccgggcccgcgcgctggacgagcacgcgcgcgaggccgccgaggaagcacgccggtcggcccggtcgctgggcctggaatctctccaccacgaggcgaacaccgtcctgggcgccgctccggacggtcccgggcgggcggcgcacggcggagcggggcgggaggactccggcgccgcgtccccggcgggcgacggcggggcccggctggcccgccgactgctgcggggcgcggtcaccgcccggcggcagcagctcaccgtcgtcaccgaggccctggacgagcacgaccgcgcggtacgtgaccggggcgccgccgaggacctgctggacggggcccgggcccgcttcgcggaggcggtcgcccggcgggacgcggcgtccaaggcctgggacgacgccgttgccgcccaggcggagcggctgctcgtctgggccggggaccgtgcggaactgcgcatcgccgaccctcaggaactcgccgcgagagcggcgagcgaggcggaggtgacggctctcgtcgacgcggccgtccgcccgctggaacgggagatcgccacggcggaggccaccgcccgggcagcgcgtccgggcctgtgggacgagcggggccggctcgtggaggaggtgcagcggctcggagccgagaccgatcggccgccgccgaccccggccacccgtaccaccgtccgcacggcgacggcgggagcacccctgtggcggctgatcgccttccgcgagggtgtaccgctcccggtccaggccgcggtcgaggccgcgctggaggcgtcgggcctcctggacgcctgggtcggcccctatggcgggatcaccctgccgggccacgacacgcgcgccgaggccgccctcgccgtggccgccccgggccacagcctgctggcggtgctgcggcccgaggagggcatcccggtcccggtcgacaccgtcacccggatcctcgccggggtcgcgttcgggtcgggcctgcccgacggccacgccgcggccgtgtccgccgccggcgcctggcgcctcgccctcgccaccgggtcctggagcaagccggaaccggtctacatcggcgcccctgcccggcagcgggcccggcagcgcgcggtcggcgaactgaccgaccgcatcgccggggccaacgcctccctcgtcgcgctcgacgaccgctcgcgcgacctcgccgcccgccgcgcccggctggaggccgacctcgccgcccgccccggccaccgggaactcgacgcacggcgacgcgacctggaccgcgccgaggagacggtggccgcccgggacgacgccgtacgtgatgccgccgggcggctggcacggtgcgaggccgaggtggcgggcgccctgcgcgcgctcggccgccgggccgcggaacacgcgctgcccaccgaccgcggccggttgcgcgcgctcgccgacgacctcgacggcttccgggacaccgccgacggctgggtggacgcccgcctctgcgcgaacgccgcggcggacacggcccggcagtcggccgcgcgggcggaccgctcgcgccgggcggccgaggagcggaccggggacgcggccgccgccgagggggaggcggcgggtctgcgggcgcgcgtggaggccgcgggggccaccgtcggcgccgaccaccggcagatcgtcgcgcgggtcgccgaggtgcgcgaggaactgcgccgctgccgggacgcggcggctcgggcggccgatctcctgctccggctggagggacgtgtcggcgggctgcgggccgtcagcggacaggacgcggcacgacgggaacaggccgtcctggcgcgggaccgcgcggcgcaccggctccggcatctgtgccaggtcgggctggccgaggacgcgggcctcgcgccggaaccggaggccgcggacgggagcagggccgtactggagaccgcccgcgccatcgtggcgcactggcccgggatcccgcacgcccctcatgacctcggcgacgccgcgacccggctgtcggaagcggtccacgaggcccgccggcacctgggcgcccgggccgacctggacctggaacccgacgacgacgtgcaggtgttcagcgccaccctggacggcgtacgcctgggggcgacgggcctgctcggcgcgctcgcccggcaacgcgacggcagccgcgacgacatcaccggcggcgagcggcgcctcttcgaccagatcctcaccggcgacatccgccgccacctcgcggtccgcatccggcgggccggcgaactcgtcgaccggatgaacgggcacctggaacgggtgcgtaccgcctccgacgtcgccgtccagctggcctgggacgtccggccggatctcccggacagcacccgcaccgcccggcagctgctgctgagggaacccgaccgggtcaccgagtccgaccgggagacgctgcacgccttcctgcgcgcccgtatcgcggaggccgagggcagcgacacggccgcgacctgggaggaacagctcggcgaggtgctcgactacaccgcctggcaccgtttcaccgtccgcctcgaccgggccggaggcaccggatggcagcccctgacgaagaagctgcacggcgcgctctccggcggggagaaggccatcgccctgcacctgccgctgttcgccgccgtcgccgcgcactacgaggcggtgcccctggcaccccggccgatcctgctggacgaggtcttcgtcggcgtcgacaccgtcaaccgcggacaggtcttcgcgctgctcaccgcactcgacctggacctcatggtcacctccgaccacgagtggtgcacctacggcgagctgcccggcatcgccgtgcaccaactcctcaccgacgaacacgacgacgcggtcaccagcgcccgcttcgtctggaacggcaccgacctggagacgggatga

SEQ ID NO: 51199 - DNA, 1500 bp, Virgibacillus pantothenticus
atgatgcaaacttttaaaaaggtcattgaagcaagttatttaacagctgaaaaagcttggagttatcgagctattctgcgttatttttatatacagcatgaacggatgcgggagtttctatttcctgaagaaatattggcgcaccttaaaggatcatctgattttaaagattatacggaagagcagctacatcaggatttggagcagttggttagatggaataacttgttggctcgtcaagaaatgggcagagcacatacgattgaagagtttaagaagaaacgctttcgttatcaatgtacaccttacaccgttgaatttgaacgaatgctatctgaaatggaaaaaggcggcgacgtttttggtggatcactagagaaaaaagaatttgaacggttatatcaaacattagttgacatggaaaaggcacttcaacaacctgctttgcctcaagccgatgactgctctcaattatggaatgatatttttacttactttcgatcgattacgaaaaacacgtctgattatattgcccatattaacagtgaacaggcagaagaaaggatgcatacagaagcttttcttgtatttaaagatcaattcacatcgtatttgcgagattttattgttggtttgcagcatacagcacaaaaaattcaacaattacttcgctccattgatatggagaagctacgaccatttatccagcaggtcattgttcatcagcaacatgttccgagatttgaggaggtaatggatgatacagcactaatggaggatatggagggaaaatggcaaacattaacggtttggtttttaggagatgcttatcgcgaaagcgaattggacagcttgcaaacacgaaccaatgaacaaatccgccgcattactcgcgtagttcaacggttaggagagcgacatcattatttccgtagtcgtaaaaaagattatttacatttagcaaactggtttgcttcgatggaaaacgttgacgaagctcatgaattatctgctgtagcttttggtgtattgcatacccgtcatttatttagtgaccatataccatcagaggatatttatacagatacttggcaagagcaaccaataaaacatgaaacgaatccacgaatccgtaattaccgtgaaaaaaccaaagcaggtgcaattatcaatcagcgggaagcgaaagaaactgtccgaaagcaatatttacaagaaaagcttgctgaacaaaacacgatagaaaaatatatagagggaaataccatcacgattgaaaacctaccaattattgaaacaaatgtaagaaaaatgttgctcagctggattggaaaagcgatggctaaacaagatcgaacctttaaaaccgagcacggaagggttgtaaaagtccatctgactcccgagcgacgagttccattgcgagcagaagatggaacgatggaaatgccagcagtgacatttgagtttttagatgaggtgagcaaccatggagcataa

SEQ ID NO: 51200 - DNA, 1176 bp, Virgibacillus pantothenticus
atggagcataatcagttcgatgataaagcgcaaacggcaatgcggatgttgtttgaacatttttggatactgcgagctaaacaaccagaagcctaccagtttattagagaaagagaaaaagtaattaagcgttatgtaaccgacaagcttggctttgacttaatcgtacatcagcattttattaagttggaaaaaatacctgtcgaaacaaaaagctggatgggtatgcaagagtttcaagagcctcgtgattatgcgattttctgttgtgctttagcctttacagaaaaccgtaccgtagatgaacaatttttattaacggaaatatgtgaagacattaaagatctttatccaggtgatcttcctctagattggacgaattatcatcaccgtaaatcgcttgttcgggttattaaacagctggaaaagctgtccattctgtcagtggtggaaggagaagtcgaacatttcgccttgaatgaagagcatgaagtgttgtatgaagtaacggtatatgcaagatactttatgcgatcttatccaaaagatttaatggattaccattctaaagaagatattatgcaaggcgagtgggatagacatgaagcagtagatgggcgacgtaaacgcgtctatcgtaaattactgttatcaccagctgttcaacgaatgggtgaggatgatcctgattttgcttatatccgaaattatcgtaatcgtttgcgggatgatttagaagagcatactttatttcgttttgaaatttttaaaaatgttgccttgctcgtagcagaagagaaaaaacaggagcttacgttatttcctgatcagaaagctattatggatgttgcgttgcatcttgcaacttacattagagatcatcaagcagattataaaccagatacatttggaaatatacgcatcagcgcagttgcatttgaacaaattattacttctctccatgaacaatatggagcaggatggagtaagcaatatcgggaaggtagtataaaacaaacacaaaaggaattaaccgaaacgttgaaaagttgggagatgcttcagcaagatgattttacgaaagactatatcattcgcccattgctcggtcgtgtagtggggaaatacccaaggaaatttgtagaagaagggatgtcacagcatgagcaaaaataa

SEQ ID NO: 51201 - DNA, 1302 bp, Virgibacillus pantothenticus
atggaaacggaggaccttttaaaggaagctaccttgttttttaagagtgaacaagcatatgataagctgtttaagcagtttcgtaaaaagtatgaatcgcttggtcgaattggagggacgatttcggttcaactattttcagagcgagaattagaggttattgctagcttctatggtacaacgaaagaaacattaatgaagaagggcacgatacatgttgcccaatttgcaagccagcttcaagagacgaaatactatggaatcgaattaaagcaactcttggactattattttggtgaagaaatcatttctaaaaaacaacgcaaggaaatagcgcaacatcgactagaatctcatttacaacaactagcatcgtcttatcctttgctttttgattggctcctatatgtactatcgacgccttctgacatgaggtgggttgttcgtttagctgaaaaggatgttacttattttgatcaattagtaggtaaattagctaaagcgcgagaacatttgccgactaagccagagcgtttacctatgtttagccaacgtataacggcagacccgcatgcctttgatattaatacagatttaggaaaattatttattgatgtgttagctttttatcatccagaatggtccaaacatgaggtgccacaaacaacagagtcaatcaatgagcttttacgcgttcaccacatttaccgggatgacctattaaactttgttacgtgttcagggcttctagcagaaacaatggaagatgttttgcatccagtatggtccgcagctgtaaaaatgaatacagtgcaaaatgttccattgcgagagttatttgtgataaatagaatcttccctgctattggaagccatgtttgggttgtggagaattcgggcgtctgctctgctttactggatgagctaccaaacactccaattgttagcacgaatgggcaatttaagctggcagcatggatattactagacttacttgctaaggaaggttgcaccatttattatgccagtgactttgatcctgaaggcttgggtatggctgaaagattattatatcgttatcctcaacatgtgagggtttggcaaatgagcatacgagcttataaaaagagtaacccagtcaaatcaatagacgaagagcgattgaaaaaactcgagcgcattgaacatccagatttgctcacacttgctcaagaaataaagcgaaccaaaaaggtggggtaccaggaagcgctagtaaaggatatgctacatgatattcagcaaaagctactaagagcttaa

SEQ ID NO: 51202 - DNA, 1491 bp, Geobacillus sp. LC300
atggatgccacatggctcaaacccattgtcgaaaccaaatatttatcgacggaaaacgcgcaccgctaccgggcgattttgcgctatttctacattcagcacgagcggatgcggcaatatttgtttccagaagaagtgtacgcttttttaaagcagcacgaggagtttgcggattacacggaagacgatttgcagcaagacctcgaccagctcgtgaaatggaacaacttgatcgcccgtcaagagacgtcccacgtgcggacgattgaagagtttaagaaaaagcggtttcgctaccaatgcagtccgtacacggtggagatcgagcggatgatccgcacgcttgagcagcttggggattcgttcggaggatcacttgagaaaacgcggtttgaccgcttgtatgcttccctttcccgcatcgaggcgatcatcgcctccgggtttcaggaacagagagatgaaatgtaccaagtatgggaagagacgttcgattatttcaagaaaatcatccaaaattccgcagactatatggcctatttacatagcgaaaacgtggaagagcggatgacgtccgagtcgtttctcgtctataaagagcagtttacggcgtacttgcgcgattttatcgtcgccttgcaaaaaacgtcgatgcagattgaacaattgcttgaagatctgccggaagaaggggttcggcagttcatcgggcatgtcgtcgactatgagcggtcgatcccgcgctttgccgatgcgccgccgccgcgcgctgtgcagattgaagaaaaatgggagacgtggcgcagcttgtgtgaatggtttttaggccgcaacgggcgcgagagcgagctttcgtttttgcaataccagacaaatgaggcgattcgccgtctgacgcgcgtcgtgcagcggcttggcgagcggcatcatcattttcgcagccgcaaaggcgactacttgcatttggcgcgctggttttcccgccttgaatcgattgaagaggcgcactgcctgtcagcggtcgtgttcggctgcttccatacgaaacatctcgtcgctgatgcggaggcgaccgacaacatataccgcgacgtatgggacgagccgccagccgagtgggtgacgaagccgcgcgtccgccattacggagaaaagaaaaagccgcaggcaatagaagacaaagaacgggagaaagaagaagcgcgccttcgctatttggaagaaaaagcgcgcgaggaagcggcgctcagacagcttgtgaccgatgggaaaatcgtgatggctgaccttcccgaggtgactccatatgtacgaaaaacgctgctcggttggatcgccaaggcgatggggcgcgaggggcaagcaatgaagacggaaaacgggtgggtggtcaaagtggtgaacaaagaggggacgatttgccttcgggcggaagacggggaactcgtaatgcccaactatgaaatccacgtgctggcaggaggtgaatga

SEQ ID NO: 51203 - DNA, 1197 bp, Geobacillus sp. LC300
gtggagacggcgtttgacgacaaggcgaaagaagcgctcgccgcgctgtttgagcagttttggatcattcgcgaccaagagccggatttgtaccagctcgtccgcgagcgtgaacatgtgttgaaacggtatgtggaggagaagtttgggtatcgactcatcgtccaccgctatttcgccaagctcgagaaaattcccgccgatcccgagccgtggatgggcatcgagtcgttccaagagccgctcgattatgcgctgttttgctgcttgatggcgtatttggaaggcaaggcggtggaagaaaagtttttgctttctgacgtatgcgaagaaattcgcgccatgtacccgggggatctaccagtcgattggacgaactacgcgcatcggcgcgcgctcatccgcgtgttgaaaacggcggaacaaatcggtcttgtccgccggatggatggggagattgaagcgttcgcgcaacatgcggaggaagaagcgctgtacgaagtgccggtgctcgcccgctattttatgcgtacgcatccgaaagatttgttgcaatatgaatcgatcgacgaattgctcgccgaggagtggaaagcctcgccgcaagattatcggcgccatcgcctgtatcggaagctgtttttatccccggcggtgcatcggacggaaggggacgagcaagatttttactacttgcgcaacttccgccatcggctgcgcgatgacatcgaagcgcatacgccgtttcggtacgagttgtacaaaaacgccgccatgttgacgttgcctgagcggcaggcgccgtacaccgtatttcctgatcagaaaggaacgtcggagatcatccttcattttgccgccttggtgcgcgagcggcttcaggactatccgccggatgaatacggccgcatccggttgacgtctgaacaattttccgcttggcttgccgattgccgccgccgttacggggcggggtgggggaaaacgtaccgcgacatgtcggctgccgagcttgtccgcgaagtgcttgcggcgctttgcgaatggcgcatggccgatgtggagcacgacaccggaatgatcgtcctttatcccctcctcgggcgggtgtcgggacggtatccagatgattttgacgcgaaagagggaggagaacatggcgaatccatgggtgcttcatcgtgcggggctgattaa

SEQ ID NO: 51204 - DNA, 4122 bp, Geobacillus sp. LC300
atggcgaatccatgggtgcttcatcgtgcggggctgattaatttttggtattacgacgagcagtattttcacttcgctgacggcaagctgctgttgcggggaagcaacggggcgggcaagtcggtgacgatgcaaagcttgatcccggtgcttttagacggcaagaagacgcccgatcgcctcgatccgttcggctcacgggcgcggcgcatggaagactacttgcttggggaaaaagacgtcgtcaatcgcgatgagcggacggggtatttgtttttggaatacaaacgaaaagcatccgaccaatacgtcacaacgggcatcggcctgcgggcaaagcggcaaaaaagcctcgacttttgggggtttgtcatgttcgacaaccgccgcatcggctatgaccttcagttgtataaacaagaaaaaacaggtgaaaaaatcccgctgacgaaacgcgagctcgccgcattgctcggtgcgggcgggacggtcgtcgagacgcaaaaagagtatatggagctcgtcaataagcatgtgtttcgctttgaatcgctcgaggcgtttcaagaattgatcgaactgctcattcaactgcgcagcccgaagctgtcgaaagactttaagccgacggtgatttatgagattttggaaagctcgctgcctccgttgaccgatgacgagctccgccatttatccgaaacgattgaaaacatggaccaagccaagcagcagcttgagcagctcgaacgcgacgaacgggcgttgaagcgcctttgcgatcaataccgcctgtacaacgaatatatgatcgccgaaaaggcggcagaatacgtaaaagcggtcaagcaggccgaacagctcgctgctgaacaacaccgccttcacgatgaagaagaaaagacgcgaaaggcgcttgatgagcttgaggagtccatcacccgcctcggccgcgaagaagacgtgctgcgagcgcgcgaaatcgacttggctggccatgaagtgttccagcaggcggaaaagtatgaacagctgaaagccgaacggcagcgcctagaggaacggcgggagcggcacgagcagacgattgcggaaaaagaacgacaggaacgtcagcaccgccgccgcctcgatgaagcggaagcgcggctggatgaccttgagcggaagcttgaagacgagctggagcagctgcgtatggatgccgacgaaggatccttttccttgcatgaaacgaacgaaggcgactttcaccgccatcgccaaaagcaacaagagttttcgtttgccgcttggaaacaggaagccgatcgccatatcgagcagctcgaggagttggcgcgtctttggcgcaggcatgacgaggtgaaacgacgctatgaagaagcgagcagcgaagcgggcgaaaggcggcgggaaatggacgaatggcgccaccagcaatggaaatgggaagagctgttcgaagaggagaaagagcggtttgaacaagccgtgcttgcctgggtcgagcagggaggaatcgacgtttccgaaacggacattcaggcgtttttgcaacaaatggacgccctctatgagcagtattcgctcgatgatctgaagcgcccgttcgtgcaagcgtattacgatgccgtcggcaagaaaaaggatgagaaatggcggctcgagcatgacatccgtctgttggaagaaaaacgggcagagcgcgaggccgaactgcgtcaatggcgggaacaacgcgaccccgagcctgaacgggatgaacaaaccactgccgcccggttggcgttggaggagaaaggcattccgtttgtcccgctttatgccgcggtcgaatttgtcgacgatgtgcctgacgatgtgcgcgagcgaatcgaatcggcgctttcgcacgcggggctgcttgacgccctcattactgctcgcgagatcgacgtcgcctgcgaccgtgtgctcattccgaaaccggtccatatggcgcacacgcttgctgattatttgcgcccagatgccaatgcccctgtgtcaatggagcggattgacgaagtgctccgaagcatcgtcatcaccgatgccgaccaagaaggcggcatgacgatcgatgaaacggggcgctattcgctcggccttgtccgcggccatgcaccgcggggatcgaaggcggcgttcattggccgtgcggcgcgcgaacggtggcggcttgaaaacatcgcggcgctggaagcggagatcgccgcgatggggcaagagatcgaccgtctgtgtggggcgcatgcggccgtggaagcggccattcaagcgctcgccgactggttggcgtccttcccggcggaccgcgacgtgcgcaccgcgtttgacgaagcgcaagaagcgcgccgccaagccgaaagcaaagaacgggaatggaagcggcaagaagaaaaagccgctctcttggcgcgcgaatggaaacaaatcaaacaacagctccacgacgagtcggccgagctcgatttggcctttactttagacggctgcgaacaagccatgctcgccatgaaatcgtacgtccgccatgtgcacgaactcgaagtgctttaccgcgaaacgcgccataccgaagccgtgatcgctcagcagcgcgagcagcttgcggcgctggaagcggagatcgacgaggcgaaaggcgaacgaaatcgacttcgggatgaaaccgagcggctcaccttgcgaatcgcggagatggagcggacgctcgcacaaatgggagcggatgacattcgcgccgaaatcgcccgcattcaagaacggttggcgtctttgcgccgcgaaattccgcgccttgtcaacgaacgggcgcggacggaacagcagctcatgcgcctggccgaagaacgggaaaaagaggcgcggcgggaagcgttcgcccgcgagctcgccgcgatgtgggaaaagtcgtttgcccgtgaagcggcgcttgggcttgtggatcttgatcgttcccgctccctcctggagcaggcgaaagaagcgaaacaacggtacgaagcagtgttaaaagagacgcgttcctcgcttctggcgcggctgaacaccgtctttttccaagagtcgtccaacttgaccgaataccgggcgtccttcgagccgctggaagaacaaacgaagcccgaatggaccgccgctgccccagacgatgagatggccatgaaagccgcggactggcgggagaaacaagaacggcacgtcatttacctcgactacaaaggcgagcgcgccacgccgtttgcggtgctggcggaagtggagcgcgacatcgtcttgcagcacgagtatatgaaagaacaagaccgcgagctgtatgaggacgtcatcttaaaatcagtcggccgcattttgcgcagccgcattcagcgcgccgaacggtgggtgaatgagatgaataaactgatgggcggcctcgacacatcatcagggcttgtgctgtccattcaatggaagccgaaaacggcggagacggaagcggagctcgatacgaaagaattggtgcgcctgttgcggctcgatccgcggctgcttagagaggaagatttacagcgagtgacgaaccatttccgctcgaaaatcgcccgcgcccgtgaattgcttgaagagcgcggccaaggcagcacgctccatcaaatcattaaagaagtgctcgactatcggaaatggttttccttcactttgtactatgaaaaaacaaacgagccgaaacgcgagctgacgaaccaccgcttttaccaattcagcggtggggaaaaggcgatggcgatgtacattccgcttttcgccgcggcgtattcgcgctaccaagaagcgggcgatgatgccccgtacatcatttcgctcgacgaggcgttcgccggcgtcgatgaaaacaacatccgcaacctgttcggacttgtcgaacagctcggctttaactacatcatgaactcgcaggcgctttggggcgactacgacaccgtgcccgcgttgtccatttgcgaactcgtccgcccgcgcaatgcgtcgtttgtgaccgtcattcattaccgttggaacggccgcgtcaaacagctgatggtcaatgataaagaatgggagacgatcgagacgtga

SEQ ID NO: 51205 - DNA, 1221 bp, Geobacillus sp. LC300
gtgagcacggccaaggaggcggctgcctttttccgctctgaaccgggcttccgccgtctgtttatcgagatgaagcacaagtacgagtcgctcggccgcgtcggcggcgcggtgtctttagaggcgttcaccgatgaagagcgggaggcggtggccgcctttttcggcaaagacgtctcccgcgtctcccttatcgcgtttgaaaaacagctcggacagacgaggtttgcgggcgttgggcttgtcgagctgcttgaacagtatttcggcgccccgcttgtctcaaacaaagaacggcgccaggcggaggaagaggaacgggatcgtttttttgcgcgtctgaccgaggagcatcattgggttgagtctgtccgccctcagcgcttcgtccaaacggcgtacgaaaccgaccgccgcagcctgaaggaggccatccgccttgtcagcgcggctttgggccgcctcccgctcccgtcatacatgcgcctcccgctctttgcccagcaagtggcgggagacccgcatgcgttcgatttgtccacgctaccggggagattgttgctttcggcattgcaagcgaccgtgcccggggattgggacatggcatctgtagagagcgtcaacgagttgctccagtccgtcggcttgctccgtgaggatatcctgaactttgtcacatgcgccaacatcctcgctgaaaccgagggcggcccgcatcctgttttctccgctgcctgggaggcgaacacggcgctgaacatgccgcttagagatgtgctgtcgcttgtccgcgcccgccctgcccatggggggacggtgtacatcgtcgaaaacgcgggcgtcttttcgacgttgcttgacacccgcgccccgcttgtcagcacgaacgggcaaatgaatttggcgacgatgaagctgctcgatttgctcgcggcctctggcgccaagctgtattattccggcgacttcgatccggaaggattggccatggcagagcggctgcttgaacggtatggacaggccgtcaccctttggcgcttttccgtcgaggattatagggccgccaaccctgtcgtcgacctcacccccgagcgcctcgccaagctcgcatccgtaacgtcgacgccgctgcagccgctgaaagaggagatggcggaaacgaaaaaagcggggtatcaagaggcaattatcgggaggctgacagaggatatcaacgggtag

SEQ ID NO: 51206 - DNA, 969 bp, Nocardia seriolae; identical to SEQ ID NO: 50745

SEQ ID NO: 51207 - DNA, 1440 bp, Nocardia seriolae; identical to SEQ ID NO: 50746

SEQ ID NO: 51208 - DNA, 4464 bp, Nocardia seriolae; identical to SEQ ID NO: 50747

SEQ ID NO: 51209 - DNA, 1536 bp, Nocardia seriolae; identical to SEQ ID NO: 50748

SEQ ID NO: 51210 - DNA, 1308 bp, Nocardia seriolae; identical to SEQ ID NO: 50749

SEQ ID NO: 51211 - DNA, 3923 bp, Nocardia seriolae
atgacgatcactgaattgccggtcaccgcagtagatctcgtcgacggccgcaactcgcgctggattccggtccgggcgggaatcctgaatgtctggcgctattacgacgaggtcttcgaattccacgacggccgcctgctgctgcgcggcccgaacggcagtggcaagtcgaaggccctggagttgttgctgccgttcctgttcgacgccagcctgcgtgccaaccggctgtccaccttcggcaccggcgagcggaccatgcactggaacatgatgggggagggtgcttccggagtcactcgcgtcggctacgtgtggctcgagttcggcgtccgtggtgcgcccgggcagtggttcacctgtggtgcgcgcttgcaggcgagcgcccacaccagcaccgtgcatcccgactatttcaccaccgatctgcatatcgcgagtgaatccggtagcacaggaacaggtttcgctgcactgaccgccgagggcaggccgctgacccgcgcggccctcgaacagctgctgggcgatcacggcaccgtctacgacaatgcgagcgattaccgcgacgctgtgcgtacgacgctattccccgcgatgaccgaacagcgctatgacgccctgatcatggccctgctgcaattgcgcacccccaagctgtcccagcgactggaccccgcgctgctgtcgacgctgctgtcgaaggctttgccgccgctcgatcaggatgagatcgccgatttggcagagggtttcgagcgactggacgctcagcgcgaacggctggcccgcgcagaggccgaggtgcaggcgaccaaggcgctggcccgccagcagcgtgcctacgcccagcgcgtgctgcggtcgagcgcggcggcgctgctcaccacgaccagcgaactggacaagctctcggcgacagccaagcagtcggcggaggcgttcgcgcgagcggagtcggatatcgccgccgcagcggtatgtctggaatcgctgcggcgcgaataccgggacgccgaggcgcgccgggacgggctgctggaatcggatgcctacaagcaagggcgcgaactcgacaccctgcgggggaacacggtgctagcggaacggcgcgccgaggagtcgcgcgcactcgccgaccggagtctggcggacgccgcactcgacacccaacgacatcgggaagccgtcgaggcggccgacgcacagcagcgggcggtgaccgaatgcgcttccgacgccgaacaagcggccgtgcgtgcgggaatgcccggcgtattcgccgaacttgccgatacggtggagtcggcgcatgtgcgggcactgttgcgcggtgcggtgaagggcagacgcagccagatcgacgaggtcgagcgggtgctgggccgccatgaacaggctgtcgaggcgcgcggacgagccgagcgggatctcgacgcggcgcggaccgtctacgcgacggctgccgacagccggtccacggcccacgcggcgcgcgacaacgcgctcgaggaactgcgaaacagactggagcactgggcctctcgatgcacagtgctccgcctcgaggatctcgaccagctgaccgcccgcgccccatcggaaccggccgtcctggagctggtgaacgccgctgcggcggtgctgcgcgacgagatcacccgctcggagacgcgctgcgaatccgagatcggggccgtgcgggccgagcgcgcggagctggtggccgaccgtgagcgcctgcgtggcgaagaggatattccgcccacgccgccgccgtggcgcaccgccgaccgctccgtcatgaccggcgcgccgctgtggcggttggtcgatttcctgtccggggtaccggattccacgcgcgcgggcgtggaggcggcactggaggcgtcgggtctgctcgacgcctggatcggtgccgacggctccgtgaccggacacgacgtgttcgcctcaccatcggcgctgccgcccgtcgccggtcgatcgctgaccgaggtcttggtgccggtgccggtcgcgccggtcgcgcccgagccggtgcaccggctgttgtcggccatcgccttcggtgacgggctgcccgagggggcggtggcggccgacggcctgcccgagtcggtggccgtcgttgccgccgacgggcattggcggatgggcagtctcagcggttcgtggatcaagccgcagccgatgtttgtcggcgcactcacccggcaacgtgtccgggaacgccgcatcggggaactggacgccgcgatcacggccctggatggcaccctcgcgacgtttgcccagcggctgcgcgggctggccgatcgccgcgccacggtagccaccgagatcgccgctcgccccacacacgacgccgtgctcgccgctcagtcggcgctcaccgaggccgaatcggacctgcgggcggccgatggtgtcgtccgcgaccggatcgcggatgtggccacctgtgagcaggcggtgcggtcggcgttgctggcgttgaccgcgttggctgcacagagtggcctgccagcggattcgactgctctgcaacgcatttccgccgctctggacgccttcgagaatgcggccgagacctggctcgacgcctgccgggattggcgcgggctgacggatgtcaccgccgagcgggcagatcggctggaacgctcgaccgagttgtccgaccagcggcaggcgcaggcgatatcggccgaggacgagcatcgcgcgctggccgccaaactcaccgagatcgaggcgacggtgggtctggactaccgccaggtcctcacccgcttgagcgaggtgcgcgaccggctcgccgaactcgatacccagcgctccgccgaacaacgctcgctcaccgaattgtccggtctgcgaggagaattgaagagcagacacgagaccgacatccagtcccgcgatgccaccgccatttcccgcgaccaactgacccaccgcttccggcatcttgctgcgggcacgctggctcccgacagcgagatccccgacctcgcagccttccgcgccaccctggccggttcggaaggcgtgcgcgccgcccgcgacgcggcccgcctggtcgccgcggcctggccgtcgatcccgcacgcggagcacaatatcggcgacgccctcaaccgcctggccgccgccgtccacgaatgccgcaccgccctggccgcccgcgccgatctggacctcgaaaccgacggcggcgcacagattctcaccgccgtcatcgacggcgtccggatcggcgcggccgaactgctgcgcatcctgcgcaccgaggccgaccaggcccagcaggagatcaccgacggcgagcaccgcctcttcgaccgcaccctcaccggcgacacccgccgccacctcgccgcccgcattcgtcaggccaacgacctggtcgacgccatgaattcccgcctgacccaggtccgtacggcctccgacgtctcggtccgcctggtctgggagatcgcctccgacctcccacccggcacccgcgccgcccgcgaactcctcctcaaggacccgatccgccttaccgacgccgatcgcgaatccctgcaccgcttcctccgcgaccgcatcgaggccgccaaggccgacgacaccgccaccacctgggagcaacaactgtcccaggtcttcgactacacctcctggcatcgcttcgtggtcaaggtggaccgcggcaagggcaacggctggcagctactcaccaagaaactccacggcgccctctccggcggcgaaaaagccatcgccttacacctccccctcttcgccgccgtagccgctcactaccaatcggtccccaccgccgcccgcctcatcctcctcgacgaggtcttcgttggcgtagacaccaccaaccgaggccaaatcttcgccctcctctccgccctgga

SEQ ID NO: 51212 - DNA, 1224 bp, Nocardia seriolae; identical to SEQ ID NO: 50750

SEQ ID NO: 51213 - DNA, 1545 bp, Xanthomonas arboricola pv. juglandis
atgacgctcccagcaacagcccaagccgatctgtttcgccacgtcagtgcggaaaaggccgcgctgtatcgctgcgtcatggattgcttcgccgctgccaagcggcagttccggctgcatcttcgccccgacgaagtattggaagacggcgactggtcgacgttggtcagctcggctacgccccggatggaagaaatccaggcggcgctggcgcaattggccgaatggggcaacctcgaatcccagccggacaccgcccgtgtcgccagcatcagcgacttctatcgcgcgcgcttcgtctaccggctctcgctgggtggcgaggcggtggaagccgcgctagcagccttcagccgcgtgctgcgccggcgcgccgagttgcagagcgtcgcacttgaggacatcgccctgcgcctgaaggcgttgctggccctggccgacagcgccgaacccgatgccgtcaaggtgcacgaaaccctgcgcgacctagttcgcgtgtttgagagcttggccgacaacgctcaggccttcatggctggcgtcggccgcggcatcgaattgcagcaggccgacgccgcagccgtgctcgcatacaaaaagcggctgatcgactacttggagcgtttcatcggcgatctggtcgcgcgttccggcggcatcgcccagcacatcctctcgctgcagccgcgcatcgaatcgctgctgtggctggccgcccagcgccaggcccgcgacagcgcgccgggggacgaagcagagcaactcgatgcagtcacgcgcggctggcaggcctggcgcgaacgctggaccgggctgcgccgctggttcctagccaccggacacgcgcccgcgcagtccgaattgctgcgcgccaaggcacgcgcggcgatcccgcagctgctgtcagccgtggccacaatcaatgagcgccgcagcggacgcagcgaccgctctgcggacttccgcatgcttgcgggctggttcgcagcctgcgaggacgatgcccaggcccatcgcctggcgcgcgcagcattcgcgctcaacccggcccgccacttctcgttgaaccccgaactggcgtccggggcgcaggacttgcccgccagcacgccttgggccgacgcgccgccgttgcgcattcatccgcgcctgcgcgaatacggccaggcatcgccacgcggcgcactgccacgggtgcaggcgcgcgatgccgagcgccaattgctcgccgctcggctacacgaggaacatgcgcaaatcgaagccgctcgccagcgcctggccaacggccgcagcacgcgcctgtccgagttcggcacactcgacccgcatgccttcgccctgttcctcgggctgctgggcgaggcgctgaccgcgcaatcctcgcccgacgccgaggtggacgtgcccagcggcgacggcctgctgcgcatccgcatgcagccgctggccgcggacagccgggccagcatccacaccgccaccggcacgttcagcggccgcgaccacctgatcaccatcacccgcacggacgcagcaccatga

SEQ ID NO: 51214 - DNA, 1269 bp, Xanthomonas arboricola pv. juglandis
atgagccccagcgacagccgcgcgaacagccgcagcatcggccgccagcaggcccgccaccgcgacgacgaacgccgccaggcgctgcgcgccctgctgatgtcgccgctgatgaacccggcgcacgagggcttcgccgccgtgcgccgccacgccgacgagctacgcgcctggttcgcgcgcgagaccggctggacgctgcacatcgagcgcgactgcgcgcgcctgtacaagcggccggccgacctgcgcgacgccagccgcggcctgccgggttacgactacaggcgctacgtgctgctgtgcatggcctgcgcagtgctcgaacgcgccgacccgcagatcaccctgcgtgtcctcggcgagcggctgctgacgctggccgccgaccccgcgctggaatcgcgcggctttcgtttcaccctcagcgccgcgcacgagcgccgcgaactggtcgccgtctgccgcagcctgctggagatcggcgtgctgcagcgtgtcgccggcgacgaagaaggctacgtacgcagcagcggcgaggcggccgagggcgcggacgccttgtacgatgtgcgccgccgcgtactggctgcggtgctctcagcggtccgcggcccgtccacctggcccgccgagcaggccccggtggacctggacgcacgcctagcctcgctggtaaccgagcaccagcccgacagcgaggaaggccggcgcacggccctgcgccaccacctcgcacgccgcctgctagacgaccccgtggtctacctggataccctcgacgccgaattgcgcgcctatttcgtcaaccagcgcggcgcgatggccagccgcctgtgcgaggccaccggcctggtcgccgagcagcgtgccgaaggcctggctctggcggacgaggatgcagaactgaccgacatcgccatgcccgccgaaggcaccgaggcccatgccaccctgctggtcgccgagtttctgtcccggtcgcgggaaaccaccgatgcgatcaaccgcgacgacgtcatcgccttcctcgccaccgcccgtgaagcgcacggcagctactggcgcaaatcggcgcgcgaacccggtgccgaacgcgaactggccgacctggcacttgagcgcctgcagaaactgcaactcgcggcatgcgacgagacccacgtccagcccctgcccgcactggcgcgcttcgccctgggcgaggccgatatccgccagccagccgcgcccgcgaccgcggccgcccatccgtccctgttcgaatga

SEQ ID NO: 51215 - DNA, 4128 bp, Xanthomonas arboricola pv. juglandis
atgaccgacaccacctccccgtccttgcccatccccaccctcgcacgctggcagccactgcggctggggctggtcgagctgttccactacgacagcgaggagttctggttccgcgacggccacctgctgttgcgcggcaacaatggcaccggcaagtccaaggtgctctcgctgaccctgccgttcctgttcgacgcccagctcaagccctcgcgcatcgaacccgacggcgacgccagcaagaagatggcctggaacctgctgctgggccgcctcgaccgccgtatgggctatgcctggctggagctgggccggctcggcgccgacggccagccgcactacctctcgctgggctgcggactgctggcggtggccgcgcgcccccaggtcgacagctggttcttcgtgctcgaacagcagcgcatcggccaggacatctggctgatgagccccgcgcgtgcggtgctcacgcgcgagcgcctgcgcgacgcgctgcatgaccatgggcaggtgttcgataccgcgaccgcctaccggcgcgcggtcgatgagcgtctgttccacttggggccgcagcgctacaccgcgctgatggatacgctgatccagctgcgccagccgcagctctccaaaaagccggacgaggccaacctctctaacgcgctgaccgaagcactgccgccgatatccaccgacctgctggccgacgtcgccgacgccctgaaccagctcgaggaataccgccgagagctggaggagtacgaggccttggagcgcgccgtcggccagttcaaccagcgttaccagcgctacgccgccacccaggcccggcgccgtgcacgcagcctgcgcagcgcgcagaccggcttcgacaacgccagccgcgacctcaacgacggccgcctcgccctgggggccgcacgcgccgccgaaaccggagcgacacaggcgcaacagcgggcggaaaatgcgctggccggccaccgcagccggctcgacgagttgcagaacgacccggccatgaccgacgccaaagccctggacaaggcggcagccgacgccgagcggcagcaacgcgacgcgggcgccgcccgcactgaacgccagcgccgacagacccgcttcgagcaggaacagcaggccacacggcagcgcgcccagcgtgcagaggatgcgggccacgcactggccgaggcccgcacacaggccagcgcagcggccgaaaccgctggcctggtgtccaactacggcgccagcccgctggcccacggcgaggcggccaccctgacgccagcggcgctggcatcggcacagcaggacctgcgccacaccgctgccgcccgtcgcgaacaggtcgcccacctgcagcgtcgctgcgacgaagccgagcaggcggcccacgagcgggcacgcgcgcaggacttgcgcgacgaacgtgccgacgaggcagaggccgcggccgcccgccgcgaagaggccgacgcggccgtcgaaaggcaaggccagcacctgttcgaagcctggcaatcccatctggatgctgcgcagcagttgcaggtgcccgacagcggcgacgtcctcgaaacgctggccgcctggaccgcgagcctacacggcgacaaccccgcgcgcgccgccctgcaccgcgcccagcaggccgccagcctgcggctggcccagcgccaggccatgttgcagaccgaacaacaagccctggaacaagaacaagccacgctgcacgcggagcgcacgcgcctgcaatccggcgaagacgccctgcccccgccaccggcatggcgcgcgcccagcgcgcgcgaaggtcggggcggcgcgccgctgtggcaactggtcgaattcgcgccggcagtgccggccgatctgcagcccggcctcgaagccgcactgcaagcctcgggtctgctcgacgcctgggtgacgcccgacggacagttgctggatgctggcggcgcgccgctgccgcacgatgcccagtggcttggccggccagcgcgcccggattcgctggccgcgtggctacagccggcgcccccggccgaggccacgccgatggtcgcccccgccgtgctgcaacgcctgttcgaaggcgtcgcctgcggcgagcaggacgacccgggcgccgaagcctggatcggacccggcggccgcttccggctgggcgcattggccggcgcctggcacaagccccgcgccgagttcatcggttacgcggcacgcgctgccgcccgcgcgcgccgcctggccgagatcgcccagcgactggaggaactcgacctagcgcatgcgcagctgcaggccggctccgcccaactcgctgccgatcagcgccaggctgccagcgaatggcagtccgcgcccaccgacgacaccctgcgcgccgcgcacctgcaagccagcacgcgcgtgcgcgagctcgatgcggccaggctgcgcctggaccaggccgagcacgccctgcgcagtgccatccagcaatgggaagcggccagccagaccctggaacaggacgcccgggatcttgcgctgccgccagcgcgcgacgccctgcacaccatcgatcgggcgctgctcgccttcggcgatcggctgcatgcgctgaccagtgccgcgcgcgcctgccacgacgccttggccgaacaccgccaacaagtcgaacgcgaacagcaagcacggaccgatgccgaacacgcgaccgagcaagcggccgaacgcgacctcctggccgaagaagcccgtatccgcctgcagacgctgcgtgaatccgtcggcgccaaggtcgaagaactgcagcagcgcatccgcgatgcccgacaggccgtcagcagtgcagatctggaactcaagtcgagcaacgaagcgcttcgccttgcaggcgaaacgcgggcccgggccgaacagaaggtcgaggcggccgacgccatcctgagcgagcgcatcgcctcgcgccagcaagccatcgagcactggcagggcttcgccgccaccggcctgctcgaaatcgcactgcccgatgccgaactgccgccgcaggccgcgccctggaccatcgaacccgccctggccctggcacgccgcgccgaacaggcgctgctgcaggtcaaggacgacgacgacgcctggaaccgcgtgcagaaccaggtgtcgcaggactacaccgaactcggccgcgcgctggccgcgctcagccaccgcgcccaggccgaaaccagcgatttcggcctgatcgtcagcatcgtctaccagaaccggcccgagcgccccgaccaactgggcacgcgcctggcaagcgaaatcgcgcagcgccgggaactgctaaccgccggcgaacgcgaggtgctggagaaccacctgcaggctgaaatcgccagcgccatccacaagctgctgcgcgacgccgagcaacaggtgctggcgatcaacgcagaactggccaagcgtccgacctccaccggcgtgcgcttccggctgctgtgggagaccctgcccgaaagcggcgagggcggcgccccggtcggcctcaaggccgcccgccagcgcctgctcaacaccagcaccgatctgtggagcgccgaggaccgccgcgtggtcggcgaaatgctgcaacagcgcatcgccgccgagcgcagccgcgccgacgccgaccagggcggcagcctgcacgaacaactggcgcgcgcactcgactatcgccgctggcaccgtttccgcgtccagcgctgggatggacaatggcgcccgttgtccggcccggcctccagcggcgaacgcgccctgggcctgaccgtaccgctgttcgccgccgtctccagctactactcccaggccggccacgcgcatgcgccgcgactggtcctgctcgatgaggtcttcgccggcatcgatgacgccgcacgccatcactgctgggcgctgatccgcgaattcgacctcgacttcgtggtcaccagcgaacgcgaatgggcctgctcggccgagttgcccggggtggctatcgcccaattgcaacgccacgaaggcatagacgccgtgcacgtctcgcgctggacctgggacggcctcgccaagcgccaggaacccgaccccgatcgccgattcccgcctgccgcctga

SEQ ID NO: 51216 - DNA, 1299 bp, Xanthomonas arboricola pv. juglandis
atgcgcgccgacgccacgctcccctccgatccgcgcttgcaacgcctgctgggcgacgatgccctcgccccactgcgccagcggctgcgccgatacttcgagcgcatcggccccaatgccaccgcatcgacactgcggctggaccgactcgcccccgacgcgcaccaagcgctctgccagatgaccggcagacccttacgacccgcgcgctcgatcaccctggacatccgccaactggacacggcattgcgcgaagccggcctagcgaactcactgcgcgacgcgctggaacgcctagacggtcccatcgtcgacaagacgcggcagcgcctggaactgcaggcacgctgggccgccgcgaccgactcgatcgatgcgtgcccgctgctgcaggattggttgaacacatcgtcagccccgccgctgctcaagcgcctgagtcgtgccccggaaaatgccatgccattattgaacgccgccgacagcgtgctgcgcgctcttccagcgcaggggcaaccccgcgcacaattggcagccagcctgctcggcgacgcccatgccctcgacgctgggcgaccggtggccaccctcgtactcgccgcttggcggcattacgagcggcaacacccaacaaaccacgaaaccggggaggatccagaagatgctccaaagggagaaggcacggaggagcgtcaacgcgacatctgggcacgtgctggcatcctggtcaacgaattggccaggcccgcactcttcctcaatttgccggtggccacctcccaaggagcgctagggcatccaggcgaaccgtcgtacatttcgctgcggcaattacttcgagccagcaagatctggtccgtcgccgatcgcgtcgtccatgtctgcgagaaccccaacgtcctcgccatcgcagccgatcagttgggcgccagctgcgctccactggtctgcacggatggcatgccatcggctgcgcaacgtatcctgctagatcaattgcaggccgccggcgcaaagctgctctatcacggagacttcgattggcccggcatcggcatcgcgaacttcgtgatccgcacctggaatgcaaatccttggcgaatgagcacccaagattacgaagctgccgctagttccaccacacgcgtgaggcatgaacttggtgccatacctgtcaacgccgactgggatattcatctcgcaaccgcaatgcagaactgtggcactgccatcgcagaggaagccgtagcgaccattctgattgaggatctacgcataccgggtccggcagaaaactga

SEQ ID NO: 51217 - DNA, 1515 bp, Acetobacterium bakii
atgaagtttgaaatcaccggtaaactgacaaaacagatcgatgaaatgcgttatttgacggttgataatgcctggcgataccgaagcattttgcggtacttttatatgcagtatgaaaagatgaagtattggctatataaggaagacatctttgaggccctaaaggaaaatgacgaatttaaggcctataccatggatatgtgcagacaggatctggatgtactgctatcctggaaaaatctgtcagccatccaggatactgccaaggttgccacggtggaggaattcaagaacaagcagttccgatatcagctgtctgaatatagtgtcgaaattgaacggttgaccctccggctggaaaatctctttgtggaatcggcctccttggaacccaccctgctggaacggctccgggaagagcttaaaaagttgcctcaggtggcaaaacagggtgaaaaagaagtgggcagctggtggagtagtctcaacagcgactttaaacggctgaaccagaactatcaggattatattcgtgatctgtattccatcaaggccgaggaaatgatgaaaacaaaggaattcatgatttttaaggacaaattcattgaatatcttcgtgattttgtaaaagggctacagaaccatgccaatgccatagaacatatcttaaaaaatcttaatgcggcagacatcgatagggtgcttaaaaaagccatcgcctatgaggtgtccattcctagaattgatgcggagattgacgaagttgggatcagtgaaaatatagtcgggcggtgggacagccttaatgcctggtttttgggatcaaagggaaacgagagcgaagccgccaaactgatggatatcaccaacgatattatcagaaagataacccgttacgcctctcaaatctcagaaagcagaaacaatgccattaaccggaaggaagaatatcgcaagctggcagaactttttgaccagtgccgcgatataaaggaagcccatcaattatccagcatgtcctttggtatttttcagatgaaacatatcaaatccgatcatttcagagaaacagagagcattaatagccagatctttgaagagtcaccgggtgtcttggccctgaagcccagggtccggggctatcaggaaaaggcccaacggaccaccatccgcagcaaccgcgagaaaaaagaggcaatgagaaaccggatccgactggagcggcagatcgaagaaaagaccatggaaaactatgtcattgactactgcatcgactttgccagtcttccggtgattgagcggcatgtccggacgactttattgaaatggttgagcaaaggcattggagcagataaaaaaggcaaaaccgaggatggccgggtgtttcaggtggagctgccaaaggaacgaaatcgtcgctgtgtattgcggtgtgaggatggaaatctggaaatgcccgcctatgtgattcggtttttagataatacgaaggagtcggaaaatgaaagagcttga

SEQ ID NO: 51218 - DNA, 1146 bp, Acetobacterium bakii
atgaaagagcttgaaatactcctggatcaatactgggtggtgaaggataacgacaaggatttattttatcgggttaaggatagcattccccaatttaaaacatttctcagcgataagctgggttatgggattgttatcaaccagcatttaatcaagctggagaaaattcccggttcggccgaaagctttatggggattcaggaattcaatcatcccatgcaatacatacttttgtgtctgctcttgatgtttctggaagatcgttcccgggatgaacagtttgtgctgtcggaaattaccgaattcattgccgggaataatatcggcaaagaaaaaatcgactggactcagtacagccatcggaagcattttatcaaggtattgcgctttgcccagcgccttggtttaatgaaggtcaatgatggggatgatcagaagtttgcctatcacgatgacgccgaggttttatatgaaagcaccggtttatcccggtattttgtgcgccattttacggcggatatcatgggttttgccaattatcaggatatcgaaaatgccgaatggggggacttgaacgccgaccggggcgttatccggcggcagcgggtttaccggaagcttttgatggaaccggtggtttattctcagggggctgatgatgtggattatgactacatcaaaaaacaacggggactgatggaaggcgattttttgaaatatctggaataccctcttcatgttcataagaatggggccatgctggtggtgccggccgaaaaaaatattcaggacggatttcccaacactagggccatctgtgatatcacccttttgttggttgcccagatgcgggaggcgcttgctgaaaaaaagctgaaaatcaatccaaccggcggggtttccctatcccgggtggcctttgatgaatgggtagtcgagctgaaggcaaaagcaggcaggaactggagtaaggagtttcgggaaatgtcagccgccgggctggctgcaaatctggcagaatatatggaagacttcaagatgctgcggcagctttatgacggtcgggaaattgagatcctgccactggcgggaaaactcatgggaacctatccggaggatatggctgagagaaagggagaaaaataa

SEQ ID NO: 51219 - DNA, 4086 bp, Acetobacterium bakii
atggacaatcgatgggtgatcaaccgggccggtctggtgaatttctggtattatgatgaggaaacctttgatttttctcagggacggctgctcctgcgcggctccaatggatcgggtaaatcggtgacgatgcagagctttattccgcttttgctggatggcaataaaagtccggagcggctggatccgttcggatcaaaagcccgaaaaatagaaaactatattctgggagatgacgaaaacggaaaggacgaatccatcggctatctttttatggaattcaaaaagaagcactccaacaatagggccaccatcggcatggggtttaaggcaaatcggggcaagccgatgaaatcctgggggttctccatcaccgatggcagacgcattggcgaagacttctttttatataaacaaatgggtgaaaaaataccgttgaccaggaaggaactggaaaaccggatcggcgacggcggtcaggtagtcgagggacaaaaaaactatatgaagctggtaaacgatctggtttttggctttgatgatctggacgaatacgatgagctggttaaattgctggtacagcttcgcagtcccaagttgtccaaggatttcaaaccaacggttatttatgagattatggaaaattcgctgcagcccctgtccgaggacgatctcagaccgatgtccgaagccattgaaaacatggataacatcaagagccgactcgaggttctaaaggactgcaagggcgccgcggatcggattaggcaagcctttgaccggtacaatcaatttattgtactggataaggcccgacagttttatgatcaccacctccggttggagcagcaaaaaaacctgaagaataaaaaaaccagggaaattgacaaagccggaaaagagattgccagcctgaaagaaaaaatcataaagctggaaatcgttctgcagacccagcaggaaaaaaagcgggaactggaaagccatgacagcgtgaagatccgggaaaagatcatgcaaactgaaaaagaaatccaggaactggcgacacagcggtttgaaaaggataatcagcatgagaccaaaaggcagcaggaacgggatctggacaatcaggtaagcggttaccgtcagaatattgaagccggggaacgcggtatcatcaagcagcttactgaaatggatgatctggccgagacttttgtctttgatgagcatgatttcatgcgggatgaagtcaaaaaagatgtgactgagccctttgatttcggttatgttacgacgatcttaaagaagcataccgagatccttagtcaggcggttaaagctctggaaaaagaaaagcagatttcagaagcctatgaaaaatgtgtgatggaactggatttacttaaaaaagaactcgccgaaaaagaacgactgcgggaacaggccaatcgccaaatgacggaaatccaggatgaaatgctggaaaagctgtatcagaaaaatcaggacaaccaggaatatattatttcagttgatggtttaagtcagctcgctcgggtaatccgccaatttggaccggaaagcaattttaacgacatagcccagattcttcggggcgaacagatcgggttggaagaactaaaacgggaacgacttttcattgaacaatctgaatgggcaaaaataaataaggagaaaagtgaaaagcaagccgaacttgattactggaaaaagatgaaggatccagaacccgcccgggccgaaaaagtcaaaaaaaacagagaaaagctggtggcactgggcattccccatattcccctgtacaaggcactggattatgtggacggggttgatgcggccacccaggcggccattgaagaagccatggccgatatgggtatattggatgccctgatcattcctgagacttttcgggggcaactgggatcaatgcctgagctgtccggagataaatacatatttccggctccccagtttatggttcacagcatgaaccaatatctgcaggtggaaacgtccctggcagagatttcgccggaagaggtagccaatgtattgaccagcattctcattgatgaaaaccaccatacgcatatggatgaaaaaggaaattacagcctggggattttaagaggaaaggccagtggcagggatacgccgaaattcattggctcttcggcccgaaaaaagtatcgggaagaacagcagaaagccctggaattggaattggcagccattacggatcgcctgattggccaggaaaaagtcctgaatcaagtaaagcaggaaattgagatcttgaaacgggagtttaccgaaggcttgaatcaggaagatctggtaacggcggccaacgttgtcaaacaggcgatgtttgagcatgtgatggtctcaaaagcagtggcaaagaaaagcggtgaagaaaaaatcctttacgaagcagtgaagaaaataaaggaagagatttaccgcatcaccgggagaatcaccctgccggtgaatctggaaacctatgaggaggcccagattgcggctacgacgtaccttgatgagctccataagctggaaaaacaaaagcttcatttagacaatttccaaatcagtttgaggggagccgaaaaccggtatgaggaagtgcttcaagaaatcgatgatgtactttatgagatcagcggactgaacaccaaacgcgccaccctggcattgatactgaccaatttgagtgaacagttaaagctcaccgattatgaggctattaaggccgaactggagcaatgcctgctggcattaaaggaactccctcaagaaaaagaagaaactgtgatacagttggaaagggtgcgtttgggatccgaacggctgacagaggatattggcaatctggagcagacacttaaacaacatgaaaaaatctattcaattatgaaagaagcgtttaaagaagaactgcagctgggatatgcagttaaatcagtgaaagacgatttgtttagcgtggctggggatctcctcgcaaaaaatccagttagggataaacaaaacaaagaccaggtcaccaccaggatcgtcgaaaatttaaatagtaatagtcagtatctccgggatttttcggtgaacagtcagtatattttcgaaaaagagtggagcgaggatgaagacgaggcagtggaaaaagcccatgagatcagaagacgtctgaatatcacggccaaggtcactggcaaggtggtcaatttttacgacttgtccgattatctgaaagacagtctggaggaaaccgaaaagcttttaagagaaagtgatcgggaattgtttgaagacattctggttaagaatatcagtaaaaaaataagcgcccggatttttcacagtgaaaaatgggtggataatatgaatcagctgatggcgaaaatggatacctccatggggcttagcttcagtctgcgctggaccaataaaaaggccgaaaccgaagaacagctggacacccgaaaactggtgaacctgcttaaaatggatggtaatctattaagggatgaagacctcaacgccctgtcagaacactttcgttcaaaaatcacgttagccagacgagccctggaggagaaggatgttaatctgaccttccattccattgtgaaggatatactggattatcgaaaatggtttgaatttaaactgttctttaaaaaaaccggtcatctcagcaaagaacttaccaacaacggcttttttaaattcagtggcggggaaaaggccatggctatgtatgtgcccttattttcggcggtcaatgcccggtacgaggcggctggaaaagaaagtgcccggattctttctctggatgaggcctttgccggagtggatgaacagaatattcgggatatgttccggctgctgaatgatctggatttaagctatattattaattcccaaatcctttggggcgattatgacaccgtcgattccctggccatcagtgaactgatccggccggataacgcagattttgtgacggtcctgagatatcactggaatggcaaggtacgaaagctggtggtggatgatgcctcatga

SEQ ID NO: 51220 - DNA, 1275 bp, Acetobacterium bakii
atgcctcatgagtttgccgcttatctgaaagccaatcccggctatcaccgaatcatgaaacagattggcgaaaaatatgaatccctgggccatctgggcggcaccatccggttggataaaatgaccgatgcggagcgggaggtactcagaagtcttttcaaaaaaaactatctccagaaaagtgcctcctttgcagttgaaaaatttatcagtgcctttgcagccacccgctatgaaggcgtggactttgaagaaatgctggccagttattttggcgaaaagctgagctggaaaaaggatgttaaaagtcagtatgatgacgaaaaaagccggtgctttggggaaattattgaggtctttaaagaatctcccggagcattatggctgacggatcttctgaaaaatagaaataatgcctatccaatcctgagtatgaaatacaacgaggacccagagcatttaagacgacttctgacccaggtttgcataggtttgaatcaatgcgtggcaaaaccgcagaaggttcggctggcactctttgcctctcagatgaccagagatccccatgcctttgacatgaatcgggaggggggacgactattgctttacgctttaagcgcttattatcggcttaattatcccaaaaatgcggaagcacagatggagcttttatacaaagccggtttgatttatgatgaggtttccaattacaccatcggtcgaggtctccaggcgtttgccggggataaaatacattcgggctgggttggatttgctgaattgggcgagcctctgcacctttcgctctggaatatcgggatgatcgacagggtggcctgcgtcaaaaatcgggtctttgtctttgaaaatcccacggttttcagtgaaattgcgggtctgatggaagaccgaccctgttccctgatctgttcagtcggaaacgtaaaggtggcaaccctattgctgctggataaaattgttcaaagcggcgggatgatttattatggcggcgacttcgatccggaggggctgattattgctgataaactcaaaaaaagatacggcgaaaaattggttttgtggcattttaccccggaagactatgaaaggataaagtcaaaaaagaagatttctgaatcaagattaaaaaaaatggatggactgctgtcgccggaattaaaaaagctggcaaaagtaatcaggagctccggcttcagcgcctaccaggaattactggtcgatgtttatctaaatgatattgaaaaacttaattaa

SEQ ID NO: 51221 - DNA, 1545 bp, Xanthomonas campestris; identical to SEQ ID NO: 51213

SEQ ID NO: 51222 - DNA, 1269 bp, Xanthomonas campestris; identical to SEQ ID NO: 51214

SEQ ID NO: 51223 - DNA, 4128 bp, Xanthomonas campestris; identical to SEQ ID NO: 51215

SEQ ID NO: 51224 - DNA, 1299 bp, Xanthomonas campestris; identical to SEQ ID NO: 51216

SEQ ID NO: 51225 - DNA, 1545 bp, Xanthomonas campestris; identical to SEQ ID NO: 51213

SEQ ID NO: 51226 - DNA, 1269 bp, Xanthomonas campestris; identical to SEQ ID NO: 51214

SEQ ID NO: 51227 - DNA, 4128 bp, Xanthomonas campestris; identical to SEQ ID NO: 51215

SEQ ID NO: 51228 - DNA, 1299 bp, Xanthomonas campestris; identical to SEQ ID NO: 51216

SEQ ID NO: 51229 - DNA, 1545 bp, Xanthomonas campestris; identical to SEQ ID NO: 51213

SEQ ID NO: 51230 - DNA, 1269 bp, Xanthomonas campestris; identical to SEQ ID NO: 51214

SEQ ID NO: 51231 - DNA, 4128 bp, Xanthomonas campestris; identical to SEQ ID NO: 51215

SEQ ID NO: 51232 - DNA, 1299 bp, Xanthomonas campestris; identical to SEQ ID NO: 51216

SEQ ID NO: 51233 - DNA, 1545 bp, Xanthomonas campestris; identical to SEQ ID NO: 51213

SEQ ID NO: 51234 - DNA, 1269 bp, Xanthomonas campestris; identical to SEQ ID NO: 51214

SEQ ID NO: 51235 - DNA, 4128 bp, Xanthomonas campestris; identical to SEQ ID NO: 51215

SEQ ID NO: 51236 - DNA, 1299 bp, Xanthomonas campestris; identical to SEQ ID NO: 51216

SEQ ID NO: 51237 - DNA, 1545 bp, Xanthomonas campestris; identical to SEQ ID NO: 51213

SEQ ID NO: 51238 - DNA, 1269 bp, Xanthomonas campestris; identical to SEQ ID NO: 51214

SEQ ID NO: 51239 - DNA, 4128 bp, Xanthomonas campestris; identical to SEQ ID NO: 51215

SEQ ID NO: 51240 - DNA, 1299 bp, Xanthomonas campestris; identical to SEQ ID NO: 51216

SEQ ID NO: 51241 - DNA, 1545 bp, Xanthomonas campestris; identical to SEQ ID NO: 51213

SEQ ID NO: 51242 - DNA, 1269 bp, Xanthomonas campestris; identical to SEQ ID NO: 51214

SEQ ID NO: 51243 - DNA, 4128 bp, Xanthomonas campestris; identical to SEQ ID NO: 51215

SEQ ID NO: 51244 - DNA, 1299 bp, Xanthomonas campestris; identical to SEQ ID NO: 51216

SEQ ID NO: 51245 - DNA, 1545 bp, Xanthomonas campestris; identical to SEQ ID NO: 51213

SEQ ID NO: 51246 - DNA, 1269 bp, Xanthomonas campestris; identical to SEQ ID NO: 51214

SEQ ID NO: 51247 - DNA, 4128 bp, Xanthomonas campestris; identical to SEQ ID NO: 51215

SEQ ID NO: 51248 - DNA, 1299 bp, Xanthomonas campestris; identical to SEQ ID NO: 51216

SEQ ID NO: 51249 - DNA, 1545 bp, Xanthomonas campestris; identical to SEQ ID NO: 51213

SEQ ID NO: 51250 - DNA, 1269 bp, Xanthomonas campestris; identical to SEQ ID NO: 51214

SEQ ID NO: 51251 - DNA, 4128 bp, Xanthomonas campestris; identical to SEQ ID NO: 51215

SEQ ID NO: 51252 - DNA, 1299 bp, Xanthomonas campestris; identical to SEQ ID NO: 51216

SEQ ID NO: 51253 - DNA, 1545 bp, Xanthomonas campestris; identical to SEQ ID NO: 51213

SEQ ID NO: 51254 - DNA, 1269 bp, Xanthomonas campestris; identical to SEQ ID NO: 51214

SEQ ID NO: 51255 - DNA, 4128 bp, Xanthomonas campestris; identical to SEQ ID NO: 51215

SEQ ID NO: 51256 - DNA, 1299 bp, Xanthomonas campestris; identical to SEQ ID NO: 51216

SEQ ID NO: 51257 - DNA, 1545 bp, Xanthomonas campestris; identical to SEQ ID NO: 51213

SEQ ID NO: 51258 - DNA, 1269 bp, Xanthomonas campestris; identical to SEQ ID NO: 51214

SEQ ID NO: 51259 - DNA, 4128 bp, Xanthomonas campestris; identical to SEQ ID NO: 51215

SEQ ID NO: 51260 - DNA, 1299 bp, Xanthomonas campestris; identical to SEQ ID NO: 51216

SEQ ID NO: 51261 - DNA, 1545 bp, Xanthomonas campestris; identical to SEQ ID NO: 51213

SEQ ID NO: 51262 - DNA, 1269 bp, Xanthomonas campestris; identical to SEQ ID NO: 51214

SEQ ID NO: 51263 - DNA, 4128 bp, Xanthomonas campestris; identical to SEQ ID NO: 51215

SEQ ID NO: 51264 - DNA, 1299 bp, Xanthomonas campestris; identical to SEQ ID NO: 51216

SEQ ID NO: 51265 - DNA, 1545 bp, Xanthomonas campestris; identical to SEQ ID NO: 51213

SEQ ID NO: 51266 - DNA, 1269 bp, Xanthomonas campestris; identical to SEQ ID NO: 51214

SEQ ID NO: 51267 - DNA, 4128 bp, Xanthomonas campestris; identical to SEQ ID NO: 51215

SEQ ID NO: 51268 - DNA, 1299 bp, Xanthomonas campestris; identical to SEQ ID NO: 51216

SEQ ID NO: 51269 - DNA, 1545 bp, Xanthomonas campestris; identical to SEQ ID NO: 51213

SEQ ID NO: 51270 - DNA, 1269 bp, Xanthomonas campestris; identical to SEQ ID NO: 51214

SEQ ID NO: 51271 - DNA, 4128 bp, Xanthomonas campestris; identical to SEQ ID NO: 51215

SEQ ID NO: 51272 - DNA, 1299 bp, Xanthomonas campestris; identical to SEQ ID NO: 51216

SEQ ID NO: 51273 - DNA, 1554 bp, Ralstonia solanacearum
atgcacgacataaaactccaaagggatacgccagccgatctgttccgccacatcagcgctgaaaaggctgtgctttatcgttgcgtgatggactgcttcgccgcagccaagcgccagttccggctgcacctgcgccccgatgagattttgaatgaaggcaattgggatcggataccggaacatgcccaaccacgtatcgaagaagtccaggcggcgctcgcgcaactgaccgaatggggcaacctcgaatcgcagccggatacgacgcgggtggccagcatcagtgacttttaccgtgcgcgtttcctgtatcggctgtcgcagggtggcgaggcagtggaagcagcgctgacgaccttcgagcgcacgctacgtcgccgggcggaactgcagaccgtagcgctggaagatatctcgaaccgcctgcaaaccctgttgtccttggcggatagcgccaacccggatgcggcgaagatacacgagacactgcgcgatctcgtccgcgtgttcgaaagccttgccgacaacgcccaagctttcatggccggcatcggacgcagcattgaactacagcaggccgaggtcacagcggtgctggcctacaagaagcgactgatcgattacctagagcgtttcatcggcgacctggtggggcgctccggcgacatcgctcaacgcctcgtggcgctgtcccctcgcgtcgactccctcctctggctggccgcacagcgcgaagcgcgggacagtgcgccagacgacgatccagaacaactcgacgccgtggcacgcggctggcaagcgtggcgcgaacgctggaaagggctgcgcggctggttcgtgacgaccggccatgaacctccgcaagccgaactgctacgctcgaaggcacgcgcagcaatcccgcagctgttgacggccgtgtcggcgctcaacgagcggcgcagcggccgtagcgaccgctcggccgacttccgcatgctggcgggctggtttgccgcctgcgaagacgattcgcaagcccaccgcctggcacgcgccgccttcgcgctcaacccggcgcgccacttttcgctcaaccccgcgctggcgcccggtgtgcaggatctgcccgccagcacgccctgggccgaagcaccaccgctgcgcatccacccacgcctgcgcgaatacggtgaagccgcgccgcgcggcgctctgccccgtgtgcaagcccgcgacgaacagcgacgcctgttggccgcgcaactggaacaagagcacgcagagatcgaagccgcccgcttgcgcctggccaccggccgcgccacgctgctgtccgaacttggcgcccttggcacgcatgacttcgcgctgttcctgaaactgctgggagaagcactgaccgcgcagatgtcgcccgacgcaccggtggaaacgcaaagcggcgacggtctcctgcacatccggttgcagccgctggccagtggcacccaggccatgatcacgacgcccacgggcgtgttccgcggacgcgaccacactgtcaccatcacgcgaatggaagacctgccatga

SEQ ID NO: 51274 - DNA, 1251 bp, Ralstonia solanacearum
atgagcaatgacagccacgacatcggccgccagcaagcgcgacaccgtgatgacgaacgcactcaggccctgcgcgcgctgctgatgactccactgatgaccccggcccacgagagcttcgccgccgtgcgccgccacgccgatgaactgcgcgcctggttcgcgcgcgaaaccggctggacactgcacatcgagcgtgactgcgcgcgtctgtacaagcgtcccgccgacctgcaggacgccagccgcggcctgcccggctacgaacgccggcgctacgtgctgctgtgcctggcctgcgcggtactggaacgcgccgacccgcaaatcacgcttcgcgtgctgggcgatcggctgctggcgctggcagcagatccggcgctggcctcgcgcaacttccacttcacgctcggcgccgcgcatgagaggcgtgaactggttgccgtctgccgcagcctggtggagctgggtgtactgcagcgcatcgcaggcgatgaagaaagcttcgtgcgcagcacgggcgacgctgcggatagcggcgatgcactgtacgacgtgcgccgccgcgtactcgccggcttgctggcggcggtgcgcggcccgtccacgtggcctgcggaacagacccctgtgagcctggacgaacgcctggcatcgttggtggccgagcacatgcccgacagcgacgacgggctacgtactgccctgcgccatgatctcgcacgccggctgctggacaacccggtggtctacctgaacacgctggacgccgagttgcgcgcctactttgtcaatcagcgcggcgccatggcgacccgcctgtgcgatgccaccggtctcgtggccgagcagcgcgccgaaggtctggccctggtggacgaagacggcgagttgaccgatgtcgcgatgcctgctgagggtacggaagcccacgccacgctgctggtggccgaattcctggccggccgcagccgtgccgatgcgcaggcgcccaccacgctggacgagatcaccgcctttctggccgacgccagaacgcgttatggcagctactggcgcaaatcggcgcgcgagcccggagccgagcgcgagttgacgactgttgcgctggaacgcctgctcaagctgcaactcgtggcacgcatggccgaccggattcagccgctaccggcactggcccgcttcgcgctcggcgagaccgacatccgcgcgccgatccgctcggcaacccaatccaacttgttcgaatga

SEQ ID NO: 51275 - DNA, 4131 bp, Ralstonia solanacearum
atgaccgatacgcgatcccctgcactgcccatcccgaccctcacccgttggcagccgctgcgactggggctggtcgagcttttccactatgacagcgaagaattctggttccgcgacggccgcctgctgctgcggggcaacaacggcaccggcaagtcgaaagtgctgtcgctgaccttgccttttcttttcgatgcgtacctcaagccgtcgcgcatcgagcccgacggcgatgccagcaaaaagatggcctggaatctgctgctgggtcgccacgagcggcgcataggctacgcttgggtggaattcggccgcgtggacgaggatggaaggcatcactatctcacgctgggcagcgggctctctgccgtggccgcgcgtgggcaggtggacacctggtttttcatgctggacgagcggcgtatcaatcaggacttttggctcatgagcccaacccgggtggtgctcacacgcgaccgcttgcgcgaagctctacaggattgcggacaatttttcgacaccgccgccccctatcgccgcgccgtggatgaacggctgttccgcctgggttcgactcgatacgctgccctgatcgatacgctgatccagctacgccagccacaattgtccaaaaagcccgacgaggccagcctgtcgaacgcgctcaccgaggccctgcccccgatctccaacgacctgttggccgatgttgccgatgcactgaaccagttggaggaataccgtcgagagttggaggagtacgaggcgctggagcgtgccgtcggccagttcaaccaacgctaccaacgctatgccgccacgcaggcccggcgtcaggcccgcaatttgcgcaccgctcaaaccggattcgacaacgccagccgcgaattgaacgccgcgcgcgaggcgctggagacgacccaagccgaagagcagcacgccgatcaggcatggcgacaggccgacactgtgctgaccaccaaccgcacccgcctcgaggaactgcagaacgaccctgcgatggccgatgccaagacgctggagaaggccgacgccgattcccggcagcgccgcaaggaagccaataccgcgcggcagacgtgctatgacatgcaaacccgcctggagcgcgagcggcaagccacgcgcacgcgcgcccagcgcgccgagcacgccggccgcgcgctcgccgagtcgcgcgaagatgcggtgcaggccgccgagcgcgcaggccttgcgcctgcctactcagccaacccattggcctgtgccgacgcccatacgctgcagccgctggcgctggacaccgcacgccaagacctgcgccgcgccagtatcgagcgacgcgagcaggtggcactgctgctgcgccgctgcgacgaaaccgaccacgcggaacaaacccacgcgcgcgcgcagacccagcacgacgaacgtgccgacgaggcggaaaccgctgccgcacagcgcgaagaggccgatactgccgtcgatcggcagggccatacactgctcgacgcgtggcagcgctatctcgacggtctgcggcagctacattgccccgatggcgccgacgcactggaagcgctggcaccctggaccgtcagcctgcagggcgataacccggcccgcaccgcgctgcaccgcgcccagcaggccgcaagcctgcgtctggcgcgacgccaggccgcactgcaaaacgatcgccatgcgctggaacaggaacgcgacaccctgcgcgacgaacgcgcgcgtcttgaacagggtgaagacaccatgccgcagcccccgcactggcgcgcgcccgacatacgtgccgtccgcgcaggcgcaccgctgtggcaattggtggacttccgccccggcacgcccgcagccgactgcgccggcctcgaagccgcgctgcaagcctcgggcctgctcgacgcttgggtgacgcccaacggcatgctgcaagatagcgacggaggtcatgcgcaactgccgcacgacgcgcaatggctcacccgcgaacgccagccgcagtcgctggccgcctggctacgccccacggaagcggcgagcgacgccccgccccgggtcgatcccaccgtggtgcagcgactgctcgagggcgtggcgtgcggcgcagaggacaatcccgccgccgaggcctggatcgcgcctaccgggcgcttccggctcggcgcgttggccggcgtatggcataagcccggcgccgagttcatcggctacgcggcacgctgtgcggcccgcgagcgccggcagcacgaaatcgacgcacgcctggaagcaatcgacgccgccctcacgttgctggcacaagattttgcccaactcgatgccgatcagcgcgaagccgccgacgaatggcaatgcgccccatctgacgacagcctgcgcgccgcacacgtcgaagctgtatcgcgtgcacgcgaattcgacatggcccggcagcgcctggagcacacggatcggctactgcgcgctgcggccgagcaatgggagcaggctcgcacaatcctggaacgcgatgccgaggatctgacgttgccgcccgcgcgcgatgccttgcgggccatcgaccaagcgctgcagatgtttggagactgcctgcacacgctagccgtcgtcgtgcgggagctgcgcgacgcccagaccgaacacgccgagcagttgcagcgtgagcaacaggcggagtccgatgcccggcatgccctcgagcaatccgccgagcgcgaggccctggccgacgaagctggcatccgcttggaaacgctgcgcgcatccgtcggcgccagggtggaagagctgcaacggcgcctcagcgacgctcggggcgccgtcacgagcggcgagaccgaactcaggcaacggaacgacgcccggcgcttggccggcgaagcgcgcgcccgggccgagcaaaaggccgaggcagccgacgccacgcttgtcgaacgcacagccgcacgccagcacgccgtgggacagttgcagggcttttccgccaccggtctgctggtcacggccctgcccgatgccgagctgccgtccatgcacgcgccctggaccatcgagccggcactggcgctggcgcgacgtaccgaacaggcactgctccacgtcaaggacgacgatgaagcctggaaccgcgtgcaaaaccaagtctcgcaggattacaccgaactcggtcgcgcactcgccgcgctgagccaccaggcccaggccgaaacaaacgacttcggcctagtcgtcagcatcatctaccaaaaccgcccggaacgtcctgaccagttgagtgcgcgcctggccggagaaatttcccagcgccgagaactcctcacggccggcgaacgtcaggtgctcgagaaccatctgcaggcagagatcgccagcgcagtgcaaaagctgctgcgcgatgccgaacgtcaagtcaaggccatcaacgatgaattggacaagcgccccacctccaccggcgtgcgcttccgtctgcaatgggaaaccctgcccgaaggtgctgatggcgcaccggtgggcctcgaggccgcacgccgccgcttgctcaacaccagcacggatctctggagcgccgaagaccgtcgggtggtcggcgaaatgctgcagcagcgcgtcgccgcggaacgcagccgcgccgatgcagaccagggcggcagcctgctggatcagttggcccgcgcgctggactaccggcgttggcatcgcttccgcgtgcaacgctgggacggccaatggcgcccgctgtccggtcctgcctccagcggcgaacgcgcgttgggcctgacggtgccgctattcgccgccgtctccagctactacacgcaggaaagctacgcccatgcaccacgtctcgtattgctggacgaggtttttgccggcatcgacgacgcggcgcgcgcgcactgctgggcgctgatccgcgaattcgatctggacttcgtggtaaccagcgagcgcgaatgggcctgttccgccgaactgcccggcgtagccatcgcgcaactgcagcgccacgaaggcatcgacgccgtacatgtctcgcgctggacctgggacgggcgaaaccggcggcgcgaagacgacccgaaccggaggttccccaacgcatga

SEQ ID NO: 51276 - DNA, 1554 bp, Streptomyces resistomycificus
atgcgcagggttccaccggagatgttccggttcacgaccgtggacaggtccgacctgtacggggcggtgctggacgccttcggcgtggccggcgagcatctggagacggcgctggggctcgacgcggtgcgcgaacggctgcgtggggtgggctgggcggcggtggtcgaggacggcgagctgcatgaggtgctcaagaagctcgtgcagtgggagctgctggacgtggtgcacaaccatgcggagaactaccgcaccgccgaggagtacgagcgccgcaacttgcagtactcgctgacgcgccggggtgaggccgctctcgccggggtgcggcacgcgcttgaggtgctcgcctcgacgggcgcgctccagacggccgtgctggaggcgatcgccgaccggctggacgaactgtgcctgctgtccagcgagccctcctcggccgatcggcggatcttcagcacgctgcgggagctggaggggcatctggacgctctgatggagaacaccaaggcgttcaacggcgaactgcagcggctcctgcgcgccgagggcgcggatctggacgtgttccgcgaagtgaaggccgccaccgtggcttacctgcaggaattcctggtcaacctcgaccggcgcgggcaggcggtcgccgctgccgtggcgcgggtggaggagcgggggatcgccgtgttgcgcgagcgggccctgcgcggggccgagttgccgccggtggccggtgcggatcccgcggccggctggctggagggccggcgggcgcgctgggcgggcctgcgggcgtggttcctgccggacggcggggcgcggcctcggatcgagcagctgtacgacatagcccggcgggccatcgtctcgctgctccaggtcctggagcggatcaacgagtcgcggcgccgctcctccagcgcggtgcaggacttccgggagctggcgcgctggttcgcggcggctcccgcggaggaggatctgcaccggctctggtcggcggccttcgggctcggcccggcccgccacgctcatctcggccaccccgacccggagttgatcccgtcgtcccattcctggtccgaggccccgccggtggaggtgtcggcgctgctgcggaccagcgggcggacggagcgcttcacccgcacgggcaaggtgcgggacgtcgccgcggtcagggccgagcgcgccgagcgggcccgcgcggagcgagcggaactcgctcgtgcctggcaggagctggagacggacggacccgtgcgtctgtcgtccttcggcgcgttggatcccgctgtcttcgaccggttgctcgacctgctgggccgggcgctgtccgccacgccggacgcgggtggcctgcggcgcgccactacaggggacggccgggtggagatcgcgctggcgccgccaccggacgcgcgcaccgccgtactgcgcaccacgaagggctcactgaccggaccggactacgtcgtccacatcacggaggcgggcggggcgcgtgtctctccagccctccgctcagcgccggaggaggcagccggatga

SEQ ID NO: 51277 - DNA, 1287 bp, Streptomyces resistomycificus
atgagcacgctcgcaaaccaactggccgccgcggaacgggaggaggtcgcgcgcgccatccgtctcctgctggcccacccactgctgaccgccaccgccgacccggccggcttcgaactcgtacgacgccgacgcgaaccgctggcccagtggttcgactacacctgcggctggagcctggtcgtggagccccgccgcggctacgcccgcctcgccaaagtccgcgcgaacccggacggctcccgcccgccccgcagggcgcgttccggccgggctccgttcgaccgtcggcgttatgtcctgctgtgcctgaccgcagctgagttgctgtcgatgccgatgacgaccatcggtatgctcgccgaccgcgtcgtacaggccacggcggccgaccccgcgctggccgcgttcgacccggtccaccggccggagcggatggcattcgtcgatgtcctgaaactgctggagtcgtacgacgtgttgggcgccgtggacgggacgaccgagacatacgtcgagtccgcggaggcgaaggtcctctaccgcgtggacaccacgctgctgatgcggctgcccgccgcgcccgtcggcgcctcccagctcgccacgcccctggacgaggtgcccgcgcggtttgaggaactcctcacaggccttgtgcgggagcgccgatacggcggtgcactcggcgaccagctgtccgacgagaccgccgccacggacgcacaacgcaacctgaggctgcgccactcggtgctgcgacgcctcttcgacgaccccgttctgtaccgggccgaccttgccgaggacgagctcgcgtacgtgacctcccttaccggacggcagatcctgcgccggtcggtcgaacaggcaggcttcctcctggaggagcgggccgagggcttcctgctcgtggacccggacgggatcgccaccgatgtccgccttcccgacgacacctccaccgcgcgggtcgccgcgctgctccttctggagccactgtgcgccgcgcccgccggcctgctgcccgaacagctcgccaaagccggagcggatctgctgcgccgatttccgcgctgggccaaggcctatcagtccgaggagggtgcggcccggctgaccgacgacgccgtacgcgtactgcgggacgtcggtctcgcccgcaggacctcagggcgtgtcgtcgcgtgcccggccgcgtaccgctaccgcctgacgcagacgatgagttcggatccggccttcgatgccgtcgccgtagaagtcgtagaaggagaccagcagtga

SEQ ID NO: 51278 - DNA, 4149 bp, Streptomyces resistomycificus
gtgagcgtgacggagcttcccctcccgcgacggccggagcccactggctcgaccaggacagcggcgacggcggcatcagcaggggataccggcggccaccgctggcagccgtaccgcgcggggatcctcaacgtctggcgctactacgacgagaccttcaccttccaccagggccgtctgctgttgcgcggccagaacgggtcgggcaagtccaaggccttggaattgctgctgcccttcctcttcgacgccagccttcgccccaaccgtctgtccacgttcggcgggtcggagcgcaccatgcactggaacctgctgggtgaaggcgcctcgggcaagacccgcgtcgggtacgtatggatggagttccgtcgcgtcggcgacgacggcaccgagcactggttcggctgcggggcgcgtctgcaggccagcgtgcacaccagcggcgcgcacgccgactacttcaccaccggctcccggatcggccacgccgacggtgtccagctcgtcaacgaggcgggacagccgctgacccgcgccgcactcgcggatgccctcggtgaccgtggccacatgcactcctcggccaccgactaccgagccgccgtacgacgtgaactcttcggcggcatgacggagcagcgttacgagtcgctgctgtccgccctgcttcagctgcgccagcccaaactgtccgagcggctcgacccgtccctgctctccaccctgctgtcccgtgccctgccaccactgggcgaaggcgagatcgccgaactcgccgagggtttcgagcgcctggaccggcagcgtgaacatctcaagcggctcgacgacgaagtcacggcggccgaaaccgtcgcatcgcggcaacgcgcctacgcgaggcgggtgctgcgagccggctccgccgcgctgatctcggcgaccaccgagatggacaacctcacccgcgtcgcccgtcagagcgccgacgatctcgaacaggcgttggcgcaacgcgagtccgcccggacacagcgggaggaactggaactgcgcgcacactccctcgacgagaccgtcgaagggctgcgcgagcgcgacgcctacaagcagggtgcggaactggaccggcttcgacgccgtaccgagggtgcggcagccgccgccggtcggcagcgggcctcggcccaggccgctcaggtcggcgcggaggaggaccagagacacgccgaggaggccgcagggcgagcccgaacactcgacggacacgcgcgcgaggccgccgaggaggcacgccggccggctcgggcagcgggcatggagtccatccatcatgaggtcagagtgatcctcgacgaggaactcggggtggccctccctgacagggcggggcctggcaaggattccggcgtcacacgcgcggcgggcgagaacggtgcccgacgagcccgtcggctgctccgcggcgcggtcaccgcccgacggcagcaagtcaccctcgtcaacgaggcgatcgacgagcacgatcgtgcggtacgcgcccggggcgccgccgaggatctgctggatgatgcccgtacccggctcgcagaggcgatcgcccgacgggacgaggcgtccggagcctgggaagacgtccttgccgtacaggcggaacggctgctcacctgggccgaaggctgcatggagctgcgcatcgccgatcccggggaattggcggccagagccgcggccgaggccgaggtgacggccctgatcgaagccgccgcccgccccttggaacgggagatcggcacggcggaggccaccgcccgagccgtacgccaggacctgagggacgagcggagccgacttgaggcggaggtgcgacggctcagtggagagaccgacctcccgcctctgtccccgcccacccgtaccacggtccgcacgacgacggcgggagcaccactgtggcggctggtcgccttccgcgaggatgttcccccgcccgtccaggcagcggtggaggcggcgctggaggcatcgggcctgctggatgcctgggtcagcccctacgacgggatcaagctgccgggccacgacacccgcgccgaggcagccctggcggtgaccgcgcagggacccagcctgctggacgtgctcaggccggaggaggacatacccgtcccggccaacaccgtgacccgcatcctcgccggtgtcgcgtacggcaccacgcttcccggcggtcaccccgcggccgtctccgccgacggcgcctggcgtctcgccctcgccaccgggacgtggagcaagccggaaccggctcacatcggtgcccttgcacgacagcgggcccggcagcgcaggatcggtgaactgaccgacctcatcaccgagacgaacgcctccctcgccgggctcgacgaccagctgcgcggcctcgatgctcgccgtgcccagctggacgccgaccgcgccgcccgtcccgaccaccgggaactcgacgcccgccgacgcggctgggacctggccgaggcgaaggcggccgcgcgagacgacgccgtgcgtgatgccgccgggcatctcgcacgatgcgagagcgcggcggcaggcgctctgcgcacgctcagccgccgggccgcggaacacggattggccaccgaccgtgagcggttgcgtgctctctccgccgacatcgacaggttccgggacgccgccgacagctgggtggacgccctgctcgcgaccactgccgctgccgacggggcccatcagctggccgcgcaggcagaccgttcccgccgggctgccgagaaacaagcgaatgaggcggctgccgccgaagcggaggcggcgggtctcacagcgcgcctggcggcggtggaagccaccgtgggcgaggactaccggcagatcgtcgcacgcgtcgccgaggctcgcgcagaactgcgacgctgccgagaggaagccggccgggccgccgatctcctgctgcggctggaaggacgtatcggaggactacgggccaccagtgctcaggacgccgctatacgggagcaggccgtcgcgacacgggacggcgcggcacaccggttccggcacttgtgcctggtcgggctggccgaggacgcaggcatcacaccggaactcgacgccgagggcggcaccaaagccaccctggaggccgcccgtgccacagcggccacctggcccgccgtgccgcacgcatcccgcaacctcggcgacgccgcgacccgtctctcggaagcggtccacgaggcccgtcagcgcctcggtgcccgtgccgacctggagatggaacccgacgacgacatccagctcttcaccgccaccctcgacggcgtgcgcgtaggcgcgacgggcctgctcaccacgctcacccaggagcgcgaccgcggtcgcgacgacatcaccaccgcggagcgacgcctcttcgaccagatcctcaccggcgacatccgccgacacctcgcagcccgtatccgccaggccggcgaactcgtcgaccgcatgaacgggcacctggagcgggtgcgtaccgcttccaacgtcgccgtccagcttgtctgggacgtccgacccgatctcccggacggcacccgcaccgcccgacagttgctactcaaggaccctggccgggtcaacgagaccgatcgggaagccctgcacgccttcttccgcgcccggatcgaggaggccaagggcagcgacacggccgcgagctgggaggaacagctcggtgaagtgctcgactacaccgcctggcaccgcttcaccgtccgcctggaccgggccaacggcagcggatggcaaccgctgaccaagaagctgcacggcgcgctctccggcggagagaaggccatcgcactgcacctgccgctgttcgccgccgtcgccgcccactacgaagccgtgccccgggcaccccggccgattctgctggacgaggtcttcgtcggtgtcgacaccgtcaaccgtggacaggtcttcggcctgctcgccgccctcgacctggacctcatggtcacgtcggaccacgagtggtgcacctacggcgaactgcccggcatcgccgtccatcaactcctcaccgacgggggcgacgacgctgtcaccagcgcccgcttcgtctggaacggcaccgagctggaggcgggatga

SEQ ID NO: 51279 - DNA, 1263 bp, Streptomyces resistomycificus
atgacccacccggaaccggtcccgggcgaacgcgccctgcggcgccccgaactcggcccgctctggcaaacggtccacatccgcctctcgtccggccgtcccgtcacccgggtgcgcctcgggccgctcgacgacgcccagcgcgaggccctcgccgacctcctcggcctggaccggctaccgtcctctcacccgtgggtcccgctcgcccacttggaagaggccgtcaccgagttgtccggccgcacggtgcgcgacatagtcaccgaactcgtcggacctctcggcgaccgggcgggagaactgcgccgccaggagggagaacgcgccgaactgtggacctggctggccggtcacgccaccgtgcgggctcagccggtgctctccgactgggctgcctcttgccgggccaccggcctgatcgcaggctcggcgggacgcacccgatccctgctcacagacgcgctcaccgtgctcgcggaacttcccgcccaggcggagccactgcccgtcttcgctgcccgggtcctgggcggacacgcgcacgcacttgacgacggtacgcccttgtcccactacgtcctgcgtgccttgacgatcctgtacgacaccgcaccgccgcagtcctcagcggaccggcgagccctgtggacccgtgcaggtgtcgccgacgatgacctgtcagcaaccgttctcgtcggtggacttcgtcccgtcggcgacggcacggtcgcctgtgtggctcgcgtctgtgccgaggccggacaggccgccagcctgacgctcgcccaactgcggtctccgggcgagttctccctcgcagcgcaccccgcaccagtcgtgcatgtcacggagaaccccagcatcctggctctcgccgtacgccgtttcggcgcggactctccgccgctcgtctgcacatccggttggcccaacagtgcggcgatccagcttctgcgcatgctcgcggaccacggagccgctctccgctaccacggcgacttcgacggcgaaggcatccgcatcgctgcgtacgtcttggacaagacaccggcgcacccctggcgcatgacggcagccgactaccgtacggcggtcgtccgccacccactcggccctcaggccgggcgcatcaccgaagcaccgtgggatgccgagttggcccaggccatgacagaccacggctccgccgtggtcgaggaactggtggccgctgaactcttggaagaccttgctgccgaggctgtggcaacgctgctttga

SEQ ID NO: 51280 - DNA, 1491 bp, Geobacillus stearothermophilus 10
atggacgccacgtggctaaagcccattgtcgaaacaaaatatttatcgacggaaaacgcgcaccgctatcgggcgattttgcgctatttctacattcagcacgagcggatgcgccaatatttgtttccggaagaagtgtacgcctttttaaagcagcacgaggaatttgccgattacaccgaggaagagctgcaacaagacctcgatcagctcgtcaaatggaacaacttgatcgcccgccaagagacggcgcatgtgcggacgatagaagagtttaagaaaaagcggttccgctaccaatgcagtccgtacacggtggagatcgagcggatgatccgcacgctcgagcagcttggggattcatttggggggtcgctcgagaaaacgcggtttgaccgcttgtatgcctctctttctcgcattgaaacgatcatcgcttctgattttcaagaacagccggatgaaatgcatcaagtatgggaagagacgttcgattatttcaagaaaattatccaaaactccgccgactatatcgcctatttgcacggtgagaatttagaagagcggatgacatcggagtcgtttctcgtttataaagagcagtttactgcttatttgcgcgattttatcgtcgccttgcaaaaaacgtcgatgcagattgaacaattgcttgaagatttgccggaagaaggggttcggcagttcatcgagcatgtcgtcgattatgagcggtcgatcccgcgctttgccgatgcgctgccgccgcgcgctgtgcagattgaagaaaaatgggagacgtggcgcagcttgtgcgaatggtttttaggccgcgatgggcgcgagagcgagctttcgtttttgcaataccagacgaatgaggcgattcgccgtctgacgcgcgtcgtgcagcggcttggcgaacggcatcaccattttcgcagccgcaagggcgactacttgcatttggcgcgctggttctcgcaacttccatcgatcgaagaggcgcactgcctgtcagcggtcgtgttcggttgcttccatacgaaacatctcgtcgccgatttcggggcgacagacaacatataccgcgacgtatgggacgagccgccagcggagtgggtgacgaagccgcgcgtccgccattatggggaaaagaaaaagccgcaggcgattgaagacaaagaacgagagaaagaagaagcgctccttcgctatttggaagaaaaagcgcgcgaggaagccgagctgaagcaacttgtgaccgacgggaaaatcgtgctcgcccatttgccggaagtgaccccatatgtacggaaaacattgcttggctggatcgccaaggcgatggggcgcgaggggcaaacggcgaaaacggaaaacggttggaaagtgaaagtcgttcaacgtgaagggacgatttgccttcgttcggaagacggggaactcgtgatgccgaactacgaaattcatgtgctttcgggaggtgagtga

SEQ ID NO: 51281 - DNA, 1197 bp, Geobacillus stearothermophilus 10
atggaaacggcgtttgacgacaaagcgaaagaagcgctcgccgcgctgttcgagcagttttggatcattcgcgacaaagagccggatttgtatcagctcgtccgtgagcgcgaacatgtgttgaaaaggtatgtggaggagaagtttggctatcggctcatcgttcaccgctattttgccaagctcgagaaaattcccgccgaaccggagccgtggatgggaattgagtcgtttcaagagccgcttgactatgcattgttttgttgtttgatggcgtatttggaaggaaaagcggtggaagaaaagtttttgctttctgacgtatgcgaagaaattcgcgccatgtacccgggagatctaccagtcgattggacgaactactcgcatcggcgcgccctcatccgcgtgttgaagacggcggaacaaatcggtcttgtccgccggatggatggggagattgaggcgttcgcccaacatgtggaggaagaggcgctgtacgaagtgccggtgttggcccgttattttatgcgcacgtatccgaaagatttgttgcaatatgaatcgatcgacgaattgctcgccgaggagtggaaagcctcgccgcaagattatcggcgccatcgcctgtatcgaaagctgtttttatccccggcggtgcatcggacggaaggggacgagcaagacttttactacttgcgcaacttccgccatcggctgcgtgacgatatcgaagcgcatacgccgtttcgctacgagctgtacaaaaatgccgccatgttgacgcttcccgaacggcaggcgccgtacaccgtatttcctgatcagaaaggaacgtcggagatcatccttcattttgccgccttggtgcgcgagcggcttggggaatatccgccggatgaatacggccgcatacgattaacgcctgaacaattttccgcctggcttgccgattgccggcgccgttacggggcgggatgggggaaaacgtaccgcgacatgtcggctgccgagcttgtccgcgaaatgcttgcggcgctcaacgaatggcgcatggccgatgtggagcacgacaccggaatgatcgtcctttacccgctgctcgggcggctttgcgggcggtatccggatgattttgacgcgaaagagggggaggaacatggcgaatccatgggtgcttcatcgcgcggggctgattaa

SEQ ID NO: 51282 - DNA, 4122 bp, Geobacillus stearothermophilus 10
atggcgaatccatgggtgcttcatcgcgcggggctgattaatttttggtattacgacgagcaatactttcacttcgctgacggcaagctgcttttgcggggaagcaacggggcgggcaagtcggtgacgatgcaaagcttgatcccggtgcttttagacggcaagaagacgcccgatcgcctcgatccgttcggttcacgggcgcggcgcatggaagactacttgcttggggaaaaagatgtcgtcaatcgcgatgagcggacggggtatttgtttttggaatataaacggaaagaatccgaccaatacgtcacaacgggcatcggcctgcgcgcaaagcggcaaaaaagcctcgacttttgggggtttgtcctctttgacaaccgccgcatcggctatgaccttcagttgtataaacaagaaaaaacaggtgaaaaaatcccgctgacgaaacgcgagctcgccgcattgctcggcccgggcgggacggtcgtcgagacgcaaaaagagtatatggagctcgtgaataaacatgtgtttcgctttgaatcgctcgaggcgtttcaagaattgatcgaattgctcattcaactgcgcagcccgaagctgtccaaagactttaagccgacggtgatttatgaaattttggaaagctcgctgcctccgttgaccgatgacgagctccgccatttatccgaaacgatcgaaaacatggaccaggcgaagcagcagcttgagcagctcgaacgcgacgaacgggcgttgaagcgtctttgcgatcagtaccgcctttacaacgaatatatgatcgccgaaaaggcggcagaatacgtaaaagcggtcaaacaagcggaacagctcgctgctgaacaacaccgccttcacgatgaagaagagcaggcgcgaaaggcgcttgatgagcttgatgagtccatcatccgcctccgccgcgaagaagacgtgctgcgttcacgcgaaatcgacttggctggccacgaagtgttccagcaagcggagaagtatgaacagttgaaagctgagagggagcgtctgcaggagcggcgggagcggcacgagcagacgatcgcggaaaaagaacggcttgagcggcagcatcgccgccgcctcgatgaatcggaagcgcggttggatgaccttgaacggaagcttgaagacgagttggcgcagctgcgagcggatgcggaagaaggagccttttctttacatgaaacgaacgaagacgattttcaccgccatcgccaaaagcaacaagagttttcgtttgccgcttggaaacaggaagctgaccgccatatcgagcggctcgaggagttggcgcgcctttggcgcaggcatgacgatgtgaaacgacgctatgaagaagcgagcaacgaagcgggcgagcggcggcgggaaatggacgaatggcgtcatcagcagcggaaatgggaagagctgttcgagcaggagaaagagcggtttgaacaagccgtgcttgcctgggtcgagcagggaggaatcgacgtttccgaaacggacattcaggcgtttttgcaacaaatgggctccctctatgagcagtattcgctcgatgatctgaagcgcccgttcgttcaagcgtattacgatgccgtcggtaagaaaaaggatgagaaatggcggctcgaacatgacatccgtctgttggaagagaaacaggcagaacgtgaggccgaactgcgtcaatggcgggaacaacgcgaccctgaacccgaacgggatgaacaaacgacagccgcccgcttggcattggaacaggaagggattccgtttgtcccgttttatgccgcggtcgaatttgtcgacgatgtgcctgacgatgtgcgagagcgaatcgaatcggcgctttcgcacgctgggctgcttgacgccctcattgcggctcgcgatgtcgacgtcgactgcgaccgtgtgctcatcccgaaaccggttcatatggcgcatacgttggccgattatttgcgaccagatgcggatgcccctgtgtcggcggagcggattgacgaagtgctccgaagcatcgtgatcaccgatgcggaacaagaaggcggcatgacgatcgacgaaacaggacgctattcgctcggccttgtccgcggccatgcgccgcggagagcgcgggcgatgttcatcggccgtgcggcgcgggaacggtggcggcttgagaacatcgcggcgctggaagccgagatcgccgctttgggacaagagatcgaccgtctaagcggtgagcatcaggcggtggaagcagccatccgagcgctcgccgactggtttgcgtccttcccatcggaccgcgatgtgcgcaccgcgtttgaggaagggcaagaagcccgccgccaagccgaaagcaaagaacgggaatggaagcggcaagaagaaaaagccgccctcttggcgcgtgaatggaaacaaatcaaacaacagctccatgacgagtcggccgagcttgatttggcctttaccttggacggctgcgaacaagcccagctcgccatgaaatcgtacgtccgccatttgcacgaactcgaagtgctttaccgcgaaacgcgccataccgaggccatgatcgcccaacagcgcgagcggctcgcggcgctggaaacggagatcgacgaagcgaaaggcgaacgaaatcggcttcgtgatgacgaagagcggatctccttggagatcgctgagatggaacggacgctcgcccaaatgggagcggatgacattcgcgcggaaatcgcccgcatccaagaacgattggcgtttttgcgccaagaaattccgcgccttgtcaacgaacgggcgcggacggaacagcgcctcatgcgcttagtcgaagagcgggaaaaaggagcgcagcgggaagcgttcgcctgccagctggccgccatgtgggagcggtcgtttgccgatgaagcggcgcttgggctcgtggatcttgatcgttcacgttccctcttggagcaggccaaagaagcgaaacaacggtatgaagcagtgttaaaagagacgcgttcctcgcttttggcgcggctgaacaccgtcttcttccaagagtcgtccaacttgaccgaataccgggcgacgttcgagcggctggcggaacaaaaggagcccgaatggatcgccgccgccccagacgacgagatggcgatgaaagcggccgattggcgggagaaacaagaacggcacgtcatttatctcgactacaaaggccagcgcgccacgccgtttgccgtgcgcgccgaggtggagcgcgacatcgccttgcagcacgagtatatgaaggagcaagaccgcgagctgtatgaggacgtcattttaaaatcagtcggccgcattttgcgcagccgcatccagcgcgccgagcggtgggtgagcgatatgaacaaactgatgggcggcctcgacacgtcatcagggctcgtgctgtccattcaatggaagccgaaaacggcggagacggaagcggagctggatacgaaagagttggtccgtctgttgcggatcgattcgcggctgcttagagaggaagatttgcagcgggtgacgaaccatttccgctcgaaaatcgcccgcgcccgcgaattgcttgaggagcgcggccaaggcaacacactccatcaaattattaaagaagtgctcgactaccggaaatggtttgccttcaccttgtactatgaaaaaacaaatgagccgaaacgcgagctgacgaaccaccgtttttaccaattcagcggcggggaaaaggcgatggcgatgtacattccacttttcgccgcggcgtattcgcgctaccaagaagcgggtgatgacgccccgtacatcatctcgctcgacgaggcgttcgccggcgttgacgaaaacaacatccgcaatctgttcggccttgtcgaacagctcggctttaactatatcatgaactcgcaggcgctttggggcgactacgacaccgtgtccgctttgtccatttgcgaactcgtccgcccgcgcaatgcgtcgtttgtcaccgtcattcattaccgttggaacgggcgtgtcaaacagctcatggtcgatgacaaagaatgggagatgatcgaaacgtga

SEQ ID NO: 51283 - DNA, 1221 bp, Geobacillus stearothermophilus 10
gtgagcaccgtcaaagaagcggccgcctttttccgatccgaaccgggcttcaagcggctgtttgtcgaaatgaaacgcaagtacgaatcgctcggccgcgtcggcggcgcggtttcgctgcagtcgttctccaaggaggagcgggaggcggtcgccgcctttttcggcaaagacgtctcccgcgtctttctctccgactttgagaaacagctcggacagacaaggtttgcgggtgttggactcgtcgaactgctcgaacattatttcggcgtcccgcttatgtcgaacaaagaacggcgccaggcagaggcggaagagcgggagcgttttttcgcgcgccttgcagaggaacatcattggttcgcggccgtccgcggccaacgcttcgtccaaacggcgtacgaagccgaccgcgacggtcttgaggccgccgtccgccttgtcggcgccgccctctgccgcctcccgctctcttcatatatgcgcctcccgctctttgcccagcaagtggccagcgacccgcacgcgttcgatttgtccactcttccagggagattgttgttgtccgccttgcaagcgacgactccaggccagtgggatgtgacgtccgtagagagtgtcaatgaactgttgcagtccgtcggcctgctccgcgaagatattttgaactttgtcacatgcgccaacatcctcgctgaaaccgagggcggcccgcatcccgtcttctctgccgcctcggagacgaacacggcgctgaacatgccgcttagggatgtgttgtcacttgtcagtgtccgccccgcccgcggcgggacggtgtacattgtggaaaacgccggtgttttttcgacattgcttgacacccgcgccccgcttgtcagcacgaacgggcaaatgaatttggcgacgatgaagctgctcgatttgctcgcggcctctggcgccaaattgtattattccggcgacttcgacccggaaggattggctatggcagagcggctgcttgaacggtatggacagtccgtcacactttggcgattttccttggacgattatgcggccgccaaccctgtcgtcgccctttcttccgagcgccttgccaagctcgcatccgtaacgtcggcgccgctgcagccgctgaaagaggagatgaagcgaaagaaaaaagccgggtatcaagaggcgatcattgggaggttgacaggggatatcaacgggtag

SEQ ID NO: 51284 - DNA, 1491 bp, Geobacillus stearothermophilus ATCC 12980; identical to SEQ ID NO: 51177

SEQ ID NO: 51285 - DNA, 1197 bp, Geobacillus stearothermophilus ATCC 12980; identical to SEQ ID NO: 51178

SEQ ID NO: 51286 - DNA, 4122 bp, Geobacillus stearothermophilus ATCC 12980
atggcgaatccatgggtgcttcatcgtgcggggctgattaatttttggtattacgacgagcagtattttcatttcgctgacggcaagctgctgttgcggggaagcaacggggcgggcaagtcggtgacgatgcaaagcttgatcccggtgcttttagacggcaagaagacgcccgatcgcctcgatccgttcggctcacgggcgcggcgcatggaagactacttgcttggggaaaaagacgtcgtcaatcgcgatgagcggacggggtatttgtttttggaatacaaacgaaaagcatccgaccaatacgtcacaacgggcatcggcctgcgggcaaagcggcaaaaaagcctcgacttttgggggtttgtcatgttcgacaaccgccgcatcggctatgaccttcagttgtataaacaagaaaaaacaggtgaaaaaatcccgctgacgaaacgcgagctcgccgcattgctcggtgcgggcgggacggtcgtcgagacgcaaaaagagtatatggagctcgtcaataagcatgtgtttcgctttgaatcgctcgaggcgtttcaagaattgatcgaactgctcattcaactgcgcagcccgaagctgtcgaaagactttaagccgacggtgatttatgagattttggaaagctcgctgcctccgttgaccgatgacgagctccgccatttatccgaaacgattgaaaacatggaccaagccaagcagcagcttgagcagctcgaacgcgacgaacgggcgttgaagcgcctttgcgatcaataccgcctgtacaacgaatatatgatcgccgaaaaggcggcagaatacgtaaaagcggtcaagcaggccgaacagctcgccgccgagcaacaacgccttcacgatgaagaagaaaagacgcgaaaggcgcttgatgagcttgaggagtccatcacccgcctcggccgcgaagaagacgtgctgcgagcgcgcgaaatcgacttggctggccatgaagtgttccagcaggcggaaaagtatgaacagctgaaagccgaacggcagcgcctagaggaacggcgggagcggcacgagcagacgattgcggaaaaagaacgacaggaacgtcagcaccgccgccgcctcgatgaagcggaagcgcggctggatgaccttgagcggaagcttgaagacgagctggagcagctgcgtatggatgccgacgaaggatccttttccttgcatgaaacgaacgaagacgattttcaccgccatcgccaaaagcaacaagagttttcgtttgccgcgtggaaacaggaagccgaccgccatatcgagcagctcgaggagttggcgcgtctttggcgcaggcatgacgaggtgaaacgacgctatgaagaagcgagcagcgaagcgggcgaaaggcggcgggaaatggacgaatggcgccaccagcaatggaaatgggaagagctgttcgaagaggagaaagagcggtttgaacaagccgtgcttgcctgggtcgagcagggaggaatcgacgtttccgaaacggacattcaggcgtttttgcaacaaatgggcgccctctatgaacagtattcgctcgatgatttgaagcgcccattcgtgcaagcgtattacgatgccgtcggcaagaaaaaggatgagaaatggcggctcgagcatgacatccgtctgttggaagaaaaacgggcagagcgcgaggccgaactgcgtcaatggcgggaacaacgcgaccccgagcctgaacgggatgaacaaaccactgccgcccggttggcgttggaggagaaaggcattccgtttgtcccgctttatgccgcggtcgaatttgtcgacgatgtgcctgacgatgtgcgcgagcgaatcgaatcggcgctttcacacgcggggctgcttgacgccctcattactgctcgcgagatcgacgtcgcctgcgaccgtgtgctcattccgaaaccggtccatatggcgcacacgcttgctgattatttgcgcccagatgccaatgcccctgtgtcaatggagcggattgacgaagtgctccgaagcatcgtcatcaccgatgccgaccaagaaggcggcatgacgatcgatgaaacggggcgctattcgctcggccttgtccgcggccatgcgccgcggagatcgaaggcgatgttcattggccgtgcggcgcgcgaacggtggcggcttgagaacatcgcagcgctggaagccgagatcgccgctgtggggcaagagatcgaccgtctgcgcggggcgcatcaggcggtggaagcggccatccaagcgctcgccgactggttggcgtccttcccatcggaccgcgatgtgcgcaccgcgtttgacgaagcgcaagaagcgcgccgccaagccgaaagcaaagaacgggaatggaagcggcaagaagaaaaagccgctctcttggcgcgcgaatggaaacaaatcaaacaacagctccacgacgagtcggccgagctcgatttggcctttactttagacggttgtgaacaagcccagctcgccatgaaatcgtacgtccgccatgtgcacgaactcgaagtgctttaccgcgaaacgtgccataccgaggcgatgatcgcccaacagcgcgagcggctcgcggcgctggaaacggagatcgacgaagcgaaaggcgaacgaaatcggcttcgggatgaaaccgagcggctcgccttgcgaatcgcggagatggaacggacgctcgcgcaaatgggggcggatgacattcgcgccgaaatcgcccgcattcaagaacgattggcgtttttgcgccaagaaattccgcgccttgtcaacgaacgggcgcggacggaacagcggctcatgcgcttagtcgaagagcgggaaaaaggggcgcagcgggaagcgttcgcccgcgagctcgccgcgatgtgggaaaagtcgtttgcccgtgaagcggcgcttgggcttgtggatcttgatcgttcccgatccctcctggagcaggcgaaagaagcgaaacaacggtacgaagcagtgttaaaagagacgcgttcctcgcttctggcgcggctgaacaccgtctttttccaagagtcgtccaacttgaccgaataccgggcgtccttcgagccgctggaagaacaaacgaagcctgaatggaccgccgctgccccagacgatgagatggccatgaaagccgcggactggcgggagaaacaagaacggcacgtcatttacctcgactacaaaggcgagcgcgccacgccgtttgcggtgctggcggaagtggagcgcgacatcgtcttgcagcacgagtatatgaaagaacaagaccgcgagctgtatgaggacgtcatcttaaaatcagtcggccgcattttgcgcagccgcatccagcgcgccgaacggtgggtgaatgagatgaacaagctgatgggcggcctcgacacatcatcagggcttgtgctgtccattcaatggaagccaaaaacggcggagacggaagcggagctcgatacgaaagaattggtgcgcctgttgcggcttgatccgcggctgcttagagaggaagatttacagcgagtgacgaaccatttccgctcgaaaatcgcccgcgcccgcgaattgcttgaagagcgcggccaaggcagcacgctccatcaaatcattaaagaagtgctcgactatcggaaatggttttccttcactttgtactatgaaaaaacaaacgagccgaaacgcgagctgacgaaccaccgcttttaccaattcagcggtggggaaaaggcgatggcgatgtacattccccttttcgccgcggcgtattcgcgctaccaagaagcgggcgatgatgccccgtacatcatttcgctcgacgaggcgttcgccggcgtcgatgaaaacaacatccgcaacctgttcggacttgtcgaacagctcggctttaactacatcatgaactcgcaggcgctttggggcgactacgacaccgtgcccgcgttgtccatttgcgaactcgtccgcccgcgcaatgcgtcgtttgtgaccgtcattcattaccgttggaacgggcgcgtcaaacagctcatggtcgatgacaaagaatgggagatgatcgaaacgtga

SEQ ID NO: 51287 - DNA, 1221 bp, Geobacillus stearothermophilus ATCC 12980; identical to SEQ ID NO: 51180

SEQ ID NO: 51288 - DNA, 1683 bp, Streptomyces sp. CFMR 7
atgcccggcacaccgccggaacccggcaacgcgccctcggcacccgacgccgacgagatgcgccgccgcctcgacgcgtacgcgtacctcagcgcgccggagcggctggagtacctcgcgatcatgcgggtcttctgcggcaccctcctggccgatctggccgtcccggacgtgatggcgaagctgcgtgagggcggcgggcccgcctcggggctcgacgccgaccccctcaccgcgcggctggaacagctggtgaagtgggggaacctgctgcggggcagccacacggtgaaggcgtccagcatcacggagtaccagcgttcgcgggcccgatatcagctgtcgcggctgggcgagcgggtccaacgggacaccgacggggtgctggccgaggccgacgccgcccgcgaggtgagcaacgaactgctggccctggtcgagcgggggctgcgggagctggccgagctggtggcagagccgggcggcatagccccgcaggacgggctggagcggatcagcacgttgttcgtgcagttcgccgggttcgccgactccgtccgggacttctacgcctatctcggccaggtgctcgcccggtacgacctggacggcggcgagtaccagggcttcaaggaactcctcttggactacgtcgaggcgatcacggaggacgtgtccttccgcgccccccgcatctcggcggccctggacgcactctggccccacctcccgggcctgctggagcagctggacgctcacgcgcaggggctcgccgggctgccgacgcggagcgagagccgtacggagacccgcgtacagcgcagccggggtcgccagctcgcggactgggaggggctgcggggctggttccgggacaccgacgggcagggcagccaggtcgaccagctgcgcgacgccaccctgcgggcgcttcagtcgctgctggccaacgccaagcgaatgctgcgctcggccaccggcgagatgtcgcggcgccgggacctgctgcggctggcccgatggttcgacgaggccgcgccgcaggacgcgcacgacatcgccgtcgccgccttcgggctgtacggcgcccgccacctgggcataccgcccgcctccgacgaggtggtgcccgcctacaccagctggtggaccggcccggtggtcgaggtgccggtcgcactgcgcgagaggggcagccgcgcccagcggggccggacagcatcggtggaggaccattccgcgcagaaggaacgactgcgggaggcggcgcgtcagcgggccgccgagagaagcgccgccgcggacgagctgtgcagcgcgtccggccgcttcgacggcgtacggatcacgtcggcggcgctcagcctgctcctggagctgctggccacggcgctcgggaacgcccagctcaggcgccacgccccagtgaacgggcaggaggagcgggggttcgggctggacgcggcgtggagcgaggacgtcgatctgggcatccggctcacggtgcaccgtacggcgggagcgcgcacgcttctgcgctcggccgaaggggatctgctgctggacgacctggagctggcggtccggaggacggccgtctcggtggaaggagcggagccgaccgggagcgaggcgcttcccacgcggtcgcacggcgcgtccgtcggcggcagtgggagatga

SEQ ID NO: 51289 - DNA, 1329 bp, Streptomyces sp. CFMR 7
atgacacttccttccgcccacgacgtggctctggccaccgaacgccgcaccgcggcacggttgttgctcgcacacccgttggtcacatcggacggcccgcacgccgacctctttccgctggtccggaggcacgccgattggctggacagccggttccagcaagtgctcggctaccgcctcctggtcgacagctcctacgcccggctgttcaaggccgggctcggagcccggtcggggcaccggctcgtacgatccaccggcacgcccttcactccgcacacctacgcgtgtctggctctggccctgtcggtgctggtcaccgcgccggagcaggtactgctgtcgcagctcgtcgccgacattcgggctgcggcggccgacgcggacatcgagctggaggagaccggacgagcggccgggaagcggacgctggtcgcggctctgcggcagctggtcgagtggggcgtcctgatcgagacccacggccacgtgggcgtcatcgcccaggaggccgacggggaggctctgatcacggtcgaccgggagctcgcccgtgtcatcgtggccggaccgctcgcccagtcgcgggacggcgccgacctggtccggcgggcggcggacccggggttcggaggaccgcgcacctacgtgcgccggatgctcgtcgagacccctgtcgtccatctcgatgagctgaccgacaccgaacgtgactggctccgcacccgccagcgccgggaggctcaggcgttcctcgaactcctgggcctggagacggagatccgggccgagggagtggccctggtcgaccccgaggaggagctgaccgatctccacctgccggggacggggactgtcgcccaggcggcgttactcctggtggagaggctggtgcagcggctccgcccggttgaacccggacatcccgcaaccgggggcgtcctcgtcgtcggggtcgccgttccggacggtgtggtggatgagctgctggccgagctgatcaccgagtacgggcagcgcagcaactggcagcgcggttacctggaagaccccggcgccctgcgcgaagccgtgctggacctgctctcccgcatgcgcttgattgccccggccggcccgctgcgatccgagggagcggggctgccggaagagtacgccgacgagctgccggagggacgccaggtcaccgacgtccgagcggcccgccccggcggcggcgagggctgggtcctgcttgccccggcggcccgttacgccacccaggtcaccgtgccgacgacgggcggacggaacaaatccaccgacgcacagcaggagttgccgctatga

SEQ ID NO: 51290 - DNA, 4263 bp, Streptomyces sp. CFMR 7
atgaccgccgatgctcgtggtctcgttccccttccgcgttcaggtcacacggaggcggcgcgtacgcgcttccggctgcacagggcgggcatccaggacgtctggcagtacgacgagcaagagttcgccttcggcgacgggcggctgctgctgcgtgggaagaacggggcgggcaagtccaaggccctggagatgctgctcccgtacctcctggacggtgactcccgggccctcgacgccaccggcaccgggcggacgacgctcgcctggctgatgctggacggcttcgagcagaccaaccgcctcggctatctgtgggtggaattccgaggcaccgacgaggcaggcgaccaccactgtctgacgatcggcgccgcgatccgcgcctcgaagtcggcacagaaggcggtgccgaccttcttcgtcacctcgctgcgcgtcggcgaggacctgcacctcgtcgaggcgggcaaaccccttgccgtcgaccggctcaaggagatcgtcggctccggcaacacgacggatcgagcggtcgaacaccgtgcccgcgtggcccgggacctcttcgggatcacggacgcgacgcgctaccgcaacctcacccagctcctgcaccggctacggcggcccacggtcggggaccgcatcgagcacggcggtctggccgtcctgctgagcgagaccctgcccggactcgacgaggacgtggtcgagaaagtggcgcgcaacctccacgacctggacaccgtgcgggccgaactgggccgcctggaacgaaccgacgcggccttgcgcaccttcctctccgactatcgccgctacctagccggagtgctgcgctccgcggcgcgggatgtgagtcgcgagctggacacgctctccgagcgccgccggaacgccggggacgccgcccagcagacgagcgtcctgagggaacgtgagaaggaatcggaggaggggctgaggacactccgcgaggaggaggagtccgcccggacggaactcgccgccctgcacgacagccacgcctaccgcagcctgcgcgagctgtcggagcgccgcagcacggtggaagccctgcacaccgcggccgtgaccgccttcgccgcgttgcgcggggcgcacgaggcggaggagagttcggccgaacgactggacgagggtggccaggagttgggcgcccggcttaccgaactggccacggagcaccgggaactgctggtccaggcggagcgggcggtacttcccgccgcacatctcggcgaggcggtcgctctgccgcacactgtgcgttccccgtcgacacagacggagctgaccggcccggacggggaatcgccgaccgtacggcaccgacctgtggtgcgggtggacctggcgacggcggaggccggactgcggtcctggcagcagcaactgggggccgccgagaccgtcgtacggaaccggcagcggaccgtccaggacgtgacccgcctctcctcgctggccgacgaggctcgtggcagtgcgatgcgggccgacgaggtgcgggaacggctggagggcgaggcggaggaggccgctgaccgcctcgaagccagccgtcagaaggtcgccgaggagagccgggagtacgccgacgaggtcgccgcgtgggtgcgcgagacacgcaacgcgacagggccctcgtgcccgccgctggacgccgtcctctccgaagtggcctgcgcggccgactccgacgcggcgttctcctcccgcacgctcccggccggcatcgacacccacgcgcagcagacggcacatctggttcttgagccgtacgcggacgccctcacccggcatcgcgacaccctcgcggtcggcgtcggccgactcggtgaggagatggaccgcctggcggaggagaggcgggcttgggaacgccgtacggacccggagcctccggccccgtaccaccgaagcacggggcgaaaccctgccagcgggacgccgttctaccggttggtggacttcgccgagcacctgaactccgccgaacggaccggtctggaggcagcgctggaggcgagtggccttctcgacgcgtgggtcagcacgggcggcgcccttctcgacccgctctccggcgacacccttctcgacgcggctccggcccacgacccgctgccggtggcacagaccctcgcctcggccctgcgaccggtcgcgcagccggacagcggcatcacatccgaccaggtggagcacttgctgtcagccatcgtgctcacaccggccacgtggacgacggacggggggacggcgaccgcgagcacggtccacttcgacggtagctggcggctgggagccctccgagggcagcaccacaagagcgccgccgagtacgtgggcgcagcggtgcgggccgagacccggcgacgggcactggccgagctggaagaccggctcgggcagacggaacggcagctggcggaagcccgtaccgagctcgctgcagccgattcccggcgacgggccctcgcgcaagcggaacgcgacttccctcgggcgcagcggctctccggcgcctggagcacccatgcctcggaggagagagcggcacgagcgctctccgccaaggcggccgaagcggcacgccaggcggaggaggcccgtgccctggccgtttcgacgcgctccgaggcagacgccaccgcgaccgcccatgacctgcccaccgacaccgtcgcactggaccgcgtacgcaccgccctggcctcgctgttcaccggcgtcggccacctacgcagggcggtcaacggtacggtcgcccggctcggcggaagccaggcggacgaccggcggtacgcggaggcccgcgagaagcggacggaggtggaagagggctaccggctccgccaccggcaactcctcgccgcgcagcaggatctgcggacccgggaggccgccgtcggatcatccgaggagaagatcctcgccgacgaacaggccgccaaggaccgtatcgcccatgccgtgcgggccatcccgtcgagggagcgcgagcacaacggtctgcgcgaccagcgtgtacgggcggaagagaaagaggagcgtctgcgcgaggaactggcggaccaggaagcaaccgtgatcgagaccggccgcgcactgcgcggcgctctcagccgcccggagatcgtcatcggagcgggactggatcgtacgaccctccccgatcagctacaggacgacccgggcaccagcgcgcgcgaccgtctgcgcgcactccgaacactggcggaagcggtggatcggggtctcggccgtcaccgggaagaggtgtccgacagccttctcctcaaacggcacacaacgctgcgtgatcaactggcgggcggctacgacgcacagctcgacgagcacgacggcatcaaggtgtgccgcctgctcgacgaccacggttcacacgacgtcgcggtcgtgggcgagcggatcgccgtggaagccgccgaggcacgaggacggctcacggaacgcgagagcgacgtgttccagcgcttcctgaccggcgagctcggcgaccacctctccacgcaggtcatcacggccgccaacctggtcgcggcgctcaacgacacgctgaaaaccgtacggacctcgcacggcctcggcgtggaactcctctggaagctcaacgacgacgccgaggccgacgtgcgggtggccgtcgaactgctgcgcagcccgtcgagcctccggacacgcgaacagaccgagcagctccgcgacgtactgcaacgccgcatcgaggacgcccgccgcgccgacccgtccgccggctacaccgcccacctccgcaccgcactggactaccgctcctggttcaccttccacaccttcgtcgtcgaggacgccgcccccgggcgcagaaggaaactgaccggccgcacgggcctgagccagggcgagcagcgcgtgctctcctacttggtacttttcgccgccgctgccgcccacttcaccagcctggccggctcagccccgcacgcgccccggctgatcctcctggacgacgccttcgccaaggtcgacgaacccacacacgggcggctgggccgcatcctcgtcgacctggacctcgacttcgtcctcacgagcgagcgcctgatgggcaattgggccgaggtaccctccctgcacatctacgagtgcctgcgcgacccacacgtacgcggagtggccacgttgcactacacgtggaacggccgccaccggcggctggtgtcgggatga

SEQ ID NO: 51291 - DNA, 1269 bp, Streptomyces sp. CFMR 7
atgagtacccttccgcccgccacgcgcgactggctggccgctcccggcctcgtccggctctggagcgcggcacgcaaacggctggaaagcaacggagtgcagtccaccggctccctccggctaacggcggtgagttcccaggagcggaacgatctgtcgctcctgctgggcaagcccctcaccggtacggcggtgacagtgaggctcgacgtgctcgacaaacgcctgcggacctcggccgcggggctcgggctcaggcaggtcctggaggaactcggccctccgctcgtcgaccggcgtgcggcccgcgagcagaacgcggcagagcgtcagcgcgtctgggccgcgctcgcctcgtccctcgacgcgtcgccgctggccgggctggcgtgggtggaacagtggtcggatgtgctgcgccgcacaggcgtcccgaaaggtgtggcaccggaaacggccgtacgcacgcttcagcaggccgtccaggtgctcggcgtgctgctcgacccacaccgtacgggcacactgggccgcggcgagctggccgcttcggtaacgggttcggcgcacgggctcgacgacggcacctggctcgctcgcctcgtccagcgtggcatcgccctggcccacgacacggatcttcccggtgacgcggtcggccgaagggcactgtggcggctggtcgcggtcaccccggacgaggtctccagcacagtgctgacgtacggcctccggcccctgggcgaggactggcgcgcgaggtccctgcgggagcgtgccgatcaccatgcggagacccacctgacgtcccgggacctgcgtgacgtgccactttgcctgcgggccggctccgtcgtccacatctgcgagaacccccgtgtggtggaggccgcagcggacgcgggctgttcgcaggccctggtctgcacctccggcagcgccgcgacggtggtcctcacccttctcgacgccctcgcctcgggcgactgccgcttcgcctaccacggcgacttcgactggccgggcatcgctctggcgaaccggatcatgcgccgttacggagcccggccttggcgcatgggcgctgacgactacgaacacctggccacgcgcagccaggccgagggaatccccccactgccgctggtcggtgagcccgtcagcgcggtgtgggacgccggtctcgcccctgccatggcagcgctcggggtggcgctccacgaggaggcgacgctggacctgttggtagacgacctgggtatcccgtag

SEQ ID NO: 51292 - DNA, 1467 bp, Rhodococcus rhodochrous KG-21
gtggccgacgaccggcttcggttgttctcgttcgccacggccgagaagcgggccgaatacctctgggtactgcgggctttcgatatcgctcgggccaactacgtcgtgctgctgcacgccgccgaggtcgtggcgattctcgaacggaccggctcgacggatccggcggcggcactgtccgcccaggacgtggcgcccctgctcgagcagctgcacgcctggggggtgctcgaacgcagctacgacggcacccgggcggcgtcgctggccgagtaccgcaaccggcactacgtgtatcagttcggccgcgccggctaccacgccttccgcgccgtggaggaggtgctgagcgcgcgcggcgaggacgcgtcgctgtcccgtctcgcgctggcggatctgctggccgacctgaccgagctggcggcggcgaacgacgccggggacggcgagctcgtctaccgcaaactgtcgcgactcgacacgacgttgtcggacatggccgaacgggccgcggggttctacctgatgctcggcgacctggtgcgcaccaccgaggtcacacccgaatcgttcctggcgcacaaggatgcggtgctggcccacatgcgggagttcagcaccgacctggcccgctacggacccaaactcgcggcggcgctggcgcgggtgcgggagaccgggatcgaccgcatgctggggttcgccgccgcgcacgacgagcgggtgctgatgcccgtgcccgagcggcacgcggactggcgggcccggtggcgcgggctcgaacggtggttcgtcggcgtcgccgacgtgccgagcgagtcggagcggctacgggagggcacgatgagcgcgatcgccgcggtgctggcgctgctgcggcgattgacggagacccgacgaggcggggtgagccgggaatcgcaactgcggcacctggccggctggttcgcggccgcgccggacgagcagtcggcgcacgcgctgttcgacgcggtgttcgacctgggccgcccgcggcacttctccgtcgtgcatcccgacccggagacggtcccggtgacgacgtcgtggtgggacgcgccacccgtgccgatcgcccggacgctggccgagaccgggcgcaccccgtccgcgggagcaccggcgcgggtacagcgcaacgaatccgggatccggcggttgcgagagcggcagctggcgacgcagcgggcgcgcgccgaggcggcccgctccctcgcggcgggcggcgtggacgagcgggagttgtccgagccggagaccgaggtgctgttgggtctgctcgacgcggcgctgtcggcgcgggttccggtcagcggcaccgtgccgggtgcgacgggcacccagaacggggtacggctgacgctgagcccggcccccgagggcaccgtggtccggacggcgcggggccggctgcatctggacgggctgcgggtgagcgtgcagtga

SEQ ID NO: 51293 - DNA, 1365 bp, Rhodococcus rhodochrous KG-21
gtgagagcccggcggatctcgccgctcgaccgggattcctatcagcgggcggcgcggctgatcctgtcgcaccacctggtgaccacccggtaccccgaccgggccgcgctgccgctgctgcgccggtgggcgacggagctgcgcgaggacctgctcgagctgttcgggtaccggctcgaggtgaccgagacgaccgcacggttgttcaccgtcgccgaccggctcgatcccgggggcggcgcgcgctcggtgaccgaccggcccttcgaccgtcgccggtacgcatatcttgcgctggcgctggcggcgctgggacgcgcgggtgggcagatcaccctgtcggagctggccgagcaggtcgcgtccgaggccgggcaggtgcccggggtcgaactggccccagagcgggcgacggaccgggacgcgttcgtcgacgctgtggcgtggctggcggcgcgaggggcgatcgcgctggcggacggcgacgccggcggctgggtgtcggacccggaccggggtgaggccctctacgacatcgaccggcccgtggttgcggcgctgttccggccgccgcgcgcgctgcagcacctgcactcggtgcggggcctgctcaccgccggtgaccgccccgacggcggccggagcgtgggcaccgcggaggtggcgcggcgggtgcgccgggcgctggtgcagcgaccggtggtgtatgccgaggaactcgacgacgaggagcggctgcagctggcgctgccgcgcacgaccacggggatcgagctgttgacggggctggtggccgagcgccgcgcggagggcgtcgcgctggtggactcgtcggggcggatgtcggatctgcgttttcctggggtggggacggttccgcaggtggcgttgttgctggccggggagatctgcgcgcgggtgtcggagccggggtcggaaccggtgcggtggccgaggccggcggacccggaggcggagctcgaggcgggattggacgccgcgatcccggcggccggggtgttcgcgtccctggcgggtgacgcggctccggcggaggcgccgccggtgccgcagccggcgccgacgcatccgctggtcgaggacagttggctggcggagacggcggcgaagctggccgacgagttcggccgtaccttcgccgcgcaatggcaggccgatccggccggcctgctcgacacggcgctgacggtgttggagcggcaacggctggtggcccgggtgcccggcggggtgctggcattgccggcgctggcccggttccggggcgtggtggtgacggtgcgtgaacgcgacccgcgtctcgcactggccggcgaggattcgaacgaagcggagatgtcgtga

SEQ ID NO: 51294 - DNA, 4146 bp, Rhodococcus rhodochrous KG-21
gtgagcagtgcccgtttccggcccacacgtgccgggatcatcaacctgtgggactaccgggatcaggagttctcgttcgcggatggtcggctcgtgctgcggggacccaacgggtcgggcaagaccaaggcgctcgaggtgctgttcccgttcgtcttcgacggacgcatcgagccgcgacggctgaacccgttcgccggcgaggagcgcacgatgcggtccaacctgctgtatcaggggcaggacagtgcgtattcgtatgtgtggatggagttctgccgcgggcgccgggacgatccggaagcggtgaccgtgggggtcgggatgcgcgcagcgcgcggcaacgacaaggtcacgcggtggtacttcgtcgtcgacggccgggtcggtgtggacttctcgctgctcgacgaggccgatcgtccgctgacacggcggcagctgatcgaggaggtcggtgccgatacggtcacggaccggccggtggactaccgggcggcgatcgacgcgcggttgttcgggctcgggatcgagcgctatgagcagctgatcaacctgatcctgacgctgcgccggccgcagctggccaagaatctggatccgaaggggttgtcgcaggcgctgaccgacgggttgcggccgctcgacgagcagctggtgctcgaggcggcgcggtcgttcgccgacatggaggaggtgtcccgcacgctggaatcgttggcggcggcagacgacgcggcgcagcggttcgtcgcggtgtatacgacctacctgggtcagcaggctcgggccgacgtcgaccggctcggggcccggctggcggcggtcgacgccggcacgtcggagtggacggcgtcggtggcggagttcgaccgggccggtgcggagcgggcgctgaccctcgagcggctcgaggtcgccgagcgggacctcgagcaggcccgcgcgacactcgaggcgctgcagcggtcgagcgcatacgagggcaagcagcagctcgacgatctggcgcaggtggtggcggatctcgagcgcaccacggccgggcaggcagagcaggcgcagcgcgcgcaggcggagctggcacaacgcgaggaggaagcgcgacgggccgcggaggcggccgtggacgcggcggccgccgcgcaccgcgccgaggacgcgctcgccgcggcggcgcgcgatgcgggcatcgagtggacggtgccggccgaggacacccgcggtgaacagatcgcagcgagggtcgccgcgtgcgcggaggaacgggccgcggatgtgcgagcggtgcggacggcggtggcggccgcggacggggcgtcggcggcgcgggtgcgggcggaagcggcggccgagcgcgcccgcgcgcagctcgagtcggcccggatggcggtggacgcggcggacgcggcggtggagtcggcccgcgcggaggcgtcgaacctgttgcgggagtggtggaccggtcatcggcacgcgtggtcggcagtcgacgggccggaggagctgttcgaggccctgggggcggcgatcgcggcggccggtgacgacgaggcggcgacgccggcagcggtgctggccgagcgcacggcgccgatggtcgaggagttacggttccgccgccgcggcctggacgcggaaatcacagacgagcaggagcggatcgcgctgctgcaggccgagcgggacatgatcgaggccgagcgcgacgacgctcccccggcgttccccgcgtcgaccacacctaccggcacgccgggagcgccgctgtggcggctggtgcggttcgcggacgcggtcagcgccgaggcggccgcgggactcgaggctgcgctggaggcggcgaacctgttgacgggctgggtgtgcggcgcagcagaggacgcgcccgcggggaccgcggtgctggtgccggcgccgccggcgcagcggcccgcgggccggacgctggccgacgtgctggtcgtggaaccggacaccggggtgccggccgagcgggtgcgggaggtgctggcgtccgtcgcggtgccggatgcggtgacggacgagaccggcccgggcgtcgacgagcgcggtggctaccgccagggggtgcagctgggtcggcacaccaaggcgcaggccgagtacatcggggcgaccgcgcgggcccgtcgccggcacctacgatcgtccgagctcgaggcggagatcgccgcggggcgggcgcggatggcggacgcggagtcggcgcgggtggcggtcggcgaacggctggcgcggctggatcgggccgcctcggcggtgccgcgcaccggcgcggtgctcgcggcattgcggaaggtcagcgagtgcgcgggggcgctgcgcaccgccggggaggcggcggccgcggccgaccgggacctcgatcaggtgatcgccgaatgctccgtgaaggagcggcaggtgcggtcggtggcggcccggcaccgggcgccgcacacgacccgcgagctcgagcagctggcggcggcgatccggttcttcgagtcgcagggccaggcggtgttgcgcacccggcgcgagcaggtcgcggcggccgagcgcgcacgggaggcgcaggtgcggcgcgacgacacccgggcggcggccggtgcgtccgccgaacgggcggtcacggccgaggagtcgctgcggcaacagcagcagcggctggcgacactgcgtgaggcgttgggcgccgacgcgcagcagatcgacgcgcaactcgcacaggcccgcgaacggatcgaggcggcgcggacggagcaacgcgccgcgcgccgcgcgcacgacgacgcggtcgaacagctcgggaaggcggaggcggcacatgccgcggcggagcaggcgctgcggtcggcgctgaccgagacgcgggttgatgcggcgcagctggcgccgtatgcgcggccggatgtgctggcgctcctggggatctcggaggagctgcggtggccgtcggcggcagtggagtggccggcgccggagcaggctcggctcacccgggcggccggggacgtgcctgcggtgcccgcggcggtgggggcgctgtacgcggcgctggcggcggcgacggcgacggtcaagggcggggacggggcccgcaaggcggcccggtcggcgttgacggcggcgttgcaggagttcgacggtcagctcgcggcggccggtcaggactatcggctgcagtgggatgcgccggaggggttgacggtggtgcgggtgcaggacgagcaggggttctcgtcggtggcggagttcgcggtgcggatcggggcggcgcggcgggagcaggagctgctgttgaccgacgcggagcggcgcatcctcgaggatgcgctgttggcgggcttggcgcagcagatccacgagcgcaccgaggacgcgcgggagctgatcgcccggatggggacggagatgcggcaacggcgcatgtcgtcggggacgacggtgggagtgcgatgggtgctggccgatcatctcgacgatcaggcacgggcggtgtgccggctgctggatcgggaggtgtcggcgctgggtccggaggagctggcgcgggtgcgggcgcatttcgcggcgcggatccgggcggagcgggcggcgcatccggagtggtcgtatccggagatcctggcgacgacgctggactaccggcggtggcgggtgttctcgttcgggttgatcggcgcggacggcacggaggatcggttgacggtggcgcggcattcggcgttgtcggggggtgagcagtcggtgtcgctgcatctgccgttgttcgcggcggcgcacgtgatgctggattcggcggatccgcaggcgccgcggttgctggcgttggacgaggcgttcgccggggtggacgacaacgggcgggcggagttgctggggttgagtgtgcagttcgatctggatctgttcatgaccggctacgacctgtggatcacctatgccggggtgccggcgtgcgcgcattacgatctggcgcattcggtggccgagcacacggtcggggcgacgctgttggtgtggtcggagggcgggttgctcgccgagcacgacgggtcggatctggcggcggcgctggggtcgccgggcacgcggcgggtgccggcggtggtggagggggcgctcgagttcgcgtag

SEQ ID NO: 51295 - DNA, 1539 bp, Nocardia sp. NRRL S-836
atgcgcgtgccatcggagatgttccggttcaccacgggcgagcgggcggagctgtacgtcgcgatcctaaatgcgttcggcgaggccaacgaacggcttgagaccgctctcgggctggacgacgtgcggtcgagacttcgcgctgtcggttggctcgaccccctcgatgaccaggatctcatcgacgcgctgggcagcttgcgcggctgggggctgctcgacgtcacccagaaccacgccgaaaactaccggaccgccgacgagtacgagcggcgcaacatccagtactcgctgaccagacgaggtgaggccgcacttgccggggtggtgcacgcgatgggcgtgctggcctcgaccggagcgctccagaccgccgttctcgatgcgatcgcggaccggcttgctgaactggccgtgcacctcagtgatcacggcgcgccagatcgccgggtcttcagcacgctggtcgaactcgaaggtcacctggaagccctgcggggcaacacaaagcagttcaacggcgaactccagcgcctgctgcgcgccgagggcgccgaccaggacaccttccgcgaggtcaagtcggcgaccgtggcctatctccaggagttcaccacgaacctggagcagcgcacgcacgcgatcgccaatcggatcgccgtggtcgagggctacggtgtgcctctgttgcatcatcgggcgttgctcggcgcagagctcccgcccaccgggaacgacggtgcggacgtggcatggctggagctgcgccgggccagatgggaggggttgcggtcgtggttccttccggtggacggcagcacaccgcgtgccgagcagctgttcacggtcgctcggcgcgcgatcatcgcgttgttgcaggtcctggaccggatcaccgaatctcgacgccgatcgaccagcgcggcggccgacttccgtgagctggctcgctggttcgccgcggcgccgtcggaggaagacctgcacctgctgtgggccacggctttcggcttcggttcggcccggcacgcccacctcgcgcacgccgatcccgaactggtcagctcgtcggccggctggtccgaggcacctcccgtggaggtgtccgcgctcctgcgcagtgcgggccggaccgagcggttcagccgcaccggacgagtgcgcgacgtggcggcggtcaaggcggtgcgtgccgaacgggctcgcgctgagcgggccgcgctgaaggccgcctgggaccggctggacaccggaggcggcatccggctctcccggttcgcgcaactggaacacgaggtgctcgaacggctgctggagttgctcggacgagccttggccacagcgccggacccgcacggcgtccaccgggccaccacgggcgacggacgggtggagattctgctgaccccgccgcgggagcaccgtgagcacgccgtgatccggagcccgcgcggggtgttcatcagcccggactacgacgtcgagatccgcacggcgggtggccgcacgacacgcccccgggaagctgaggccggatga

SEQ ID NO: 51296 - DNA, 1233 bp, Nocardia sp. NRRL S-836
atgagcaacctggcgaaccagctggtcatcgccgaacgcgaggaggtctcgcgggcaatccgcctgctcctcgcggcaccgctgatcagcgccaggaccgcaccggaggcgttcgacctcgtgcgcaggcggcgggacccggtcgagaagtggttcgactactactgcgggtggtcgctcgtggtcgagccgcgcttgggatacgcgcggctggccaaggtcaggctcgccaccgatcccacccgtccggcacgacggcaccgtgccggccgtgccccgttcgaccgccgccggtacacgctgatgtgcgtggtggccgccgagctgctggcgattccggtcaccaccatcggactgctggcggaccgcgtcgtccaggcctgtgcggcggacccggccctgccgcggttcgacacgtccagtcgcgccgaacggatggcgttcgtggacgcgctgcgcctgctggagtcgttcggcgcggtcgaggtggtggacggcgtcaccgacgcgtacgtggactccgccgcggcgaaggtcctctaccaggtggatgccacgctgctcatgcgcctgccggcggccccggtcggcgcctcgcaggtggcggtacccgccgacgaggtcccgttgctcttcccggagctgctgaccaggctgtccagggaacggcgttacggcgacaccgacgacgaggtgtccgacgtgcggcgcaacctgaggctgcggcactcggtgttccgcaggctggtcgaggacccggtcgtgcaccgtgacgagctgacgcccgcggagctcgcctatctggaatccccgacaggtggccagctcctgcgccgggccgccgaccaggcgggcttcctggtggaggaacgtgccgagggcttcatgctggtcgatccggacggcctggccaccgacagccggttccctgacgattcgagcaacgccaaggtcgccgcactgctgctcctggacggaatcgcgtccgcgcccggacctgtcgccgtggaacagctgcacggtgaggccgacgcgctcctgaaccgatttcccaaatgggccaagggttaccgcggcgagaacggttccggccggctggtcgccgacgcactcgaagtgctgaccgcgttcggcctcgtccgggtcggcggcggagtcgtgcgagcccgtcccgccgccgcccgctacgcggtgacccgaaccagcaccgacgacgtcgaggacgagccatga

SEQ ID NO: 51297 - DNA, 4065 bp, Nocardia sp. NRRL S-836
atgacggtgaccgaactgccgagcgccagcaccggcacggagcccgcggcagtgatcaggtgggtgccggaacgcgccgggatcttgaacgtgtggcgctattacgacgaggtcttccgattccacaaaggacggttgctgctgcgcggccccaacggcaccggcaagtcgaaggcgctggaactgctgctgcccttcctgttcgacgccaatctgcgcgccaaccggctgtccacgttcggcacgtccgagcgcaccatgcactggaacctgatgggtgacggggcgtccggtgccaccagggtcggctatgtgtggctggagttccgcttccccggtgcgaacggctcgctggacaggtggttctcctgcggcgcaaggctggccgcgaccaagcacaccaccaccgtgcacccggactacttcaccaccgacctccgcatcggtgtaccgaacggcctctcgctcaccgaccagcacggcgcccccctcacgaccaaggcgctggaagccgcgctcggcgagcagggggtgctccaccagaacgccgcggactaccggtccaccgtgcgctcgaccctgttccacgggttgagcgaacagcgctacgacgcactcatcacggccctgctccagctccgcacacccaagctctcgcagcggctcgaccccgtgctgctgtccacgctgctgtccaaggccctgccgcccctcggcgaggcggagatcagcgatctggccgaaggcttcgaacgcctggaccggcaacgtgaacagctcaaccgcatggacgcggaagtggaggcagcgcagcgcctcggagcgaggcaacgcgcgtacgcccagcgagtgctgcgcgccgctgcggcgaagctgatctccgcgacgaccgagctcgggaacctggcggaggccgcgaagcgctcggccgaggagcacgaacgtgcggcgctgcgcaaggaagaagccgaggcgctcgaggatcagctggaacggcggatcgtcgacaccgacgggcgtgttcaaggcctgatcggtagtgaggcgtaccggaagggtgaacagctcgaccggttgcgaacccaggtccgccaggcgcgtacggccgccacgacgaggcgcgccgacgcgacccgccatcgcgagaccgcccgggctgatgtggaggccgcggacaccgccgccaggcacgtggaggcacggaccaggaccgccgcggcgctggccgaagtcgcgtcaaccgacgccacccgcgtcgggctggcctccgtccacgcggagatcaccagagccctcgacgatccctctcggtcgcggggtctgctgcgcgccgcggtgcaggcacggggtcaacaggtggaagccgtgcgcgccgcgttgagcgagcacggggtcgccgtcgcgggcaggaaggagacggagcaggcactcgacgaggccagggaagcactcgcggacgccgttgaacggcgcgcggtgctgagcgcccgccgcgacgaagcactcgcgaagctgcaagacgccatcgtgacctgggcggcgggctgccgcgaactcgtctttcccgagcccggcgcgctcgcaggtctcgctgcggcggagaccgccctgctgtcccaggtcgacgccgtcgccaggcgcgtgctggatgccgtcaccagggaggagaccctggtggaaacggcgcgggaagacaccgaacgtgaacgtggcgcactgcgcgaggaggtccgccggctgctggccgaacaggacctgcctcccctgccagcgcacacccgcaccaccgaccgcacaacgatgaacggcgcgccgctgtggcggctggtccgcttcgccgacgcagtgccggaggaggtccgcgcgtcggtggaagccgcactccaggcgtcgggcctgttggacgcctgggtcggccacgacggcgcgatcaccgggcacgacacgttcgccgtgcccggctccgtacccacggcgccgggccggtcgctcgccgaagtcctcgtgcccgaggtggacacgcccgtgaccaccggcgtcgtcacccgcctgctgggtgaggtggcctacggcgaacacccgccaaaggggcacccggcggcgatcggcgccgatggcggctggcgcctgggcaccctgcgcggcacgtggcagaaggatgaggccgcacacatcggcgcgttcgcccgacagcgggccaggcaacgtcggttgaccgaactgcgcgagcggatcaccacgtcggaagagctgatcgagacgcacaacgccgcgctgcgaacgcttgcgtcacgcaggtcggccgtccaggtcgacctggatgcgcggcccggccatgccgacgcggacgcggccctggaagcactcaccagggcagaggcggcggtctccaccgtcgatggcgtggtccggcgctcgctggacaccctgtcgaagcaggagcagcgcgttgaccgcgccctgcgcgagctgaccgcggccgcggccgaacacagcctgcccacggagcgaaaggcgctcaacgccgtggcggaggccgtgaacgccttccgcgccgccgccgacgcgtggatcgacgagcacaccaccctggtcgcgacgcgtcgcgaagccgaccgaaccgccgagcaggcccagcgttcccggctcgtcgccgagcagcgagaggccgaggcggacgaagccgaagccgtggccagcagactggacagtgagctggacgccgtcgagggcaccatcggcgtcgacttccggagcgtgctcgaccagctcggcgccctgcgggtcgagctcgacgaactcaagcagcaagtgggcaggacgcgaaaggagatcagcggcctggcccagcggctgggtgagctgaccacccggcgcgccaccgacgcggaggttcgcgacagcgccatcggagttcgcgaccaggcggcaactcgcttccgccacctggcgaacggcagctttcccgcggacagcggcttgcccgacctggccgcgttcaccgaggcgctcacgacgtccaccggtgtccgggcgactctcgacgcggcgaggacggtcgcagcctcgtggccgacgctccctcactcaccgaagaacatcggcgacgccgcacatcggttggccgaggaggtgcacgcgtcccgcgaggtactcggcggtcgcgccgacctcgagctcgactccgacgagggcgtccaggtcttctccgcgatggtggacggaatgcgcatcggcgcgttggcgctgttcgaccggctccgatccgacgccgagcgcagccgggaggacatcaccgcacaggaacgcgaactgttcgaccgaaccctcaccggcgacacccgccgccacctcgccgcccgaatacggcaggcgcacgagctggtcgacggcatgaacgcccgcttggagcgcgtgcgcacggcgtccaaggtggcggtgcgactggtgtgggaagtctcgccagacctgccggccggcacgagggcggcgcgcgacctcctgctcaaggatccagtgcggttgagcgaggccgatcgcgagtcgctgcaccgattcttccgcgagcgcgtcgagcaggccaaggccgatgagtccgccgcgggctgggaacagcaactggggcaggtgttcgactacaccgcctggcaccggttcgtggtgaaactcgaccgcatgaacggcactggctggcagccgttgaccaagaaacttcacggagcactctccggcggtgagaaggcgatcgccctgcacctacccctgttcgccgccgtggcggcccactaccaggcagtcgcccgagcaccgcgggtcatcctgctggacgaggtcttcgtcggcgtcgacgcggtcaaccgcggccaggtcttcgagttgctgtccgcactggacctggacctggtgctcacctccgaccacgagtggtgcacctaccgcgaactggacggcatcgcgatccaccagctgatcacgggtggcgacggagaagaggccgtgaccaccgcccgcttcgtgtggaacgggaccgagatactcgacgagagggaagaggaagtcggttga

SEQ ID NO: 51298 - DNA, 1221 bp, Nocardia sp. NRRL S-836
atgcgcgcgttagaccgactcgggtcgccagccctgatgcccttgtggaaggccgtgcacgaccggatttcgtcgggacgtcaggtcagccgggtgaaggccggccccctcgacgaggaacaacggtcggctgtggccgatctgctgggaactgatcgcctgccgggcgagtacgcgacggtgtcgatggccgcgctcgacgagttgctcatgtccgcagtgggtgccggggcgcgcgaggttgtcgtggccctgctgggaccgctggacgaccgggccggacagcgggcgttggccgatgcctcccgctccgagctgtgggcgtggctggacagccatgtcgtggttaccagccaaccggcgttgaaggggtgggtggagtccattcggcgcgcagggctcgtcgccggttctgtcgagcgcaccaggagggaactcgatcgcgctttgcgaatcctcgccgcattgcccgcggcgggcgtgcctctgccagtgctcgcggagaacctgctcggtgatccgcacgccctggacgagggaacgcggggcgcggggatggtgttgcgggcactggcggagttgcacgacgtggagctgccggggaacgctcaggagcgtcgggcgctgtgggagagcgccggggtggtcgaggacgagctgtcgtcggtcgtcttggccgccgggctgaggttgagcggtgtcggcggacaggtcctgcgggtgtgtgcggacgaggggcacgtcgcggccctgacgttggcacaggtgcgggccacctcgttcgtcggcgcgccacaggaggtgtgggccttcgagaacccgagtgtgctcgcggtggcggtcgcccggctcgggccctcgtgcccgccgatggtgtgcacgtcggggtggcccaacagcgcggtgatcgccctgctgcgcgggctggccacggaaggatcctcgctgcgctaccacggtgacttcgacggtgagggcgtgcggatcgccgcgcacgtgatcgcccgcacgggcgccacgccttggcgcatggcaactgaggactacctgcgggcgttgggtgacggcacgccggtgggacgggtcaccgaggcgccctgggacgacgggctggccagcgcgatgcgcgagcacgggtcggcggttccggaggagcgggtcactgctcgcttgctggacgagatccaggaacgcgggcgggttgtcggtgggctgccgtag

SEQ ID NO: 51299 - DNA, 1374 bp, Nocardia sp. NRRL S-836
ctgttccgcttcaccacggcgccgaacgcggagctgcacacggcggtcctccacgcgttcggcgaggcgaacgagcgcctggagatcgctctcaccttcgacgacgtccaccgcgagctgcgcaggcaccaccgcccggtcagcgacgaggagctcaccggggcgctggccggccttcggcagtggggtctggtcgacaccgttcagcgtcacgccacgcaccacacgaccgcggccgactacgagcgcgagaacctccgccacgtcctgaccaggtcgggcgaggcagccgtcgccgccaccaggcacgcgctgaaggtcatgaacagcaccggctcgctcgacacggccaccctcgacgccatcgcggaccgcctcgaagagctgcacacggccgaaacccgcacgtacgcggcactcatggagctcgaaggccacctggacgccttccagaccggcgtccgactgttccacggcgagctcacccgcctgcacgaccaggccgaccgcgacaccgtcgcccacctgcagacgttcgtgagcgacctcgacacgcgcaagcaccgcatccgcgaggccctcgcgaaactctccccggacgacctgcatgaacgcgctctcaagaacgccggcgtccgtgacgaacgccagtggcggcaggagcgcgccgaccggtggcgaacgctccaggcgtggttcgacggccccaggatcgaccggttggaggagatcgcccgcaccgcgatcgtcgacctcctgcgcaccctcgaccggatcagcgagcaacgccgcaagcccaccaacaccgccgccgacttccgcgcgctcgccggctggttcgcccgcacgagcagcgacgacgaggcgcacgagctgttcaacgcggcgttcgggctgtggccggcccggcacgcgcacctgcagcacgcggacggcgagctgatcccgagcgccgagccgtggcacaacacgccggcggttccggtgtcgccgcagctgcgccggaccggcaggcaggagcacatcggcgccaccggcaaggtccgcgacgtcgagcagatccgccgggcccgcagggagcaggcgcaacgggaacgccacgagctggagctcgcgtggcagcagctgcagaccgacggaccgatccggatctccagtctccagcagctcgaccacgacacgttcgaccggctgctcgacctggtcggccgcgcgctcggggcgatgccggacagcaccggcacccgcgccgcctccaccagtgacggccgggtgcacatcaggctgcgcaacgcccgcgggtgggccaagatcaccacccagaggggtacgttgagcggtccggactacgtgatcgaagtgcagcgccgatga

SEQ ID NO: 51300 - DNA, 1155 bp, Nocardia sp. NRRL S-836
atgagcaggacgggaaaccagctcgcccggttggagagcgaggaggtggcgcgtggcatcaggatgctgctcgcgagcccgttgctgaccgccgcgcgcgagcccgacgggttcgacctggtccggcgccgccgcgagccgatcacgaagtggttcgactactactgcggctggcggctgcatgtcgaaccgcgcgccgggtacgcccgcctcaccaagaccacggatcggccggatcccacgcgtccggcacgccggacgaggtcggggaacgcgccgttcgaccgccgccgctacacgctgctgtgcgtggtgtgcgcggagctgctggccggtccggcgaccacgatcgggctgctcgccgaccgggtcaggcggtcgacggcagtggagggcctgccggcgttcgacccttcgcgccgtgacgagcggtcggcgttcgtggacgtgttgctgttcctggaacaccacggcgccaccaaacccgtcgacggcgcgacggagagcttcctcgaccaccccggcgccaaggtgctgtaccgggtcgacaccaccctggtgacccggctgctcgccgcaccgaccgcgccgtccacagtggacagcatggccgacctcacgcgcgagaaccggtacgacgacagctccaccgcccagcgcaccctgtggaccaggcactcggtgctgcgcaggctcgtcgacgacccggtcgtctaccgcgacgagctcaccgaggaccagcgggcgttcctcgcctccccgagcggccgcaagctggtgcacaccgccgtcggcatcgccgggtgcacgctggaggaacgcgcggagggtttcctggtcgtcgacgccgacgcgatcgcgaccgacacgcggttccccgacgacgacagcttcgccaaggtcgccgcgctcatcctgctcgaccggctcgcgcacggcgacgcgaccgaggacgacctggtcgccgagaccgaccagctgctgacccggttccccaactgggccaaggcataccgttccgacggcggcgccgcgcggctcgcgcaggacgggctcgcgctgctgcgcgcgttcgggctggcccgcaccgagaacggcaacgtgagcaggctgcccgccgcagccaggtacgccgtcgaggagccgcatgactga

SEQ ID NO: 51301 - DNA, 3870 bp, Nocardia sp. NRRL S-836
atgactgaccggtggcaacccagccgcgccgggatcatcaacgtctggcgctactacgacgagatcttcaccttccacgagggccggctgctgctcaggggcccgaacggcaccggcaagtcgaaggcgctcgaactgctgctgccctacctgttcgacgcgaacctgcgcccgcatcgcctgtcgacgttcggcagcgcggaccgcaccatgcactggaacctcatgggcgagggcgtgcacggcagcacgcgcgtcgggtacgtgtggctggagttccggcacggcgagcggtggttcacctgcggcgcaaggcttcaggcgacgacgaacaccgacaacgtcaccacgcactacttcaccaccgaccagcgcgtcggcgacctggcgctggtcaacgaggccgggcggccgctgaccagctccgacctcgccaccgcgatcggcgaccacggtgccgtgcacgcttctcctgccgaataccgcgacacggtccgcacgacgctgttccccggcgtgagcgagcagcggtacgactcgttgatcaccgcactgctccagctgcgcacgccgaagctgtccgaacggctcgacccgagcgtgctgtcgacgttgctgtccaaggcactcccgccgctggacgccgaggagctcggtgagatcgccgagggcttcgagctgctcgacgggcagcgcgaggagctgcggcgtctcgacgaggagatcgccacggcggaggtgctcgcctcccggcaacgcacctacgcccagcgcgtgctgcgtgcggcggccacggcgttgacgaccgccgaggccgagctggccgaacgaacccgtgccgccgaggagagcgagaaccgctaccggcagcaggtcgtccacgtcgagcagacggcggaccagctgtccgcgctgagcgccgaggtgagcggggtggacgccgagatcaccgggctcaccgagctgcctgcctaccagaagggcaagcaggtcgaccggctgcgccgccagctcgacaccgcgagctcgtgggccgccgacgccgccgcacacgcggagaagctgcgcgcccgtgccactgaggacgcggaactggctgccagggccaggtccgcggccgcggacctggccgagcacgtgcgcaagtccgccaccgaggccgagcacgccgccgaccgcgcgggcatgccgtcggtgttcgccgagctcgaccgcggcaccgacgtgcgcgtgcaacggcagctgctcgacgccgccgtcgacaccaggatcgcgcaggtcgcggagatccggcgggtgctgctctcgcacgcccaggccgtgcacgcgcagaaggccgcgcagcagcggctggaggagacgcgcgaggagctggcgcaggccgaacaggcggaagtgcaggcgcagcaagcacaggagcaagcgtttgcgcggtacgcggaggacttcgcgacgtgggcgcgtggttgcaccgagctgtcgctggccgatcccaccgagatcctgcccgcggctgtcgtggaggccgccgcgctggcccgtgaggagttcagccgcgccgaggcgacgttgcacgagagccgcaacgcgctgaaccgccagctcgtgcagtacaacgccatccgcgagaagctggccaaccaggtcgacgtgccgccgccggcgccctacacgcgcgatctcgaccaccgcatcaccgccgcgggcacgcctttgtggcgccttgtcgagttctacgacgacgtgccgacctcgttgcgcgggaccgttgaagcggcgctggaggcgtccggcctgctcgacgcgtggatcaccccgggcaactcgttcggcctgagcgacgaggaccgcttcgccgaacccctgctcgccgcgcccgcacccggccgcaccctgctggaggtgctggccaccgaggacgagcgcgtccaccagctgctcgaaggcatcgcgttcggggagacggcgaccggtcacaccgcggcgatcggcgccgacggcacgtggcggctggccgcggcgcacggccgctggaccaagcccgaacccacttacatcggtgtggccgcacgggaaaggggccgcgcccgccgcatcgccgagctgaccgcgtcgatcgaggagctcgccaccgacctggccggcctcgacgccgccctgtcgctgctctcggtccgccgcgcgacgctggccggtgagatcgcccgccagccgtcccacgacccgctcgaactggccggcgaacaccgcaccagggcccagttgcgttgtgcggcacgcaaagacgccgtcgctgctgccgcggcccggtgcgcggaggccgacctcgccgtcaccgaggcactgcgtgccgtcaccgcgctggccaccgacctgcccaccaccgagcagggcctcgacgccgtgctggccgcggtgtcggccttccgcaccaccggccaccgctggctggacgaccgcctcgacgccgcggccgcggaaacccaggcggcccaggccctggcgcgtgccgccaccagcggcgagctcgccgacgaggcgtcggagtcggccggcacgcagcagcaggaggccgagggcctcgcgatcgtcctggagaccgtcgaacggtcctccggcaccgagtaccgcgagctcgaccagcgcctcatctcgttgcgcgcccaggcccgctcactgctcgactcgcaggacgcgttgcggcacaagcaaatctcgctggcccgcgtgctcggcacgtgggaggaacgccgcaaggccgacagcgcacgcgccttcgaggccgccaccgcccgcgaggccgcacacgcccgcttcggccacctggtcaccagccacctccccgccgacgccgaggtctccgcggtggacgccacggcgctggtcgaagagctcgcggacatccccttcgagcaacgcctgatccgcgacgccgaagcccacctgaacaacaccgtgcacgacgcccgccaccaactagccggccgcgtcgacctctccctcgaacccgacgacgacgtcaccgtcctcaccgccaccgtgaacggcgtgcgcaccggcgcctccggcctgctgaccaccctgcgcgccgaccgcgaccgcatgctcgcgcacatctccgacagcgaacgcgcgctcttcgaccagctactcaccggcgacacccgccgccacctcgcccagcgcatcagctccaccatcgacctcgtcagcaccatgaaccagcgcctcgaacgcgtgcagaccgcctccaacatccgcgtgcggctcgtgtggcaggtcgacccgcaactccccctgggcacccacgaggcccgcgacctcctcctccgcgacccgtccggcctcaccgacgacgaacgcgcggccctgcaccagttcttccgcgagcgcgtagaagaggcacgcgcccacggcaccgccacgggctgggaacaacaactcgcccaggtcctcgactacacgacctggcaccagttcgtcgtgaaggtggaccgaggcgacggctggatccccgtcaccaaacgcgtgcacggcgcgttgtccggcggcgagaaggccatcgtcctgcacctgccgttgttcgccgcggccgccgcccactaccaggccaccccgaccgcaccccgcctgatcctgctcgacgaggtcttcgtcggcgtcgacgccacgaaccgcggccagctgctggaactgctcgtggcgttcgacctcgacctcgtgctgacctcggaccacgagtggtgcgactaccgggagctgagcggcatcgcgatccaccagctcacgaccgggaccgacggcgacgacgcggtcacgaccgtgcggttcacgtgggacggccacagcctgcagccggacgagtcatga

SEQ ID NO: 51302 - DNA, 1458 bp, Nocardia sp. NRRL S-836
ctgaagctgtacgcctatctggacgcgcgcgatcaccagcgcacgtacctggcgatcatgcggctgttcacctccacgttgctcgcggacctcagcgccggcgaggtcgcgggagcgctggccggccaggaacgcgagggccgcgtcgaccagggcgagtcgcgcatcgagaacgtcatcaaccggctcaggcagctggtcgagtggggcaacctggtccagggccggcgcgaggtcgtggcgaccagcatcgccgagttccagcacggcagcgtccgctaccaggtctccaagctcgccgtgcgcgtgcaacgcgacgtggacgagctgctgcgcgtccccgagggcgcccgtgaggtgtcccgcgagctgctgcccgccatcgaacgcggcctcaacgagctcggcggatcgctgagcgtcgccctgctcaacgagggcgaccggaccagggagctgctcgccgaacgcgtcaccacgctgttcctgcagcacgccgagctggccgccacggtccgcgacttctacgcctacctcggccaggtcgtcacgcggaaccacctggcgcccgacgagatcgcgggcttccgcaacctgctggtcgagtacatccagcgggtcgtggaggacgtgctgaagtacacgccgccgatcgccacggcactggcgggcatcgcgagggcgcgctccgagctgctccggctgctgggcaccgacctgggcacgaacgtcgaacgcgcccgtggccgcacgccggaggactggcaggagctgaccgactggttcgtggaccggcccgggcgcccgagccaggtcacggcgttgcgcgaggccaccgcccgtgcgatcggcagcctgctcgcgagcgtgaagcgggcgacgtccggcggcggcctggtgccgggccggcgtgccgagctgctgaagctcgcgagctggttcgacaactccacccgtgagcaggcgcacgagatctacgcggccgcgttcggcctgtactccgcgcggcacctctcccccgcgcccgagcacgactccgacaacgagcgcacgccgtggcgtgacggcccggtctgcgacgtcacggtcagcgtgcggtcgcgcggtgaccggggcgggcgcgggcgtccgtcgcgcatcctcgacgacccgatgaccgagcagtcgctgctggcggaggcccgtgaggcggaggagatccgcgcgcggcacgtcgcggagctcacgcaggcggccgggaagctcgacgacaccacgctgtcgcacggcgcgctggaggtgttctgcgagctgctgacgctggcgatggcccagcgcgactcgccgcgcgacagcggtgccgccagcgatcccgtgcgcggcctgaagctggagatcacgcccggcacgaccacgcggatctcctccgccgccgggacgctgaccctgcacgacgcgacggtggcgctgaagcgatga

SEQ ID NO: 51303 - DNA, 1191 bp, Nocardia sp. NRRL S-836
atgaaccacttcgacaccctctccgagatcgacgccgccaacgtggtgcggtgcgcgcggacgttgctgcgcaggccgttgctgcgctccgacggaccggacggcgagctgctcagcctcgtctaccggcaccgggccgtgctgcaggacctgttcgcgggcctgctcgggtaccggctcgtggtggagcgccggttcgcgcggctgtacaagtcggggccgggcaacgacgacacccgcggtgtgctcagcatgtcgccgcgcgcgtacgcctacctggcgttgacgctggcggtgctgacggggaccggccggcagacgctgctgtcccggctggtggcggacatccgttcggccgcgggggaagcgggcatcgacgcgccggacgacgtgagcgagcggcgggcgctgaccgcggcgttgcgccacctcgtgtccctcggcgtgctgcaggagaccgaggggtcggtagcgcaggacgtggtcccgcaggaggcgttgctgacgatcgacacggacctgctgggccagctggtcacaggtccggtcggtgaggcgtcgtcgccggagcggctggtcgagctggcggcgcggccgggtccgcgcggtgtcgagcacgcggtgcggcgcaggctggtcgagacgccgctggtgctctacgcggacctgcccgacgaccaggcggagtggctgcggcgcaaccagcgcaaggagacggcgttgctggagcaggcgttcggcctgtacaccgaatgccgcgtcgagggcgtgctggcagccgaccccgaggactacctgaccgacctgtcgttccccggtgtctcgacggtcgcgcgcctcgccttgctggcgttgcccgacctgctggacgacccggcggaggacgcgcccgcacggcacgtggtgtcggtcgaacggctgcgcgaggtctgcgcgcggctggtggaggactacccggccgcgtggtcgaagcagttcaccgacgacctcgaccggctggtcgccgaggtgacggaactgttgcggcgcatgggactcgcggtcccgtgtgccgaaggctggtcgatcagcgctgccgcgcaccgctggttgccgtcccccgacggcgaccccgagcgagaacaaccggaacccgttgcggtgccccaggtgccgagctggtccctgttcgacgaggagaacgtctcatga

SEQ ID NO: 51304 - DNA, 4314 bp, Nocardia sp. NRRL S-836
atgagcagatggcggctgcaccgcggcggcgtggtcaacatctggcagtacaccgagcagacgttcgacttctccggtggccgcgcgatcttccagggcaccaacggttccggcaagtcccgcacgctggagctgctgctgccgctgtgcctggacggcgacctgcgccagctcggctcgaagggcttcgacacggtcagcatccggcgcctgatgctcgacgactacgacggcggcccgaaccggatcgggtacgcgtgggtcgagctggtccgcgaggccgccgaccactccggcaacgagtacctgacctgcggcttgggcgtgaaggcgtcgaagacctcgcaggcgatcacggactcgtggcggttcgtgacgccgctgcgggtcggcaccgagctgcagctggccggtccggaacgcgtgccgcacggtccggcccagctgcgtgacctcgtcggcgcggactgcatgttcgaggagccggcgttccgcgcgaaggtcgcggagaccgtgtacggcgtgccggcggcgcgttacggcgacctgctgcacctgcagcggacgctgcgcaacccggacgtcggcctgaaggtgctggagggccagctcgaacagatcctgagcgacgcgctgccgccgctggaccaggtgatggtcgagcagctggcgacgtcgttcgacgacctggagtcgatccgggagaacatcgtccggctgtcctctgcggacagtgcgctgtcgacgttcctgaagacctactccgactacgccttcggcggtctgcggtcggcctccgagcggctggacgcggcggaccggtcgctgacccggttgcagcgcgagcagtcgaagctgacctcggaactggacgtcacgcgcgtcgagcgcgcgtcggccgagcaggcactcgtcgacatggagacgggcgagcagcaggcggaggagacgatcgcggcgctgaaggagctgcccgcgttccgcgacctgcaggacctcaagacgcgcgagaacctggtggcggagaagcgttcctccgccgtcgccgcgctggagaccgctcaccggcagcgcgcccaggaggacgccgccgtcgacaacgtcctgcggctgctgcgcaggctggccgaggacctgtcggccgcggacgcgctgagcccgccgctgcgggagaacctccgcctggccggcatggaccccgacctcgcgcccgtggtgccgcaggtcccggccgccgaggccacggtgaccaccgcgaccgtgcgcgccaagcccgaccccgaggccgcaccgctgccgatcgaacgccgcatccccccggccgccgccggcgaggaggtgctcaccgacctggccgcggtggtcgaccaggccgtcgccatcgcctccctcgcccgccagcggggcgcgctggcgttgtcgctgcacgaacaggccctggccctggacgcacagcagcgcgaggtcgagtcgctgcgcggcaaggcccgcgacgcccagctcgccgccaccgagtcgacggcgctgcgcaaccaggaggcccaggagctcgccgaggtcgtacaatcgtggttggcgcaggtagagacgtggacgaccagcggcccgctggtggacgagcgtcccggattcacccgatcgagtgagtctcgatctgccggttcgtccgtctcgctaataggaaacgcgcggggcggcgaccgggaggatgcggacgggccggtgttcggccgttcgacttcggacgggtcgggatccggtgggtctggatccggtgggtctggatccggtgggtctggatccggcgggtcggggtccgggttgggatccggtgggtcggggtccggtgggccggcgttcggccgtccggcgttcgaccaggacgaccgcccggcgttcccgctgcccgccacggtcacccccgcctcggcgaaggcgctgagcacggcggcccgcgagtgggtgggcccgctggtgcgcgccgcccgcgacgccgcgcacgcccacggcctgcagcgcaccgagctgcgcgcccgcctcgacacgctcgacgaggagctgatcggcctgcgctcgggcgacgagcgcgtgccggtgcccggccagtacgtgtcggcggaccgcgacccggcgaccggtgccccgttctaccgccttgtggacttcgcgccgtcgctcaccgacgccgaacgtgccgggctggaggccgcgttgcaggccagcggtctgctcgacgcctgggtgacgctcgcggacaccgagctgaacgacgtgctcgccgtcgccagcccgcccgtcgagggccgcaccctcgcccacgtgctggtgcccgcggtggaggggtcgccggtgccggaggggttcgtcgcggacctgctgcgcgcggtgtcgctggacgaccgcgaaggcctgagcctcaccacggacggcgagtggcgggccggggtgctgaccgggcactggaccaagccccaggccgagttcatcggcgccggcgcgcgcgaagccgcccgtgggcggcggatcgcggcgttggaggaggagctcgcggagctgcgccagcggctgggcaccgcggaggacgagctggctcgcgcgcacgagcacgttgcgacgtgggaggcgcacgtggcggcgttccccggcgagggcgagctgatcgcgaagcacagccgggtgcaagcggcggaggagtcggcggcgcgggcggcgcagcggacgttcgagctgcgggaggcgttggaggacgccagcgcgcggctggaggcggcgcgcggcgagctgacccgtcaggccggtgatgcggggttgccgtcggacaccgaggcgttgcggcaggcccaggcggcggccgcggacgcgcggcggaccgcggacctgctcggtgacgcggtcaggaggcgttgccagggcacgatttccgacctcaccgacgcctcgcaccgctaccacgaggccgttgcggaccggcagtccgcggaagccgacgccgacgcgcggtgcgtcgaccacgcggcgcaggcgggcacgctcgccgagctgacggacgcggtcggcggcgaggccaaggagatcagcgagcagctcacgcagctggagaggtcgcgcaagcggatgcgcgcggacctcaagggcgtgcgcgaaagcatcacgaccgcgcgcgagcaggcggcgaagctggaagcattgctggagaccaactccacgcaggtcggcgaggccgccgaggcgaggcagcgggcgagcgccaacttcacggcgaccgtgcgcgcgccggggctggtcgcggcggcgttcccggactgggacggcgagaccgacgacgccgctgtccgccaggcgatcgcggcggccggtgaccggcgcggtggcaccgaggccacggtgatcgccaagctccaggccctgcagacctcgctcgcgggcagccacgacatcgccgccgagcagcacgcgggcctgctgaccgtcacggtgaccggcgaggagggcgcgaagcccgtcgcggtcgccgcacggcaggtcacgacgaagctcggcgagcagcgcgggttcctcgacgagcggtaccaggggatcttcgccgactacctcatccgcgacctggcggagtggttgcgcgggcaggtcagcgtggccgaggacctgaccaagcgcatgaacgaggtgctgtcgcaggcgcggtcgagccagggcgtgcacgtgaagctcgcgtggaagtcgtcggcggcgctcgacgaccagacgcggcaagcgcttgcgctggtgcgcttgccgttcggtgaacgcacgccggagcaggacgcgacgctgcgcagggtgttcaccgagcggatcgagaacgagcgcgacacgcactccggcgggtacgcggagatcctgtcgcgggcgctcgactaccggacgtggcaccagttcacggtcaccgtcgccgacaccggccccgacggcaacccgcgtgaacgccgactgcggcagctgtcgtcgggtgaaacccggttgatctcgtacgtgacgctgttcgcggcggcggcgagcttctacgacgcggtgagcgacgagttcgacccgctgcggctggtgctgctggacgaggcgttcgaacggctcgacgacccgacgatcgcgcgcatgctggggttgctggtcgacctcgacatggactgggtgatcacctggccgagcgggtggggcgtgtcggacaagatcccgcgcatgcacatctacgacgtgctgcggcccaagaacggccgtggggtcgcgtgcacgcagacgacgtgggacggcgcggtgctggaccggatcgatccctag

SEQ ID NO: 51305 - DNA, 1005 bp, Nocardia sp. NRRL S-836
atggaccagcccgcactggaggagctctggcgcctcgcccgcgagacgctcgaaggcggcggccggtccgcgttcagcatccgcgtcgaggacgagcagaccgcgcgggccttgtcggaactcctgcgcaagcccgtcgcgcaccccgcacgtcgccagatctcgttggcacgcctcgatgagcacgtccgcgcacacggcagcacgctcccggaggtgctggaatcggtgcacggcaagccgatcggcctgtccaccgacgcggaagcctcgaccgcggacgccgtgctgcggtacgcgctgcgcgaacacggcctgctggcgcgaccgtgggcggatgagtggatcgagcacgtccgcaggtacggcaagatcccgcagcccgcgttgccgatgatcgcgaaccaggccgccgagatcctcgcgcggctcgaccccgaccggccgacgacgcggttcgcgttggcgggcaacgacctcgacgacggacggccgctcacccggatcgtgcacaaggcgctccagctcgccggcaccgactgggagcgcgccggggtgctgcccgacgcctacagcaaccccgtcctcacctcgcagggctacctgacgctcaacgacaccctggaagcacgggagatcacggtcgtccgcagcacgcgtctgctcgagtccggcgtcgaaggcccgttgatggtgctgccggacggcctcacgccgcaggccaggcaccacctcgacggcaagaccgtgcgctgccacaacgacttcacgcccgacggcatccgcaccgccaacgaggtcctcgcctggaccggcgggacggcatggcggatgtcggcgaacgactaccgcgcggccgtcgcgacgttgatcgcgcgcggtgtcgagctgccgaccctgaacagccgcccgccggaggcgagctgggacgccgacctcgccgagaccatggccaccaccgggctgatggtcaccgaggagcacgtcctgccctcactcctctga

SEQ ID NO: 51306 - DNA, 1518 bp, Nocardiopsis sp. NRRL B-16309
ttggccgagcgcagggcgctggatctggacgcgctcgcggtcagtgaccgcttccaactgttcaacttcacccggcgcgacgaccacatcacctacctgtggatcctgcgcgcgctcgaccgcctgcgcgaggtccaccaggtccaggccggggccgaggacgtcgccaccgcgctgcgcgaactcgccgccgcccaccccggggcgccggtgcccggacacggcctgcgccaccggctggacgagctcagcgccgacggggtcgtgcaccgcttcgacgacgcctcgcgggcgggcgacctggccagctaccgcaaccggcagtcggtctaccagttcagcgagctcggctactgggcctaccaggcggtggagaacgtcctgggcgcccgggtggaggatgtcaacctctcccggctggtcttctccgacgtgctggaggacctcaccgcgctggcggaggccaaccgcaccggccaggcggagagcgtctaccggcggctctcccgcctggacgcggtcatggaggacatggggcgccgctccgcgcagttccacgtgaccctcggcgagatcctgcgctccaccgaggcctccccggaggtcttcctgcggcacaagaacgcgctgctggtgcacatgtccgacttcatggccgaactggaccgctacctcccgcgcctggaccaggccgtccacgacgtggagggcaccggtctggccactctcctctcccgcgcggccgaggccgacgaacgcctgttcatggcccgcggcgaacgcgtggaggactggcgccgccgctggcgagcggtccgcggctggttcgcctccgagggcggcgcccccacccgcgccgccgaactgggcgccgccacgcgctccgcggtctccggggtcatcgcgttgctgcgccagctcaccgaggcccagcgcggcggtgtcaaccgctccacgcagctgcgccacctcgccgagtgggtgttcaacacccccgacgacggcgccgcccacgccctcatgggcgccgcgttcaacgtgcgctcggcccgccacctcggcaccgcccacgaggacgacgaacagatcccgccgaccaccacctggtgggacgcgcccggcgtggagctgtccgtcacgctcttccgcagcgaccgcgcgcccaccaccggtgtgcccaagcccgtcaagcgcaacgcgggggcccggtccgcgctgcgccggcagcaggcccagcagcgcgccgccgaacgcgtggccgccgcgcggctcgccgacgagggcgcgcacgaccgcgtcctggacgaggccgacacgcgtgtcctgctccgcctggtcaccaaggccctggagtcgcgctcggtggtcgctgggcgcctggggccggccaccggcgccgacggcggcaccgccgtgcgcctggtgcccagcgaccggggcagcaccgtccgcaccagccggggcacgctccacctgccgggcttccgcctcgaactcaccaccgggaaggggaagtga

SEQ ID NO: 51307 - DNA, 1419 bp, Nocardiopsis sp. NRRL B-16309
atggccggccgccgcggccccgcccgcaccgtcgaccccgccgacctcggttcctaccagcaggccgtgcgacgggtgctgacctgcgacctcatcaccgcgacgcggccccgccccggcgcgctcgaccaggtcctgcgctgggccgaccagatggccgaggacctgcgcggcctgttcggctacacgctcatcgccaccaccgaccacgtccgcctggtgcgtgaactcgacgaactcgaccccacccagcgccaggtcttcgcccgtcgcgggcggcccttcgaccgccgccgcctggcctacctgtgcctgctgctggcctgcttccagcgctcgcagatcgagatcagcctcggtgacctggtacgccagttcacgccggccgccaacgccgtcgaggggctgggctacgaccccaccgactccacgcacaaggccgcgctggtcgacgtcgcccactggctgctggaccgcggggccctgcacctgtccgacggttccctggaggcctgggcacgcggcggcgagcaggcggacgcgctcttcgacgtcgaccacgacgtctgcgagatcctcttccgcccggcccgcccggtccagcacctgggcagcgtcaccggtctgctcagcgacaccgaggcggggggagcgcggcgggagcggaccgcccagcgggcgcgccgcctgctgctggagcaccccgccgtctactacgccgacctcgacgccgacacggccgcggccctgcgggccaggggcctggccgaggaggtcgcccggatcacgggtctgacggtggagcgccgggcggagggcgtgctgctggccgaccccggcgggctcttcaccgaccggcccttcccgggccgcggcggcgcggtcacccgcacggccggactcctgctggcccagctggccgacctgttcgagacctcctgggcggccctggtgcacatggaggcgccctcgcgcgccgacgagcacgccgacctcgtccgcctcgtcgacgccggactgccccggcacggcgtggtgggcgaactcgcctggaccgacaccggggaccgggccccggcgccggccgccgactcgcagcgggtgccgctggtcgagcgcgggcgcctggaggacatggtggccgacctgttcgccgagttcggcgccgcctcgttcaccaacgcctggcagcaggacccgcacggcctcctggacgccgccctggccctgctcgccgacctgcgcctggtccgcccggtgcccgggggcgtgctcgtcatgcccgccgcgctgcgctaccgcaacatccagggcgccctccccgaacgcgaggacaccggccacctgccgttcgggtccctggacgagcacgctcccgccgccgccaccgcccccgacaccgaaggaacgcccgcatga

SEQ ID NO: 51308 - DNA, 4377 bp, Nocardiopsis sp. NRRL B-16309
atgacccgcaggagcgaccgcttccggcccagccgcgccggagtgatcaacgtctgggactacgtcgacgaggagttcgccttcgccgacgggcgcctgatcctgcgcgggcacaacggctcgggcaagaccaaggcgctggaggtgctgttccccttcatcctggacggctacaccgacgcccgcaggctcgatcccttcagcggccagaaccgcacgatgaagtccaacctgctctaccgcggggacgagtcggcgtacggctacgtgtggatggagttcgcccgcccagcgtccaccgccgacggacggtctccggccgcggacgccctctcgtcgtccgcggtcaccgccgacggacggtctccggcggaaggcggtgccggggctttcacagagggcgcatccgccgcgggcgcggccggggagaccgagaccggcggcgcggccgggggcaccgggagcgtgcccagcggtcccggcgtcggcaccgggagcgccgccgagacggtcaccctggtcatcgggctgcgcgcgcacaagcaccgcgacggcgtcgcgccgtcgttcttcgtcaccgaccagcgcctgggggtggacttcggactgctcgccgccgacaaccgcccgctgaccgaacgccagctcaaggccgtcctgggggagggcgcccaccacggcaccgccgccgagtaccggcgggccgtcgacgcccgcctcttcggcctcagggaccgctacatccagctcctggacctgctgctggccctgcgccgaccgctgctcgccaaggacctggacccggagaaggtctccgacaccctcaccagcggactcagccccgtcgacgaggcactcgtggaccaggcggcccgcgacttcgccaacctcgccgccgtgcaggtccgcttcgacaacgccaccgccgccgacgaggccgtacgggccttcaccggcgagtacgccgactacctcaccaccaacgcccgccaccggctcgccaccgtcaccgcggccgtagagcaggccgccgcgcacgccgacaccgtccagggggccgccgccgagcaccgccgcgccaccctggcccgggacgcggcccgcacccgcgaacaggacctggacacccggatcggcacgctcgcggccgaggtcaaggccctggaggccgacgaggcgctgcgcagccacgagagcctgcgcacccggcgcgagcaccacgaggagcgctcccgccacctggccacccaggccgcccgggtggaccaccaggtccgggagatcacccacctgcgcaccgaggccgcccgggtcgccgaccggatcgaccgcgaccgcgccaccgcccggcgcctgtccggcgagctcgccgaggccgccgacgcggccgggatcggacacgacgccgagggccccgtcgacaccggcgaggacctgccgaccaccgcgcgggcccgtgccgcggcccgcgaggacgacgtccgcgcggtccgcgagcacctggacgccctcgacacggcccaggcggcccgacagcgcgccgacgccgacagcgcccgctccgtcgccgacctcgacgaggcccaggacggctgcgcccgcgccgacgaggaactcaccgaactgcgcgcggccaccgcccaggcggtcggcgcgtgggccgaccgctggagcgtcctggacgcgcagggccgcgacgccctcgccgaggcggtcgcccggttcggcgaacccggcacggccaccctcaccgaggtcttcaacgagcacgtccacgacgcgcagctggaggtcgccgcccgcgtgcagggactggagacggaggcctcggcgatcgacggggaactcaccgcgctgcggcgcgagcgcgacgacatcgccgccgagcgcgacgacgccccgcccgccgaccaccaccgcaccgccccgcgcggcggccggctcggcgcgccgctgtggcggctggtgcgcttcgccgacgacctgcccgagggcgaggccgccgccgtcgagggcgcgctccaggccgccggcctgctcaccgcgtggatccaccccgactccgagctgacccgcaccgcgctcgacgacggcgacgccgacgcctacctgctccccgcggacgagccggtggccgggcgcaccctggccgacgtcctggtccccgaacgccaggaccacgttcccgccgagaccgtctcccgggtcctgcgctcactgccctaccacggcgaggacgggggcgccgtgcgcggcggcgtggacgcccgcgcccggttcgggctcggcgtgctcgtcggcgcccatcccaagcccgccgccgagttcatcggcgccaccaaccgcgcccaccgccgccgtgaccgcctggccgcctgcgaccggcgcgtcgacgaactcaccgagcgccgcaccgccgtcggcgaccggctcggacaggccagggaactcctcaaggacttcgcgcgcgcccgcgccgacctgccagaccccacccccgtcgcccaggccgtgcgcacggtcgaacgccgctccacactgctggcctccgcccgtaccacggccgaccggctccgccgcgccctggacaccgcggtggccgaggtcgacgcacaccgccgccaggtgagggccgtggccgccgagcgcgccatgccagccgaccgcgcggggaccgaggcggtggcgtcggccctcgccgggttcctggagacggccggggccctgcacgccgcgcgtaccggcgccgccgagttcgagcgcgacctggccgggcgccgggagaccatcgaccggctcaccggggcactggagtcggaccaggaggacctcgccgagcagcgcgccgcccacgaggaggaggcagccgaactggccgccctggaagcggccatcgacgctcccgtcaaggagatcctcatccggctcgacgggctgcgcggggacctgcaccggaccaccgccgagcgtgacggcgcccgcggggaagcggcctccgaacacgaggcggtgatccgctccgacacccagcgcgaacagggcagggaggcgctcgtgaccgcactgggggcgctgcatgagcgggtggagtcgctgggcgagttcacccagcccgcggtgcgcgccgtgctgggcatcgacctcgccgccgcctggcccgaccggcgcagctggcccgggcccgaggaggccgccgacgcgctgctctcggggacggccgccaccgtgcacgacacgctgcccgagggggtcggcgcgctcctggcggccctgaccgaggccgtgggcgccgctcccagggtgggggagggcgacatcaagcgctccgccacccggatgtccaacgcgctgcgcaccttccaggagacgctgggcggggactccgagggctaccgggtcgaccacgaggtcggacccaccggtgtgatcaccgtcttcgtcaacgacgagggcggacgcagcccggtctcggcgttcgcgcgcacgatcgcggaccgggtcgaggagcagggcgcgctgatgcgcgacgaggagcaccgggtcctggaggacgagctgctcggcggcatcgcccagcagatccacgaacgcgtcgccgccgcccgcgacctcgtgcgccgtatggaccgcgacacccgggcccgcccgatgtcctcgggcacgcagatcggtatccgctgggcccgttcagaggcgctcaacgaccgcgagcggaccgccgcccagctggtcaagcgcgacgggaccggactggggccctccggcctggccgagctgcgcgccgtcctgcgcgagatgatccgggagtaccacgccgcccacccccgcgcgagctacaagcaggtgctctccgcggtcctggactaccgcacctggtaccggttcgagctgcgcttggcggtccccggccaggaggaggtccggctcaccaagaacaagcacgagcagatgtcgggcggggagaagtccgccgcgatccacctgccgctgttcgccgcggccaacgccctgtactcctcggccgcacccacgtgcccgcgcgtggtcgcgctcgacgaggccttcgcgggcatcgacgaccgctacaagccggagctgatggggctgaccgtcaccttcgacctggacatgttcatgaccgggcacgacctgtgggtgcactacgacagcgtgccgatggccgcccactacgacatgcaccacgacaaggggtcgcacacggtctccgccatgctcatgctctgggacggctcgcagaccatcgacgccgacgcgggcttctcgggcaacgaggaactggccgccgaactgctgggcatcacccccagccgcttcgtcccccagtccaccgccggtaccctcctcgccgagcaatga

SEQ ID NO: 51309 - DNA, 1626 bp, Streptomyces sp. NRRL F-4707
atggtgggacgcacatccagctcaggtcaggacgccagccaggaaacacacaggcggctggacgcctacacctacctcagcgcccccgagcggctggagcacctggcgatcatgcgggtcttctgcgggaccctgctggcggacctggccgtgccggatctcctggcgaagctgcgccaggccggcggccctgccgccgggctcgacgccgacaccctcaccgtccggctcgaacagctggtgaagtggggcaacctgctgcgcagcagccacacggtcaaggcgtccagcatcagcgagtaccagcggtcccgcgcgcgctaccagttgtcgaagctgggcgaacgcatccaacgggacgccgacggtgtcctggccgaggcggacgccgcccgggaggtgagcaacgagctgctcgccgtggtcgagcgcgggctcagggagctggccgagctcgtgaccgcgcccggtggcatcgaaccgcaggacgggctggagcgggtcagcacgctgttcgtgcagttcaccgagttcgcggattccatccgagacttctacgcctacctcggccaggtcctggcccggtacgacctggacagcgccgagtaccagggcttcaaggagctgctcctggactacgtcgaggcgatcactgaagacgtagcgttccgcgcgccccggatctcggcagcactggacacgctgtggccgtacgtcccgggtctgctcgcccggctggacgcccatgcacagggcctcaccgggctgtccccgcagggcgacggccgactggagacgcgagtgcagcgcagccgtgggcgcgagctcacggactgggagggcctgcgcggctggttcaacgacaccgacgggcagggcagccaggtcgatcaactgcgggatgccacgctgcgcgcgttgcagtcgctgctcgccaacgccaagcggatgctgcggtcggccaccggggagatgtcccggcgcaaggacctgctgcggctggcccggtggttcgaggaagcggcgccgcaggacgcgcacgacatcgccgtcgccgccttcgggctgtacggcgcgcgtcatctgggcatacccccggccaccgacgaggtggtgcctgcctacacgagctggtggaccgggccggtggtcgaggtgccggtggccctgcgggaaaggggcagccgcgcccagcggggccggacgtccgcggtggaggaccactccgcgcagaagcggcggctgcgggatgaagcccgtgagcgggcggccgccagggcagcggcggcggacgaactgcgcagcgcctcgggccggttcgccgaggtgcgcctcacctcggctgcgctcggtctgctcctggagctgctggccaccgcactcgggaacgcgcagctgaggcgtcgcgccggcacggacggggcgggcgcgacggaattcgacctcgaccaggcccacagcgaggacgccgagctgggcgtccggctcaccgtgcgacgcacggcgggcgcccgatgcgtcttgcactcggtcgacggcgacctgctgctggacgaccttgagctggacgtcggccgcacctcctccgacacggccgacggcgatgcggaggtgagcgtgtcatga

SEQ ID NO: 51310 - DNA, 1326 bp, Streptomyces sp. NRRL F-4707
atgagcctcccttcgacacacgacgtggccctggccgccgagcgccgcagcgccgcccggctgctgctcgcacatccgctggtcacctcggacggcccgcacgccgacctcttcccgctgatccgcaggcacgccgactggctgggcaaacggttccagcaggtgctcggctaccgcctgctggtcgacagctcctacgcccggctcttcaaggcggccctgggagcaggcgcgggacaccggctggaacgctccaccggcacccccttcaccccgcacacctacgcctgcctcgcgctggccctgtccgtgctggtgaccgcgcccgaacaactgctgctgtcacagctcgtggccgacatcagggccgccgcggccgacgcggagatcgagctggatgagacaggcagggctgccgggaaacggaccttggtagcagctctgcgcctgctggtcaggtggggtgtcctcatcgagaccgagggccatgtggccgctctcgcacaggatgcgggcggagaggctctgatcacagtggaccgcgagctggcccgagtcatcgtcgccggcccgctcgcccaggcccgtgatggcgccgacctggtccggcgggcagcggacccggggttcggcggtcctcgcacctatgtgcgccggatgctcgtcgagacacccgtcgtctacctggacgagctgaccgacgccgaacgcgactggttgcgcacccggcagcgccgcgaagcgcaggcgttctccgaacttctgggcctggagatggagatccgcgccgagggagtggcgctggtggatccagaggacgagctgacggacctgcacctgcccggcaccgggacggtcgcgcaggccgcgctcctgctggtggaacggctcgtggagcgccttcggccgcaggagcccgggcacccggcgatcggagggacgctcgtcatcggcgtggctgttccggacggcctggtggacgagttgctggccgaactggtcgccgagtacggacagcgcagcaactggcagcgtgactacctggaagacatccgcgccctgcgggaggccgtactggacctgctggcccgcatgcggctgatggcccggaccggtcggctgcgtgccgagggctatggcctgccggaggggtacgccgatgaggcaccggaggggcgcaccgtgaccgatgtccgcggggtgcgtcccggcggtgacggctgggtactgctggccgcggcggcgcgctacgccacccacgtgaccgtgcgcccggccaccgcagccggcaagggcacggttgttcaagaggagttgccgttgtga

SEQ ID NO: 51311 - DNA, 4209 bp, Streptomyces sp. NRRL F-4707
ctgccgcgttccggccccacgacgaccgccggcacccgcttccggctgcaccgggcgggcatccagaacgtgtggcagtacgacgagcaggagttcgccttcggcgacggacggctgctcctgcgcggcaagaacggcgcgggcaagtccaaagccctggaaatgctgctcccgtatctgctggacggcgactcacgggcgctggacgcgacgggcaccggccggaccactctcgcctggctgatgctggaagggttcgagcagaccaaccgtctcggctacctgtgggtggagttccggggcacgaccgacggcggtgaccatcgccacctcaccctcggcgccgccatccgcgcctcgaagtcgacgcagaaggcgctgccgacgttcttcgtcacgccgctgcgcgtcggtgaggacctgcacctggtcgagagcggaaggcccctgccggtcgaccggctcaaggagatcgtcggctccgacaacgtcaccgaccgcgcggtcgtccaccgctcgcgggtggctcgggaactgttcggcatcaccgatgcgacccgctaccgcaacctcacccagctcctccaccggctgcggcggcccactgtcggggaccgcatcgagcacggaggactcgcctccctgctgagcgagaccctgccgggactcgacgaggacgtggtcgagaaggtcgcgcgcaacctccacgacctcgacgccgtacgcgacgaactcggccgcctggagcgtaccgatacggcgctgcgtaccttcctaaccagttaccgcggatacctgtccggagtcctgcgcacctgcgcgcaggcggtgagtggggagctggaggtcctcgcgcagcgacgccgggcggccggagacgccgcacaacggaccagcgagctgaggacgcaggaggaggaggcggaagcccggctggagaccctgcgcgacgaggaagaagccgcccggaccgacctcgccgccctgcacgccagccacgcctaccgcagcctgcgcgaactgtcggaacgccgcaccacggtcgaggcgctccacaccgccgccgtggccgccttcactgccctcagcaaagcacacggcgcagaggaaggcgcagccgagcgcctggccgacggtgtcgaccacctcggcagccggctcaccgaactgggcactgaacaccgggaactactgacgcaggcggagaaggccgggcttcccaccggccatctcggcgaggcagtcgccctgccccgcacggttcgctcccaggccggcgagacggagctgaccgctccggacggggagaggcacatcgtgcagcaccggtcggtcgtccatgtggacacggccgcggtgcaggacggactgcggtcctggcaggcgcagctggaggacgccgagacggtcgtgaagaaccggacccggatggtccaggaggtgacgcgcctcacagcgcaggccgagaaggcccgaagccgggcggagcaggccgacaccgagcgggaacggctggagagcgaggcggaagaggccgccggccgtctcgacgccggccgcgagaaggtcgccgaggagagcggtgcctatgcccgccgggtcgccgggtgggtcactcacacgcgggccgccctcggatccggctgcccgccgctggaccccgtccacgcagtggtcacctgcgagagctccgccgatgccccgttcgcggaccggacgctcccgcccgacatcgacggccaggcgtggcaggccgcccatgccgcactcgagtcgtacggcgaggaactcaccggacgccgcgacgccctcgccctcaccgtcggccggctcgacgaggaactcggtcgtctggcgagtcagaagcgagactgggagcgacgtactgatcccgagccgccggtcccctaccaccgcgttaccgaaaggacaccaggcaccggggcgcccttctaccggctggtggacttcgtggatgggttgagccccgcgtaccgggccggtctggaagcagcgctggaagccagcggaatcctggacgcgtgggtcggcgcggacggcgcccttgtcgattccggcacccgtgacactctgctgcgtcccggttccgcggcgccggacgggccgaccctcgcctcggccctgagcccggcaccacaaccggggtgcggggtcacgtccgagcaggtggagcacctgctgaccgccatcgcgctcgcaccggccggggaaacgaccgcacatgacgcggtgcactatgacggaacctggcgtctgggcatcctcagcggccggcaccacaagagcgacgccgagtacctgggagccgccgtacgcgccgagacccggcggcgcatcctggccgagctggagaagcagctcacgcagacggagcagcggctgaccgacgcccgtcacgaactcaccgaggccgacgcccggcgccgggctatcaggttcgcggaacaggacttcccccgggcacgcggtctcgccgacgcctggagcagagccgagtcggacgagaggacgctgcgtgacctgaccgccaaggccaccagcgcggcgcggctggccgaggaggcccgcgccctcgccgtagccgcacgcaccgaggcggacgccaccgccaccgcttatgacctgcgcagcgaccccgccgagctggaacgcgtacgcaccgcgctggccgcccttctcaccggcatcgggcatcttcgacgggcgatcggcagcacgggcgagcggctcggcgcccatcacaccgatgccgaacggtacgagcgcgcccggaaagaccgcctggacgcggaggagaactaccggatccacctcaccgggctgcgtaccgcgcaacaggacctgcgcacccgcgaggaggccatcggggcgaccgaagaagagatcctcacccgcgagcaggaagccagacagcgcatcgcgcacgccgccgaggccgtcccggcagcacaacgtatccggaacgatctgcacgaccggcgcgtgcgcgcggaagaggaggagaaacgcctgcgcgagggcctgaccgcccaggagacggcggtcatcgcaaccggcggcgcccttcgcggcgcgctcggccggccggaggtggtgcgcggcgccggggtggaccggtccgcgctgcccgaggacgtggtggacgatcccggctcggacgtccgcagccgtctgcgcgcgctaaaggcgctggccgacgcggtacagcaggccctcggccgcccgaaaggcgaggtgtcggacagcaccctgctcaaccggcacaccgagctgcgtgaccagctggccggcggttacgacgcgcaactggacgaacgcgacggaatcaaggtatgccgcctgatcgacgaccacggctcccacgacgtagcggccgtgggcgagcggattgccgtccaggcggcagaggcccggggacggctcaccgaacgcgaacgcgaggtgttccagcggttcctgaccggcgagctcggcgaccatctctcggcccaggtcatcaccgcggcgaacctggtcgcggcactcaacgacaccctgcgcaccgtacgcacctcacacggtctcggcgtggaactgctgtggaagctggacgaggacgtcgacgcggacgtgcgggcggccgtgaacttgctgcgcagtccgtcgagcctgcgcacgcgtgagcagaccgagcagctccgcgaggtgctgcaacgccggatcgaggacgcccggcgggccgatccctcagccggttacgccgcccacctgcggaccgctctcgactaccgcgactggttccgcttccacaccttcgtggtcgaggacgccgctccgggacggcggcggaaactgaccggccgcaccgggctcagccagggcgagcagcgagtgctctcctacctcgtgctcttcgccgcagccgccgcccacttcaccagcctcgccgagtcggcacctcacgccccgcggctgatcctcctggacgacgccttcgccaaggtcgacgaacccacccacgggaggctgggacgcatcctcgtcgatctcgatctcgacttcgtcctcaccagcgaacggctcatgggcaactggccggaggtgccatccctgcacatctacgagtgcctccgcgatccccatgtgcgcggggtggccaccctgcactacacctggaacggccgacaccggcgtctggtgtccgtatga

SEQ ID NO: 51312 - DNA, 1272 bp, Streptomyces sp. NRRL F-4707
atgagcaaactgcccacggcgacacgggactggctggccggtcccgggctcaccaggctctgggaagcggtacgcaagcgccttgaaagcaacggcgtgcaggccaccggctccctccggctgacctcggtgagcacccaggaacgcaacgacctgtcgctcctactgggcaaacccgtcacaggtgctgccgtaactgtgcgcctcgacgccctcgacacgcggctgcgcgcttcggcggccggactcggtctcagagaggtgctggaggaactgggccctccgctcaccgaccgccgtgccgtccgcgcgggtatcgcggcacggcgcgagcacgtctggtcgtcgctcgcctcggcgctggacgcttctccgctcgccggacaggactggaccgggcagtggtacgacctgctgcgccgcaccggcgtaccgagagtagtgacacccgaaacggcggtacgcacgctccagcaggcagtgcaggtcctcaccgtactgctcggcccggaacggggtggcacccgaggccgaggagaactcgccgccctggcgaccgggtccgcacacggcctggacgacggcacctggctcgcacgcctcgtccaacgcggcatcgccctcgcccacggcaccgagttccccggcgacgcggtcggccgacgcgcactgtggcgtctggtttccgtcacaccggacgaggtctccagcaccgtgctgacgtacgggctgcggcccgtcggtgggggctggcgggagcaggccctgcggcagcgcgccgaccatcacgccgaagcccacctcacgccgcgcgatctgcacgacctgcagctgcaactgcctgccgagatagtgatccacatctgtgagaatccgcgcgtggtggaggctgctgcggacgctggttgcgtccggcccgtggtgtgtacctccggcagcgccgccacggtggtcctcacactccttgacgccctcgccgccaccggctgccgtttcgcgtaccacggcgacttcgactggccgggcatcgctctcgcgaaccggatcatcctccgttacgaagcccagccatggcgcatgggcgccgaggactacgagcatctggccgctcgcagccaagccgagggaatcccgcagctgccgctcgacggccagcccgtcagcgcggcctgggacccgggtctcgcccctgcgatgaccgctctcggggtcgcactccatgaggaggtcaccctcgaccttctggtggacgacctctccggtcggacgtag

SEQ ID NO: 51313 - DNA, 1623 bp, Streptomyces sp. WM6372
atgggggagcaagcgcaggattcatcaccagagaccggccgcgacgatacgtggcagcggctgaacgcatacgcgtacctcagtgcgccggagcggctggagtacatcgccgtcatgcgggtcttctgcggcacccttctcgccgacctcgcggtgccggacgtactggcgaaactggcagggtccggcgggccagcagtcccgttagacgccgagacgcttaccgcccggctagagcggctggtgcactggggcgccttgctacggagcagtcactcggtgaaggcgtcgagcatcaccgagtaccagcgatcccggtcccgctaccagttgtcgaagctgggcgagcggatccagcgggacgccgacgaggtcctgaccggggcagacgcggcccgcgaggtgagcagcgagctgctggcgctggtcgagcgcggactgcgcgaactgaacgagctggtccaaaggccgggagggatagagccgcaggacgctctggaacgggtcagcacgctgttcgttcagttcaccgagtttgctgactccgtgcgggacttctacgcctacctcggtcaggtactggcgcgctacgacctggacagcgctgagtaccagggcttcaaggaactgctgcttgactacgtcgaggcgatcagggaggacgtggccttccgcgctcctcgaatcgcatcggtcctcgaccttctgtggccgcacctccctggcctcctggagcgcctcgacacccacgcccgcggtttgtcaggggttccgggggccggcggccagcccgaggtccgggtgcagcgcagccggggccgggagaaggccgactgggaggggctgcgcggctggttcaccgacgtcgacgggcagggaagccaggtcgatcagctgcgtgatgccaccatgcgcgcgctgcagtccttgctgaccaacgcaaagcggatgctgcgctcggcctcgggggagatgtcgaggcgcaaggacctccttcggctcgcccgatggttcaacgtggcagctccggaggaagcgcacgacatcgcggtcgctgccttcggcctctacggcgcccgccacctgggtgtcccgccagcctctgacgaggcagttcccgcgtacaccagttggtggaacggcccggtggtcgaggtgccggtggctctacgcgagcggggcagtcgggcgcagcgaggccgggcgtcggccatggagaaccactcggcgcagaagcggcaccttcaggaggccgcccgtgcacaggccgaggccagaagggcggccgcagacgaactgcgtagcgctgcgggtcgcttcgcagacgtacgcctcacctctgcggccctcggactgctactggaactgctggcgacagcactggggaacgctcggctgcggcgcactggagttggagacctggacgaggcacaggagttcggcctggagtccgcacagagcgaggatgccgagctcggcatccgactcaccgtacgtcgttcctccggtgcgaagacggtgctgcactccgccgacggcgacctcgtgctggacgacctggagctggagatcggacgtgcggccggcacggccggacgtgaggtcgaaatgagtgtgtcgtga

SEQ ID NO: 51314 - DNA, 1296 bp, Streptomyces sp. WM6372
ctggccaccgaacgccgtgccgctgggcggctgctacttgcccaccctttggtgacgtcggtcggcccgtacgcagacttgttccccctgatacgacggcacgccgactggctgggcaagcggttccagcaggtactcggttaccggctcctggtcgacacctcctacgcccggctgttcaaggccggattgggcgccggcgcagggcaccggctggagcgatccaccggtaccgccttcaccccgcgtacttactcctgtctcgcgctcgcgctttccgtgctggtgaccgccccggaacagatgctgctttcccagctggtcgctgacatcagggccgcagcggccgacgcaggcgtgaagctggaggaaacgggccgggccgtggagaagcggactctggtcgccgcccttcgccagttgatcgactggggtgtcttgacggagacggaaggcagtgtgggctcgctcgttcaggaggaaggtgccgaagccctgatcacggtggaccgggagatcgcccggatcatcatttccggccccctcacgcagagcctggacggggcggacctggtgaggcgggctgccgaccccgggttcggcggtccccgcacctacgtgcgccggatgctcgtggaaacgcccgtcgtgtacttggatgaactaacagatactgagagggactggctgcggaccaggcaacgccgcgaggcccaggcgttctccgagcttctgggactcgaggccgagattcgcggcgagggcgtggcgctggtggaccctgaggaggagctgacggacttgcacctgcccggcaccggaaccgtcgcccaagcttcgctcctcctggtggagcgcctcgtggaacggctgcggcctgccgagccaggacacccggcaacgggagggcggctcgtcatcggggtcacccttccagacgacctggtggatgagctgctcgccgagctcatcaccgagtacgggcagcgcggcaactggcagcgcgactacctggaggatccctcctcgttgcggaaggcggttctggacctgctgagccggatgcggatggtggctcccgtcggccctctccgttccacaggccaggggatacccgagggatacagcgacacggtcccggagggccgatccgtgaccgacgtgctgggcgcccgcgccgccggcaccgactggatactcctcgccgcggccgcgcgctacgccacccatgtcaccgaacgccggcccgccggagcgacacccggcatcgacatacagcaggagatgccgctatga

SEQ ID NO: 51315 - DNA, 4233 bp, Streptomyces sp. WM6372
atgaccccgggcgcgaacggccccatcccccttcagcgatccgtcacttcggctggcacgcgcttccgcctccaccgcgcaggcatcctcaacgtctggcagtacgacgaacaggaattcgacttcggcgacggacgactgctgctgcgcggcaagaacggggcaggcaagtccaaggccttggagatgctgctcccctacctactggacggcgactcccgcgcgctggacgccacgggtacgggtcgcacgagcctcgtctggctgatgctggacggcttcgagcagacgaaccgcctcggatacttgtgggtcgagttccacatgacaacggacaacggtggtgaccgctacctcacccttggggcggccatccgggcatcgaagtcgacgaagaaggccgtgccggtcttcttcgtcaccccgctgcgagtcggcgaggacttccgcctggtcgaggcaggcaggcccctgccagtcgatcgcctcaaggaggccgtcggcgcggagaacgtcacggaccgttccgtccagcaccgctcgcgagtcgcccgtgaactcttcggcatcaccgacgcaacgcgataccgcaatctcacacagctcctccaccggctgcgacgtcccaccgtcggggaccggatcgagtccggcgggctcgcctccctgctgagcgagacgttgccaggactcgacgacgacgtagtggagaaagtggcacgcaacctccacgacctcgacgccgttcgagaggagctcggccgcctggagcgtaccgaccgggcccttcgcaccttcctgggcgactaccgcgactatttgtccggagtgctgctcaggaccgcgaagaaggtggacggagaactggacgccctggcgcagcgacgcctgcaggccggagacgcatcgaagaagacaggcgccctgaagggacgggaagccgaggctaaagcacgtctgagcgcgctgcgcgaggaggaacaagccgcccggaccgaactcgacgccctgcgtgcgagtagcgcgtaccgcagcttggaagagttgtccgagcgccggaccacggtcggcgccttggaaacagcggccggaacgtcgttcgccgcgctcaccaaggcgcacgacacggaagagggggcggcagaccgcctggccgagggcatcgcacatctaggcgaacgccttggcgaactaggtacggatcaccgcgagctcgtggtgcaggccgagaaggcgggactccccacagggcatctcggcgagactgtcggcctgccccgcacggatgtggccggagcttcgacggcggaactcacgggacctgacgcacaagtccacatcgtgcggcaccaccgggtgatcgccgtggacgccacggcagcggaatccgccctgcggtcctggcaaggacagcttgaggacgctggcactgtggtgaagcacagaacccggagggtccaagaggtcgtcggcctggtcgcgcaggttgttgagatgcgggggcgggcagctgttgcggatgccgagcatgagcggcttgaaggggaggccgaggatgctgcgggtcgcctcgaaggccatcgggagaaggtagccgaggagagcgggggctacctccgtcaggtggaggcttggctggagcacgtccgggctgtggccggcccggactgccctctgttgaatcctgtccgtgcgacggtcgcatgtgagacctcgtcggaggcccccttcgccgagcgggtgctgccacccgacatcgacgggcaggcgaagcggaccgccctgacggtgctggagccatacggtgtgcaactgaccgaacagcgggacgccctcgcgctgcgcgtcgcccggctcgccgaggaacacgacctcctgaccagagagaaggaggaatgggagcggcgaaccgatccggaaccgccagtcccgtaccaccgcaccgccgagcgcgatccaagcaccggagcgcccttctaccggctggtggacttcgctgacgacctgtcccccaccaaccgggcgggcctggaggcagcgctcgaagcgagcggggttctggacgcctgggtgacctcggacggaacgctcctcgatcccctgactcgaaacgtcctgctccagcccgggaccgtaccgcagggcggctcgactctcgcctccgcgttgcgccccaccgcgcaaccggacagcggtatctcccccgaacgggtccaacacctcctggccgccatcgccctcgccccggcccaggacgtcgccgccaccagctcggtgtactacgacggcagctggcgcctcggtcccctccgcggccaccattccaaggacggtgctgaatacgtgggcgccgccgtacgcgccgagacacgacgccgaaagatcgccgaactggaagcccggtgggcggaagcggagaagctgctgtccgactaccgcggacaactcgacgggcttgactccatccgccgggacctggcatcggcggagcgcgacttcccccagccgcagtccctcaccctcgcctggcacgagctcgactccggggagaaagacctgcggaacttgaccgccaaggcgacaaaggcagcacgcctggccgaagaggcacgcacccgggccgtggccgctcgaagtgaagcagaggcaaccgcgacagcccacgacctgcctaccgacgccgacgccctggaaaacgtccgaatcgccctcgcaactctactcggcggcattggaggtatgtgccgggctattcggggcgtagccgacgggcttgacaggcaccgggccgatcacaccaggtacgcacgagcgcaccgtgaccgcctggaggcagcggaaggccatggtctccgactcggtgaactgcgcagggcccagcaggacctccgcacccgcgaagaagccatcggctcctccgaagaggagatcctcgcccgcgaagaggaaaccaagcagcgcatcgcatccgccacggaggcgcagccgggagcccaacggggacacgacgacctccgcgaccggagggtccgcgcggaggaggacgagaagcgaagtcgcgaattactgctggaacagcagacggccgtcatcaccgccggaagcaccctccgcggtgcggtcggtcgtccggaggtgatcggtggcgccgggctggaccggtcttccctgcccgcactgctgttggacgaccccgccgcggacgtccgtgaccgtatccggtccctgcgcgagctagcagatgctgtgcggggcggtctcgaccgttcgaggaaggaggtttcggacagcacactcctcaacgggcacacggcactgcgcgaccagttggccggcgggtatgacgcgcaactcgaggaactcgccgggatcaagatctgccgcctggtcgatgaccacggcccgcactacgtcgccgtcgtcggagaacgcatcgctgaccgggccgccgaagcccgtggtcgactcaccgagcgtgagagcgaggtcttccagcgcttcctcaccggcgaactcggcgaccacttgtcaacgcaggtcgtcaccgctgccaacctcgtctctgccctgaacgacacgctcaagaccgtgcggacctcacacgggctcggcgtggagctgcagtggaagctggacgaggacgtcgacgccgacgtgcgggcagccgtcgaactactgcgcagtccttcgagcctccgcacccgtgagcagggcgagcagctgcgcgaggtgctgcaacgccggatcgaggacgcccgccggaccgatccgtcagctgggtacgccgcccacttgcgcaccgcgctggactaccgcgactggttccgcttccacaccttcgtggtcgaggacgccgtccccggccgcaagcgcaagctcaccggacgcaccggactcagccagggcgaacagcgcgtgctttcctacctcgtgctcttcgctgcagccgccgcccacttcacgacacttggagagtccgcaccgcacgctccccggctgatcctcctggacgacgccttcgccaaggtcgacgaacccacccatggtcggctcggccgcatcctcgtcgacctcgatctcgacttcgtgctcaccagcgagaggctcatgggcaattgggccgaggtgccctccctgcacatctacgagtgcctccgcgacccgcacgcccgcggggtcgccaccttgcactacacgtggaacggccggcaccggcgcctggtgtccgtatga

SEQ ID NO: 51316 - DNA, 1263 bp, Streptomyces sp. WM6372
atgagccggatccccgctgccacacatgactggctggccgggccgggactcgttcggctctgggaatcggcgcgcaagcgcctggagggcaacggacttcaggccaccggctcggtgcggctgtcaggactggcagtaaaggagaggaacgacctgtcgctcctgctcggtaagccgatcacgggagccaccgccacggtgcagctcgactcactcgatatccggctgcggtcctcggccgccggcctcggtctcagggacgtactccaggaactcggaccgccgctcaccgaccgccgcgccgctcggacggaggcccaggcacggcgcgatcaggtgtggtcctcactcgcctcgtccctggagggctgccaactcaccaacgaggattgggcctggcgatggtacgacggactgcgccgcacgggcgtacccaacggtgtaacacccgcaacagcggtgcgtaccctccagcaggcggtccacgccctcaccctgctcttcggtcccgggcgggccggcacgtgggggcggggcgacctcgccgccgaagcaaccggatcggcccacggcctggacgacgggacctggctcgcgcgcctcgtccaacggggcatagccctcgcccacgacaccgagctccccgacgacgcggccggacgccgcgccttgtggcgattcgcatccgtcacgccagacgaggtctccagcaccgtgctcgcctatggcctgcgccccgacggcggaggctggcgggaacgctccctgtacgaacgagcggtccaccacgtggaaacccacctcaccctgcgcgacttgcacgcactgcggctctcgctgtcggccggcaccctcatccgcatctgtgagaacccacgcgtggtggaggccgcagccgacgctgcctgctcacaacctctggtgtgcacctcggggagtgccgcgacagcggtcctcaccctcctcgacgccctcgcggccaccggctgccgcttcgcctaccacggcgacttcgactggccgggcatagccctggccaaccgcgtggtccaccgctacggcgccgagccatggcggatgggcgccgaagactacgaacagctcgccgccagcacccaagcccgcaacgtcccacagcacccgctcaccggcccaccgacaaccgcggactgggatccgggcctcgccccagccatggccgcgctcggcatagccctccacgaggaagccacactcgacctgctcgtggcggacttggcatga

SEQ ID NO: 51317 - DNA, 1446 bp, Saccharothrix sp. NRRL B-16348
ctggacgcccgcgatcaccagcgcacctacctggcgatcatgcggctgttcacgtcgacgctgctggccgacctgtcggcgggcgaggtcgcgggcgcgttggcgggcgccgagcgcgaaggccgggtcgagccgggcgagtcgcgcatcgagaacgtgatcaaccggctccggcagctcgtcgagtggggcaacctggtgcagggcaggcgcgaggtggtggcgtccagcatcgccgagttccagcacggcagcgtccgctaccaggtcagcaagctcgcggtccgggtgcagcgggacgtggacgagctgctgcgcgtgcccgagggcgcccgtgaggtgtcgcgggagctgctgcccgccgtggaacgcggcctcgaccggttggggcagtcgctgtcggacgcgttgatcagtggcgcgccccgctcgcgggaggtgctggccgaacaggtcaccacgctgttcctgcagcacgccgagctggccgcgaccgtgcgcgacttctacgcctacctgggccaggtcgtgacgcggcaccacctggcgccggaggagatctccgggttccgcaacctgctcgtcgagtacatccagatggtcgtggaggacgtgctgcggcacacgccggccatcgcggacgccctggccagggtcacgtccgcgcggtccgagctgctgcgcctgctgggccgtgccgacctgggtgaccaggtggaacgggcgcgcgggcggtcggcggaggactggcaggagctgaccgactggttcgtggaccgccccggccggccgagccaggtgacggcgctgcgcgaggccacggcgcgcgcgatcgggtcgctgctggcgagcgtgaagcgggccacgtccggcggcgggctgctgccgagcaggcgggccgagctgctgaagctggccgcgtggttcgactcggggacgcgcgcggaggcccacgagctgtacgcggcggcgttcgggctgtactcggcgcggcacgtgtcgccggcgcccgagcacgaccgcgacaacgagcgcacaccgtggcgtgacgggccggtggtcgacgtgcaggtgagcgtgcgcagccggggcgaccgcggcgcgcgcgggcgcacgtcgcggatcctggacgacccgatgaccgagcagtcgctgctggccgaggcgcgggaagccgacgaacggcgggccgcgtcggtggccgagctggcggcggcggcgccccggctggcgtcgacgacgttgtccggtgaggcgctcgaagtgctgtgcgagctgctcacgttggcgatggcgcagcgcgacacggcggccgactcgggctcggcgaccgatccggtgcgcgggctgcgcgtgaccgtgtcgcacgaggccggtcgttcgacgcggatccgttcggcggcgggcaccttgacgctgcacgactcgacgttggtgctcgactga

SEQ ID NO: 51318 - DNA, 1167 bp, Saccharothrix sp. NRRL B-16348
atgttcgacgacctctccgagatcgacgcggcgaacgtggtgcgctgcgcccgcaccctgctgcggcggccgttgctgcgcgccgacgggccggacggcgagctgttgacgctggtctaccggcaccgggcggcgttgcaggacctgttcgcccggcagctgggctaccggctcgtggtcgaacggcggttcgcgcggctctacaagtccgggccgggccccgacgactcgcgcggcgtgctcggcatgtcgccgcgcgggtacgcgtacgtggcgctgaccatggccgtgctgaccggggtcgggcggcaggcgctgctgtcgcggctggtggcggacgtccgcgcggcggcggtggaggccgggctcaccgtcgtggacgacgtggcggaccggcgggcgttgacggcggcgttgcggcacctggtgtcgctcggcgtgctgcacgagaccgaaggcacggtggacgtgcaggccgaggcgttgatcaccatcgacaccgacctgctcgggcagctgctgaccgggccggtggccgaggcgtcgtcgcccgaacggctggtcgagctggcggcacggcccggtccgcgcggtgtcgagcacgcggtgcggcgcaagctcgtggagaaccccgtcgtgctgtacgcggacctgccgccggagcaggcggagtggctgcggcgcaaccagcgcaaggagaccgcgctgctggagacgtgcttcggcctgcacaccgagtgccgggtcgagggcgtgctggcggccgatcccgaggactacctgaccgacctgtacttccccggcacgtccacggtggcgcggatcgcgttgctggcgctgccggagctgctggagtccgatcctctcgccggtggacggcacgccgtggaccgggcacggttgtccgaggtgtgctcacggctggtggaggactacccgaccgcatggtccaagcagttcaccgaagacctggaccggttggtcgacgaggtgctggagctgttgcgccgcatggggttggcggtcgtctcggaggacgggtggctgctcaacgccgccgcgcaccggtggctgccgtcgccggacggcgatcccgaacgtgaagtggagccggtggtcgtgccggacgtgcccagctggtcgttgttcgatgaggagaccgcgtga

SEQ ID NO: 51319 - DNA, 2033 bp, Saccharothrix sp. NRRL B-16348
ctgcacaggggcggcatcgtcaacatctggcagtacaccgagcagacgttcgacttctccggtgggcgcgcgatcttccagggcaccaacgggtccggcaagtcgcgcacgctggagctgctgctgccgctgtgcctggacggcgacctgcggcaggtcggctccaagggcttcgacacggtgtcgctgcggcggctcatgctggacgactacgacggcgggccgaaccggatcgggtacgcgtgggtggagctgacgcgtagctcggactctggctctgactcgggctcgggctcgggctcggacgagtacatgacgtgcgggttgggcgtgaaggcgtccaagacctcgcaggcgatcaccgactcgtggcggttcatcacctctgcgcgcgtgggtcacgggttgacgttggtcggcgcggaccgcacgccgttggggcccgtgcagctgcgtgagctgatcggcgcggactgcgtgctggaggaggcggcgttccgggcgcgcgtcgccgagaccgtgtacggcgtgcccgcgccccggtacggcgacctgctgcacctgcagcggacgttgcgcaacccggacgtcgggttgaaggtgctggaagggcagctggagcagatcctgtccgacgcgctgccgccgttggaccaggcgatggtggagcagctggcgacgtcgttcgacgacctggagtcgatccgggagaacatcacgcggctgtcgtcggcggacgcggcgctgggcacgttcctgaagacgtactccgactacgcgttcggcgggttgcgggcggcggcggagcggttgggcggcgccgaggacggggtgcgcaagctggagcgtgcggcggcgcggctgtcggcgtcgttggaggagacgctggcggcgcgtgcggcggcggagcactcgttggcgtcgttggaggccggtgagcagcaggccgaggacaccatcggcgcgttgaaggagctgccggcgttccgcgacctccaggacttgcagacgcgcgagaagctggtggcggagaagcgttcgtcggcggtggcggcgttggacatggcgaacaagcagcggttgcaggaggacggcgcggtcgacggcgtgctgcggctgctgcggcggttggcggaggacctgggttcggcgcaggagctggtcgagccgttgcgccaccacctgcgcatgaccggcctgtcccccgctgcggttcccgaggtgccgaccgtgtccacttcggacgctgtggtccgcacggagtcggtgcgggccaagccggacccggaagccgagccgctgccgatcgagcgccgcgtgccgccggcggtcgaggtcgaggtcgggacgttggaagcggtggcggcgcggacgtcggagatcgcttcggcggcgcggcagcgcggggcgttggccctggcgttggcggcgcgggcggccgagctggattcggcgcagcggaaggtggaggcgctccgccagacggcgcgggacgctcagcacgcggcgaccgaggcggcggcgttgcgcaaccaggaggcgcaggaactggcggaggtcgcccagggttggctggccgacgtcgagtcgtggcagaactccggccccctggccacggcccaccccgacgcgccgctccccctgcccaccaccgtcgacccggccaccgcccgcaccctgaccaccaccgcccgcgagtgggtgagtcccctggtcacggccgcgcgggccgacgcgcacgcggccgcgcaacgtcgggccgacctgatcacgtcgatcaacggccgcgacgccgaactctcgggcctgcgctcgggaaccgcccaaaccccggaccgtggccgcttcaccgcgccgacccgggacaccaccaccggcgccccgttctaccgcttggtcgacttccacccgaccgtcgacgacaggtcccgggcgggcttggaggcagccctggaggcatcgggcctcctggacgcctgggtcacacaatcgggtgaacctgccccgaatatgtacggaaacaccgttaccgc

SEQ ID NO: 51320 - DNA, 1524 bp, Saccharothrix sp. NRRL B-16348
atgcgagttgacggtggcgattcgggggaacccgcaggtcgggggaagttgttcgtctacctgaccacgtcttcggcgttcgagtaccgatcgatcatgaacatcttcgccggtcccctgctggccgacctgtctgcggcggaggtggcgcagcagctcgccgagcgcggggtcgtgctgtccgtggacgaggtgaccgaccgttgcgagaagctcgaaggttggggcaacctcgttcgcggcgtgcgcgacgcccgcgtgcccacggtccgggacttcctcaggtcgcgcagccgctttcaggcttcgaagctgggcggcagggtgcaccgggacgccgaggcggtcctcgcggccggtgacggggcgcaggaggtggcacgcgagctgctcggcgccaccgtcctcgtcctcgaccgcatcatcaagcgcatcggcgagccggacccggatgcagaggcgctggccggcgacgtgaccacggtcttcaacaaccagcgattgttcaacgaaagcgtccgcgacttctacgcctacctcaacgcggtgctctcccgctacgacctggccggtgaggagtaccggcacttcaaggagttgctgctcgactacgtcgacctgatcacggctgacgtgtcgcgccacgccccggtgatcgccactcgctgcgaccgacttcgtccgctgttcgaccgggtcgtggaggtgctggacagcctgccgacactgatcatgcccgacggcacgccggccgaccggttgcccggtcgccaccgtgaggactgggaacgcctgcacgcctggtaccacgagacggacgggcattcggggccggacacactgcgggcggcggcggaccaagcgctgcgccagctgttgaccaacgccaggcggatgctcgcggcggcgggcacgggggtcagcaggcgagctgacctgctcacgttggcgtcctggttcgccaaggtggacgacgacaccgcccaccggctctacgcggcgacgttcggttcctacccggcccgccacctgttcttcggcccggaagagcaaggcgtccgggacggggtgaacacctcgtggtgggacgccacccccatcgacgtgccggtcagcctgcgtgatcgtggtgaccgcgcggcgcgcggacggacctcgtcggtgcccgatccccgactggaccaggagcggctcctgcatgatgcggaggtcgaggcgagggctcgacgggtcgccgccgacgaactggtcgccgctggcgcgctggacggcgtcaaggtcagccccgcggccagggaactgctcctcgcgctgctgggagggctgctcgccaagaaccaggaccacaccggcgtcgccttcgaggccgacaccgacctggacctggaggtcatcgccgagcccgcgaccggcgcccggaccctggtccactccgaggacggggacctggtggtgcacgaactccgcttggtcgcgcggaggtacaccacctacctcacggaccgaaccgggagaaccgcatga

SEQ ID NO: 51321 - DNA, 1236 bp, Saccharothrix sp. NRRL B-16348
atgagcccggagtccgccggcaccgaggagcacaaggcgcacgaacgcaggctcgccgcgagggcgctgctgatgcagccggtgcttaccgccgcgcgccacccagagcagctggcgctggtgcgcaagcactcaccgcagctcaagcgcatgttcaccaccgtgctcgggtaccaactcgtcgtcgagtcgaccttcgcgcgcctgctcaaggcgccgctgagtgccgacaccgttccacggcccgcgttcacgcgcaacgacaggcggttcaccgcccgcacgtactcctaccttgcactggtgtgcgcgagcctgctggcaccgcacatcagcgaccaggtgctcatgagcgttctggtcgagcaggtccgcgcggacgctgtgacggcggagataacgctgggcgacgacctcggtgcgtcgcgcgatctcgtgcgggccgtagacgtactggtcgactggggcgtgctcacggagaccgatggttccgtggcgggatgggagacacggcaagaggaagctctgctcgacatccaccgccccctgctcccccacctcctgtccagggcgctgtccgggttcgactcgccggtcgccctgctcgacggcgcgcaggccgacccgctggagccggaacaaccgcgccgcagcctccggcgcaagctggtggagaacccgctggtacgccgtgaggatctcacggaagccgagcgggacgtgctgtcccgcgagcggcgagaggtggcccgggtgctcgacgagtcgttcggtctggtcctcgaggcgcggtccgagggcgtcctcgcctacgaccccgaggaggcggtcagcgacgtcgcgttcccgggctccgggaccgtcgcgcacgcggccctcctcttcgtgaacgccctcaacgacgagtccagaccggcggcgggagacaccgcgaccgtcgcgggtcgtacggtgcccggtgtccgcgtcccgtggagcgccgtcgaagcgaacatcgacctcatcatcgagcagtacggcagcgccttcgcgaagagctacgtcgagaagccgtcatcgctcatgcaggaagcggtgctgttgctggaatcggtgagcatcgtggtcgccgacgaggacgggctggtcctgcaccccgcctccgcccggtaccgaccggagccccaccgcgcccccgcgcgcacgcgcgcgatgcgcaggatcggcgaccagccgccgccgaccttgttcggttga

SEQ ID NO: 51322 - DNA, 3231 bp, Saccharothrix sp. NRRL B-16348
gtgcgcggtgaactcgccacagccagcgagcgcgagggaacgctgcgatccgtcatcgaaggcatcaaggaactgcccgcgtaccgagccgggctcgacatccggacactcggcaagagcgtcgaagctctggccggcaccgcctccgcaaccccggcgatggcacacggtcgtcgcgaggacgaggcggcggccgtgcgctcagctgacaccgcggccgaaggcgttcgcgccgaggtcgaacgggccgatgcggagttgtcccgagtccgcgaagcactggccacgtcacggctgcaggccacggcgttaccggcagcgatccacgcgtccgtcgaatcgccacccggcggcagcgagacggtccgggtttcgctggacggcgcggtggacgaggtcgagcggccgtcgccccaacggctcgtggtcaccccggacgagctggacgaggtggtgcgggtggttcgcgacaccggtcggtccgcagatcggcgggccggtgaggccgcccggcgcgagcgggacgccgccgcgctcgacgcccgcacgcgagaagtcacgcaggcggtggaacacgcggaggacctcggcagccgtgcgatcggggacgccgagcgtgctcaggacgcggcggacgaacgcgacggaaccgcgaggacgttggccgccgagtggaggacgtggacctccggcgagcagagccggaagctcttcggtgacgtttcctggcgggagaccgcggtggggccgctcctggtcgacgcggacgccatggtgggcgagcgcacggacgacgacctcgctcccctgggccacgttgcgaccgacgccgcagtacgcgcgcgtgccgccgtcgccgaccagctcgccgagctgaagcaggaacaacgcgcggacgacgaggccgcgcgcaagctgcggttggagcagtcggagctgcgcgcacaacgcgacccggagccacccgtcgcaccatgggtgcgcggcacgcccgtcggcgcggtgcccctgtggcggctggtcgagttctccgcagagctggccgaccacgaacgagccggcgtcgaggccgcgctgatgtcagccgggatgctgtccgcctcggtcagtggtgacagttcggtgcgagccgacaacggcgagatcctgctgaccgctgaggccgcagtcgctccccgttccctcagggacgtgctcctgcccgacccggccggtctgctgcccgagcaggccgtcacctcggtcctctccaggatcgggttcggtcccgggcaccacgtgtgggtcgacgtggacgggagctgggccgcgggcccgctgcgcggcaagcaccgggtcgaccacccgcgcttcatcggagccgtcgcccgcgcccgggcccgggccgagcggctcgaagccatcgccgcggaactcgacgaactgacccgccggacaggtgaacgcgacgacgagcggaagcggttgagccaggtcacccaagacctggaccggcacgtacgcaccgcgccacggacgaacgacctgctccggacgcgaagtgtcgcgcgttccgcagcggcggaggccggcaggtcgcaggccgcggcggctgcggcgcaccaggccgcccgtctcaagcaggagcagttggcggctgatcgccgtggtcacgaggaaagctgcgcccgcctggggcttccggccggccgggcgcagctcgacgaggtcaaggcgggcgcgaaccaggccaagcacacctgcgaccgtctcgccgatcggctcgactcggtccggcgacgctgccacgagcaccagggtgcgttgaaggccgtcggcaacgccacggccctacgtcgggacgccgagtcagccgcgcacaagtcgtggtccgagtggcacggcgaacacgggaagttcaccaccctccgcgactcgctgggagccgaagccgacgaggtcaccgaacggttggaggcagccgaagtcgaataccgacgggtacgcgcgtcggtcgccaccctgtcagagaaagaacgtcggttggacaaggaagccgacaaggcggaagagtcggtgacgtccacgaaagcccgagccgacaacgccgttgtacacacccgtgaggccctggcgcggctcacggcgcaggtggccctccccggcatcgcggatgcagctgcggggaccgcggcggcggatctgctcacgctgtgcacgtcgtccggtgcaccgacgggtccgggtgtggagcggctcgtcaccaccgtgcagcaagtgctggaccgcaaggggcaggcgatcgacgagaacggcctgatgcgttcactgcgggcggtcggcggcaatctggccaacaccttcgacctcacccagaccatcgacgaaggcatgtggttggtggacctcaccgacgcgatgggccgacagcacgtggccgtcgccgcggcgcggctgcgcgagcaagccgcgggcgccgcagcggcgctgaccgaccgcgagcaccgcgtgttcaccgacttcgtcatcggcggtgtgggtgaggaactccggcgcaggctgatccaggcagaggatctggtgcgcgcgatgaacaccagcctcacgaacatcaggaccagccacgggatcggcgtgcggccgcgctgggaactggtcgagcccaaggacagtcccatcgcgcgcatccgcgaactggtcgcggccagcgccgccgtgcgcccggcggaacacactgacgagctcatccggctcctcaaggaccgcgtcgacgagcggttcgagaaggacgccgatgctgggtacggcgaacacttgcgcacggcactggactaccggcagtggcacagcgtggaggtgtcgatcaccggcccggaacccgggcaggtccgcaagatcagccgacgggcgaagctctcccagggcgagacccgcttcgtctcctacgtcgcgctcttcgccgccgcagacgcgtacctgtccggcctgcccgacacgggcagcgcgctgcgcctgatcctgctcgacgacgcgttcgccaaggtcgacgaccggaccatcgccgagttgatgggcctgctcgtacgcatggacgtcgacttctgcatgaccggccacgcgctgtggggtgcctacccgcaggttcccagtgtcgacgtctacgagatccgccgagccgagggaaccgcggcagccgccacccacgtgcactgggacggccgcaaccggcactacctgcgatcgacgggctga

SEQ ID NO: 51323 - DNA, 1491 bp, Lysinibacillus macroides
atgagccggatgatgaagcgagtggtggaagcgagttatttgactgcacaatctgccgcacactaccgcacaattttgcgttatttttatgatcagcatgagcgtatgcgtgattttattacgcctgaggaaattcttcagcatttacgaacgattccccaatttgaacagtatgacgaagaacagctacatcagcagttagcgcagcttgtcgaatggaataacttgacggcacgtcaggatatgacgaatgcgcgtactattgaggagtataaaaagaaacgtttccgttatcagccaacgccttatacaattgaaattgagcgtatgttaattgagcttgagaagatggtagacgatacgtttaaagggtcgctagagcgctcgcaatttgaacgtttattggagacgttgcaaaagctagaagcaaagccgatgacacctgatgcttgtatggcattgtgggaggatattcttcagtactttaaaacaattcgtacaagcactgcggattatattgcttatattaatagtgaaaagacagaccaacgtatgcagacggaggcatttttaatttataaggcacaatttacgagttatttgcgcgattttattgtgtcattgcagaaaacgtcatttcaaattgttgagttgttacaaaagttatcacttgaagtgatgcagccgttttttcgagagcttgtcaataaggaacggttgattcctcgccttgaggaaattcaactgacagatgaggaattatgtcagcagtatgaacagtattggcagtctatccagcgctggtttttagaagtgggcggagaaaagagcgagcttgaaatattgcaatggcaaacgaatgagatgattcgccgcattactcgttatgtacaacgattaggagagcgtcagcatcattttaaaagccgccgcaatgactatattcatttagcgaaatggtttggagactgtgaaaatgtagcagatgcacataagctttcttccgttgtttttggcatgatgcaagtgcaacatattcagttaaaaacctatacaacagacgatttacatagtgatacatgggatgaaaagccagagcttgtgtcaatgaaaccacgtacaaatcgttatcgtgagaaaacaaaagcaacgggtacaatgttgcaaacagcgcaaaagcagaagcagcgtgagcagtatttacaggaacgtcagcaacaagagatggtgctttcttcttattttaacgagggctatgtgcaattatcacaacttcatgaggtcgagtcatttgtacggaagttgttacttagctggatggcaaaggcacgtaccaatcaacaagggcttgttaaaacagaaaacggcatgttattgcgtgtgcatgttctacaggaaaacatcgtattacatgcagaggatgggcaactgtctatgccagatgtgcgttttgagttagtgaaggagggggagcatggaggggctatttga

SEQ ID NO: 51324 - DNA, 1149 bp, Lysinibacillus macroides
atggaggggctatttgatgaaaaggctgtgcaagggctcgattatttgctacatcatttttgggtattgcgcaaagagaacccagcgatgtatcagttgattcgtgagcgtcaaaaagtattgaagcgctatgcgaatgacaagctcggcttgcacttacatatacgccaacactttattaaacttgaaaaaataccgattgtgcctgagcgctggatgggtattcagacatttcaaacgccaatggattatatgattttctgctatgcattagcatttatcgaaggcaaaagcattgaggagcagtttttactatcggaattatgtgagaatattcgggcgattggttatgagcaaattgagctagattggacagtgtatcagcatcgtaaagccttaattcgtgtgatgaaaatattggtagacttgcatttaattgcaacaattgatggggatgtacaaggttttgaccatcatgaaaatcaagaggtattgtatgaagtcacgatttatagccgttattttatgcgggcatttcctgaagaatttacccagtatgagcatgtccagcaattaatcgaaggcgaccgcaatatgttgggtgaagatgaaagacgcaagcgagtatatcggcaattatttacctcaccagccatatatcgacaagatgggcaagaccaagactttttatatattcgtaatttccgtaatcgcattaatgatgatattgaacggcatagtgattttaaattacatgtttttaaaaatgtagcatttttatcggtcacagagccgaaaaagtattatgacctattcccaaatacacgggcaataacagatatcctgttacagctgtcccattatttacatacgcatttagcaagctatccaccgcgggaaaatggcgatattgtgttgacagaggggcaactccaagcagtacttgaagaaatacgtgagcagttaggcgagggctgggcaaaattatatcgcgataaaacaacagcagcggtgcgtgaggaagttgtggaggagctaatgaattggcggatggcgacacttgatgatggctttgtacatatccatgcattgctgggcgttttggcaggtacatacccaccagactatcaaaaggaggctgaaaaatga

SEQ ID NO: 51325 - DNA, 4041 bp, Lysinibacillus macroides
atgacaaaatggcaaatgaaccgagcgggcttgctgaatttttggtattacgatgatgaaattttttcttttgagcaaggaaaattgttgttacgtggaacaaatggttcgggaaagtcagtgacgatgcaaagctttattcctgtgttgttggatggcagaaaaacagcggaccgattagacccatttggttcgaaagcacgtaaaatgagcgattacttgcttggcgaggaggaaatttctaagcgtgaggagcgtacaggctatctgtttattgaatataagatggctgattcggagcaatatataacgacaggcattggtatgcaggcacgtcgccataaagatttgaagtcatggtatttcgtgctgaccgataatcgtcggattggcattgattttgaacttgcgcatcgtagtaaagcggaaattatccctttctcacaaaaggagttgcaaaatcgtgtcggagttggtggggtagtggtcgattcacaaaaggactatgccgagcttgtcaataaatatatttttggctttgaaacgatggaggcttatgaagatttagtgaagttgttaattcaactgcgtgcaccgaagctatcaaaggattttaaaccaactgttatttatgaaattttagaatctgctttgccgccattaacggatgatgaattgcgccatttatccgatacgattgaaagtatggatcaaacgcagcaacagttggagcaattaacgatcgaatatgaagccaatacaaaaattttaaaaaagtaccatgcttacaatgaatatattttagcagaacgtgcattcaaagtagttgctgtggaggggcgattgaaaaaagctgaagaggcgcgtatgacaaagcaacagcagttggatgaagtgcgtgaaactgcgaaacagcttaaagaagaagaacgtcatgtgcaacgtgatttaactgtagcaatggatgaggaggagcgtcttcgttcgcataaagtatgggatttacaaaatagtttaacgaataaaaagcaagaacatcatgaaacgatggctactataaaaaagctaagcaatcgaaaaagtgatgaggaaaccaagcgtatcaagctattacataggttgcgcgaccagcaggacgagctttcctctactgaaaaagagcaacgagaaacactacaggaaatgcacgacttagcacaagatgcagcgtttcaggcacatgctttaaatgttgatagtttggcacgtggtacgatggagtttgcctattgggggcaagaggtggagcagcataaagagcagctacgccagatgaaaaagctcgtgtctgagcagttatgtttagcggaggaagaccgtaagctagagcgtgcttcttccgaaaaaacgaggcaaattgatatgttgcaaaaagaattggagcaggcaggtcactggtatgatgaggagttacatcaactgaagacagcgctatttgtttggatgcaaaagcatgacaaattagcatttactgcagaagaacagcagaaaatttcacatatcttgaataaaatgtataatgaagcaccttatcatgaggtgacaaatatattaatggctgcactcaataattatcgtgctgagttgacagttgagcgcacagccaatgaagtggcacagcgacaaaacgagcttgcgttacaggacaagcaacagcagcttgaaaaattgcgcaatgaggaattagcagagccacagcgtgtggtgggaacggtgttatttcgggagcagcttgtacagcaacaaatcccgtttgtgccattatatgcggctgtagagtttcaaccgcatataacagatgaacaaaaaagtcgcttagaggcggcacttgcaacgacaggtgtgctggatagtttaatttcaccacaaactttcgaggtgacggaggatgccctaattttaccaaatgcccagttatttggtcatacacttgctgattttttacaaccagacgtcgatgtggatggcatttcagtaacacttgtcgatgaagtgttgcgcagtattcccgttgaacaaaatagtgaaggcttttctgtggatgagcgcggtttttatcgaattggttgtgtcagtggacatgctccacagcaaggtccctcaaaatacattggacgtgcatcgcgcaaacgttatcagcaagagcaaatagagcttgtattggcagaaataacagacttgcagaatcgccaagcgcaacttgtcaagatgcaggaggaaattatgcagacatttgatgatgtgatgcgctggcagcaagcaatcccatctgaccgtactgtttatgatatttatgaggaaatggtgcaaacgaaaaacaagcaaaagggattgaaggaacaattgcaactgattgaccaagagtggcagactgtcagacaaagtttgcgtgatattcgtcaacagctgcttgaagtaaaggatacattgaatattgcccaaacgaaagacgccatcaatgaagcacttcaagtgatggatacttatttaaaggagctaaataatttacgctttgcgattttaaatcaacaaaatttgcatgaccgtatacgcgatgggcagtttcagcttgaggaagtacaagcgaaaattgatgaatatcacgatgaatttgtcgatgcggaaaataggcttgataaaattatagcggaaatttcttcaatcgaaacacagctaaagcttgaaggagccgatgcaatcacggcacgcattgcagaactccaagcaacattacaacaattgaaaacacgtgatgatgagattcgcaaggcgttgccaacatgtgaggcacagcaaacattattatctacgcaacttgaaaatgctgacaaggaagttacttttgcgaaatatatgtatgcacagtggcaaaaagcgttacaggacgaactagatttagcatttatcgctttggaggacaaaacaccacaagcgattgataagcaattgaaagcagctttgcaacacgaccgtgtaaaacttcaagagcaattatcgaaaatcatcaatgaagagatgaatgctttagctgagtatcatgtcagcagttatttaaaggaaacggagatgctagcagcatttgctatgctagaggatgatcgtgtagaaggctttacacagttacgaggacgtcgcattatagagcttgaatatcgtggacagcgtgtaagcccatatacaatagatcgtgcactgaccgcagagttagaggaacgccgccattatttagatgcacaagaccgcgagttgtacgaggatattatcgttaattcagttggcagaattttacgtcagcgcgttgctcgtgcacaacaatgggtgaaggaaatggatcaaattatggcacagcgcgacaactcatcgggacttattttttcgattagctggaagccgcgcactgcggaaggggagaacgagcttgatacaaaagatctcgtgcaactactacagcgtaaaagtagctttttaagtgaagaagatttgcaaaaaattacaaagcatttccgttcacgtattgaaagtgcgaaggaaattattggtctacgcaatgagggcaatacattgcatcaagtattaaaagaggtgttggattaccgtaaatggttttcctttgttttatcatatacacgccaaaacgaaacgaaaaaagagttaacgaacaatgccttttacaaattcagtggtggggaaaaggctatggcgatgtatattccgctatttacggctgcttattctcgctataaggaagcagatgccatggcgccatatatcatttcgttagacgaggcttttgcaggtgtcgatgagcaaaatattcgagatatgtttgaagtagtcgagcagcttggctttaattatattatgaattcacaagtcatttggggcgactatgacacggtttcaagtttagcgatctcggagctagttagaccgaaaaacgcggatttcgtcacggtattaaactatgtatggaatggtaaggaacgtgtattgaatggctaa

SEQ ID NO: 51326 - DNA, 1242 bp, Lysinibacillus macroides
atggctaatctatccgcatttcatcatgctgcatttcataaactatttgtgttgtttaagaaaaaatattactcgttgggcagaatgcgcggaactgtttcattgcgtacatttaacgcagaggaaatagaggaaattgcaggctttttagcggtgtcacctgcttttttacaacgcaagggtagcatagtgttagcgcaatttgaagaaaagcttgccacctccgctttccatgatttatcgctcgtgcagctagtcgaagccatattaaatgagccacttactacaaaagaacaagaacaaacaacaaagctacaaagtgaagaacaatttgtttgtcagcttcgcttagtattagcatcattgccacaatggttggcacgaattttggagaaactaccagatagccgctttatttggcaacagcaagcatctattttacctgctattcaatgtgtggcacaggcaatcaaaaatcggctaccggcagggcaatttgaacgtctaccaattttcgcacagcgtacaacgggcaatccacatgccttcgatgcacaaacactatatggaaggttacttcttcatgcggcatttagtttgaatgaaggagaattcccaaaaacaagtgaagaacgcagtgagttattagcaacattagggattgtacaagatgatttatggaattttgtgacttgtcaaggtttgcgtgcttttgagaaagggcaggagaatgctgtatggaaagcggctattcaagaaaacagtgtgttgaatatgccgatgcgtgagctaatgaaaattgactttgttcagccggttacgggcgaagcggtatgggttgttgaaaattctggtgttgcatcgacattaatggacgcacacccaaccgcaccgattctttgtacacatggtcagctacgcatggctagttggcgattacttgatttgcttgctgaaaatgtcgaaatttactatgcaggtgatttagacccagaaggcttactgattgcccagaaaattagtaggcgttatggggaacgtgtcgtgctttggcgcatggatgaggcttgttacgagcaagggttagctgaaccattagccgatgtgcaattattaaagttgaaaaatatcaagattgctccatctcttgttgcgcgcatgcagcaagagaagcgtgcggcatatcaggaagcatggttagcgtggttggtagatgatattcgtttgctaatgaaaaattag

SEQ ID NO: 51327 - DNA, 1590 bp, Streptomyces chattanoogensis
gtggccgatgcacgtcaggtcgtggggtatttggtgaggccggaagccggcgactacatcgcgatcatggatgtgctggatgggtcggtaaccgaccggacggttgccgagatcgcggcagcgctgtccgacaccgggcaccgtatggaactgcggctggtcgagacacgcctggacgctctcaagagcatgggagcggtctcggtgcgctcggacaccagccatgcgcgtcgctactccgagatccttgcccggaactggcgctacaccgccagccctgcgggtcggcatgtccagcgcttctaccggcaagtcctggccggtacagcaaccgtgcgggaaatcccgatcgtgtcattgggccgcatcgtgtcccacctcgagcagctcgccacgagcctcggcgcaggcgagctcgctgcccaccgcgtggacgccacaaccctcgactcagcaaatgccgtgttcaccagccacgacgacctcgacgccgctctggtcggtgcagaggacgcgctgatgaaccttgcggaccgcttcgacctggacgaggaccgcaccaacgacctcaagggcctgctcgtcgactacgccacccgcgtggcaaccgagctcgactccggctcggcacgggctgctgcggcactggcagtactgcgaccatggttcgccaccctggcacaggcagccatcgatgcctcccaggcccgggacctcatcgcagccggtgcgctcagcgcctcccgcggcggccgcaccgaggactgggatgggctgtgtgcctggttcgacgcgcgcaccggacgggccgcccgattctcgctgcgcctggtacgggcactgccgagcatgcacgccaacctgcgccggctgcactcgtcatcagggactgcctccacccgcacccgagccctggcgctggctcgagcggtgctgacaccaaagatcggtgtacagatcttccaggccgcgctgggcgaccacccctggcgcaaactctatggccaggccgaggtagacgacaccggccgcaacccatcctggcggggcgggccgcaggttccggtgcccacactgctgcgcaccgccggccggtccggcccccgaggcagaggcaccgcaccacgcgacgactccgccgccaagacgcaggtggcccgggaccgggcacatcgccaagccgaacacaaacgtgcggtcgcggcggttctgagctcaattcccggacagtgcctggacgaggccgatgcccgggtcgcactctccgctctcatggcggccgcgcgagccacggcgagcggcccgcgccggaccggcaccagcgaggggcttgcctgcaccctcgtgcacaccggaaccgggaccggcaccctgaacgcccccacctggcgggtactcctgcccaaccgcatccccctgtttcacctgcccggcagccgtccctccgccgcagctcttagcgcccttgcaggcacccacacgaaggacgacatctcagcccgcaccacgctgcgcatcgccccgcaactgggccacgagaccggcgacgacgagacacccaccgccaccctggaagaaggcgcagcatga

SEQ ID NO: 51328 - DNA, 1251 bp, Streptomyces chattanoogensis
ctggccacccacccgtggctggtcggcggccgggacgacgaactcatcgctgccgtgcgccgcaacgagcacgccctgcgctccgccgtagcccggctgggatgggtgctggtcatcgaacgcgacctggtgcgtctacggaaaagtcctccgccacgcccccaagcgtgggccacccaagggccaagcccggctgcctgttcctggttcttcttgctgctggcagccgccgagtcgatgccgccacgcaccgcgatcggacatctggtaacccaggcccgcgccgcagccgcagaagccggactgcccacccaccatgacatcgccgaacgccgcgccatcctggccgcactgcacatgctcgacgaacgcggcatcgtcgaacgcctcgacggtgacctggagggatatctgcacgacgaacaggcacccgtactacttgccatccaccacacccggctggcctacgtcgtcgccaaccccggcaccctcgatccggccaccgaccctcacgcctggcttcagcaggcacagcgtgaaccggacgccgcccgccggatgcgccgcgccctcgtggacgacacctgcgtgcacaccgcgctgctggacgaaaccgaggcacaatggctgagccagcgcgtacgcggcgacgacggcggccccctggccgacgccttcggactcgtcctggaacgccgcgcggaaggcgcagcgttcatcgtgccggatgaggcataccggcacatgaacgagctcggcccgatgcctttccccgcgccgggcaccatcgcgcacgccgcgctacttctgctcgaccacgccgcccttaacggcaccaccggcaacggacccggaccgggctggcgcggcatgagcgaggaccaggtggtggcggcgctgacggcatgcgccgacaacagcgcctccggaaaaggcggctggggagccgaatacgccaaagaccctctgctgctggccaggaaggtacgcgacttgctgaccggtaccaaccttgcccgtctcacccccaccgactcacccaccggcggagaggaaaccacaacgatgtggtggttcgctccaaccgccggccgttgggcccaagcgggcatcgcggttcccaaagccgtccgcccccgtcccagatcatcccgcgtgacccccgcgcaccagtgcccgcctaccccccttcagcaagggctgttcagcgacatcgaggccaaagaagccatggaggaacccacaccgtga

SEQ ID NO: 51329 - DNA, 4239 bp, Streptomyces chattanoogensis
gtgaacgacatcctcgacctggacttctccctgccgcagtctcccccaccctccggcgacccccgccggttcggcgcccgctggcgtctggtcggcgccggactgtcgaacgtgtggcgctacggcgacctggatctgcccgcggcatcggggcggctgctgctgcgcgggcccaacgggacgggcaagaccaccgcactggaggccctgtggccctacctgctcgacctgaacgccgccaagctcgccgccggcaaagcacggcccaccacgctgaagctcctgatgagccaaggcgcccctgccaagggccgccgttacggatacctgtggctgaccttcgctgctccgaccggcgaaccggcagcaggcacagagcaggagacggcaacagacgaggaccgcgtgagtttcggtgtccggctccagtactcacccagctccatccctgccgtgcgtgtcatcccgttcaccgtgcccggccgcccgctgaaagaactggcgctgcgtgcccccaacggcggcgccctggaacatgaagaattctccgaccgagtcgaagccgtcggcggccaggtcttcaccgaacccgacgactacatcgagcacttggcccaccgcatctggtccaccacccccggcgaactgcgtcttttggcctcccgactgcgggaagtacgcaatccgaccctgctgggcgacgtttcccccgctgcagccgccgatgcgctgcgccagtccctgccgggcgtggccggcgacgtcctcaccgccaccgcagaggccctcgccgaatcggacaccacccgtgaggccttcgaacgcgacgagcacgccgccacactcctggcagagttcgcccgagtatggaccgggcacgtcatcgatgtcacccggaccgcccacacagccgcacgcaaggccaacgacgaagccgccacacgcagccgccacgtccagcaaaccaccggccgcctcaacaccgcgaagtccgcggctgaacaggccaggaccaacctccaacggctcagtgatgcccaccacgccgcccaggctgccgcgcgcgccatcgagaccagcgaagcctaccgatcccacgaccgcgtcatggacctgcacaagcggctcagggccgaacaaaaggcggcagccagcagctacgacaggctccaagccgccgccgagcaggcccacctgcaaaccacagtcggccaggaagccctcaacgaggtcatcgccgacctcaccgacctgaccaccgaagcagagagcgccggcgctcagccagcgacgttgcagaccttgctcgcccaccacccccgcgcccgcatcacccgccctgtcgccgaccacgtcatcgaccccggccccggcctcaccctcacccacgaccgcgccggcctcgaccaactcgccaccacctgggctggcaccgcccaagaacacagcgccgcagctgacagggccgcactcatcctgcgcgaccacgagcccgttgcagcagcagacaccgcaaccaaaaccgcacaccatgcggcagccacagccgagagcgcttacgacgaagccagccagaccaacgaccgcgccaccgcggcagcccgctcggctgcccagcaggtgctcaccgacattgcccgatgggcacaggaaaatccccatctacgcggcctgcacgacaacccggaactagcctgggacgagcagccagtatgggacaccgaggatatcgatgccctcaccgcagccgaacctgcagcagtccgcgaccagctcaacgcatggggcgaccaagcgatgcgcatcagtgaaacccttgcagccgttcacgaaaacgcggccaagcagcacctcgccaccgcagccgacctcgaaaacaccgctgcacagcaccgcagcgaggcccgccacctgcgcgccgggcagctcctaccactaccccgcccccactgggccggaccgggcgcagacgacaccgcgctcggcgccatgctcgaatggcatcccacacccgatgccaccgacaaacacaaggcactcctagagctggcactggccaactccggaatcctcagcgcccacctgcacccaggcggagccaccacccacgcctggcacatcagccccacgggaaccgtccgagagcagaacctgaccaccgtcttggacattgctcccggccatccgcacgcagccctcgcccgggccgtcctggaacgcatcgcactggccgacacagccactggccaccacgacccggcagcgctcgtcatcggacgcgacggcaccttcaccgccggacctctcacagcagatccagtaaccgcactgaacgcagccgacagcaagctcccagacgcttcacacatcggcgcccgaacccgcctggcccaggcacgcgccaaagccgacgagctggacgcagccgcccaggaactcgaaaccagcgccgctgccgagcgccgcaccgctgccgagcgccgcaagcaacgcaacaccacccggaaccaagcacaggctttcccacccaggcacgagctgacggccgccgaggccgagcgcgcccgcaccgcgcaggaaactcaccaacgccagaacaccgcacggacgatgcgacagcacgccgacgacgccgcagccgagcacacccgcttgcgcaccgactgggccgcccgcgcccgaagcctgggcatgcccgccgagcctgcagccctgaccagcctgatcgcggacggccgaaagcacgccggcactctcaccaggtgcacaactcagctctccgcacggctgctgcccaggctccagcgcatcctgcagacactgcccgacgaaaccgccctcaccgagtgcctggccgacctccatcacgtcgcccagagcacacacaccacagccctcgaaacacaggcagaactcaccgaagcccagtcccacggcgacgcagaggacgcagcacgccgcttcgaggaagccaccgatcgagccaaggacctctaccggcacctcgaatccgcccggacgcagcttgtcgcggtcgagaagcagctcagcacctgcgaaagcaaccttgaagccgcccagcagcgcttcaatgaagcgcgccccctgcagacggagacacggtcacacctgaccgccctgctcacctggccacccctcgcccaagccctcggcgccagccccgacctctttccaggcggcgctgacggcccggaactcctcgacacggtcgaggacctgctcggccgccgccccaccgcctccaagaagaccctcggcgaacgctacgacaccgtccgcgccgaactcgcccaaacctggaccatcgcccgcgacgactcacccgccggactcgagcagctcgaaaccttcatcctcacccacgccgaaacccaccacgaccccctcagcgccgccacccgcgcacagaccctcgccgaccgagccaaagccgcactcgatgccgcggaagcagcagcattgcgcgacttcgtcatcggccgcctccccgctgccatcggaaccgcctggacagccctgacggactggaagaagacggtcaaccgcaaaatgcgcgcagcccaggcatcctccggagtcggcgtccaagtccacatcggcctgcgcgatgaccttgacgccgcaacccgcaccgtctacgagctgtcctgcaaggtcggcgacgccgtgcgcaccgagacacagaaagaacaggtcggacaggcactgcagtccctgctggcggcggccgacggctccaccatgacagaacgcctgaccgcagcagtcgacatccgcaactgggtcgatgtccactacctcgtggaacgacccggacccgacggcaaacccgtcaccggccaatggggcccgcgcaccggtctgtccggcggcgaacggcgcctggtcgtcctggcacccatgctcgcagccatcgccgccaactacgaccggttccccgcagccgggctgcgcctggtcccgctcgacgaagtccccgccgaggtcgatgaacgcggacgcgaaggactggcccgctacctcgccgaactcgacctggacgtcctgtgcacctcctacctctgggacggcgcacccggcgcatgggacggcatcgacgcccacgacctcgaagccggagccgacggcaccgtcgtggccttccccatgctgatccgctcaggccaggacttgcctgagcgcaccgatcccgaactccacaccgggaggcaggcgtga

SEQ ID NO: 51330 - DNA, 924 bp, Geobacillus sp. BCO2
atgacgtccgagtcgtttctcgtctataaagagcagtttaccgcgtatttgcgcgattttatcgtcgccttgcaaaaaacgtcaatgcagattgaacaattgcttgaagatttgccggaagaaggggttcggcagttcatcgagcatgtcgtcgactatgagcggtcgatcccgcgctttgccgatgcactgccgccgcgtccgatgcagattgaagaaaaatgggagacgtggcgcagcttgtgcgaatggtttttaggccgcgacgggcgcgagagtgagctgttgtttttgcaatatcagacgaatgaggcgattcgccgcctgacgcgcgtcgtgcagcggcttggcgagcggcatcatcattttcgcagccgaaaaggcgactacttgcatttggcgcgctggttttcccgcctcgaatcgattgaagaggcgcattgtctgtcggcggtcgtgttcggttgcttccatacgaaacatctcgtcgctgatgcggaggcgaccgacaacatataccgcgacgtatgggacgagccgccagccgagtgggtgacgaagccgcgcgtccgccattacggggaaaagaaaaagccgcaggcgatagaagacaaagaacgggagaaagaagaagcgcgccttcgctatttggaagaaaaagagcgcgaggaagcggcgcttaggcagcttgtgaccgatgggaaaatcgtgcttgccgatcttcctgaggtgaccccatacgtacggaaaacgctgcttggctggatcgccaaggcgatggggcgcgaggggaaagccatgaagacggaaaacgggtgggtggtcaacgtggcggcgaaagaggggacgatttgccttcgggcagaagatggggaactcgtaatgcccaactatgaaatccatgtgctgtcgggaggtgaatga

SEQ ID NO: 51331 - DNA, 1080 bp, Geobacillus sp. BCO2
gtggaagctgcgtttgacgacaaagcgaaggaagcgctcgccgcgctgtttgagcagttttggatcattcgcgaccaagagccggatttgtatcagctcatccgcgagcgtgaacatgtgttgaaacggtatgtggaggagaagtttgggtatcgactcatcgtccaccgctatttcgccaagctcgagaaaattcctgccgaccccgagccgtggatggggatcgagtcgtttcaagagccgctggattatgcgctgttttgctgcttgatggcgtatttggaaggcaaagcggtggaggacaagtttttgctttccgacgtgtgcgaagaaatccgcgccatgtacccgggagatctaccagtcgattggacgaactacgcgcatcggcgcgcgctcatccgcgtgttgaaaacggccgaacaaatcgggctcgtccgccggatggacggggagattgaggcgttcgcccagcatgtggaggaagaagcgttgtacgaagtgccggtgctcgcccgttattttatgcgcacgtatccgaaagatttgttgcaatatgaatcgatcgacgaattgctcgccgaggagtggaaagcctcgccgcaagattatcggcgccatcgcctgtaccgaaagctgtttttatccccggtcgtgcatcggacggaaggcgacgagcaagatttttactacttgcgcaactttcgccatcggctgcgcgatgacatcgaggcgcatacgccgtttcgatatgaattgtataaaaacgccgctatgttgacgcttcctgagcggcaggcgccgtacacgacatttcccgaccagaaaggaacgtcggagatcatccttcattttgctgccttggtgcgcgagcggcttcgggactatccgccggatgaatacggccgcattcacttgacgccggaacaattttccgcctggcttgccgattgccgccgccgttacggggcggggtggggaaaacataccgcgatatgtcggccgccgagcttgtccgagaggtgcttgcggcgcttcgcgaatggcgcatggccgatacagagcgcaacaccggcatga

SEQ ID NO: 51332 - DNA, 1053 bp, Geobacillus sp. BCO2
atggcgaatccatgggtgcttcatcgcgcgggactgattaacttttggtattacgacgagcaatattttcacttcgctgacggcaagctgctgttgcggggaagcaatggggcgggcaagtcggtgacgatgcaaagcttgatcccggtgctgcttgacggcaagaagacgcccgaccgcctcgacccgttcggctcgcgggcgcggcgcatggaagactacttgcttggagaaaaagatgtcgtcaaccgcgacgagcgaacggggtatttgtttttggaatacaaacgaaaagcatccaaccaatacgtcacgacgggcatcggcctgcgggcaaagcggcaaaaagcctcgacttttgggggtttggtcatgtttgacaaccgccgcatcggtcatgaccttcagttgtataaacaagaaaaaacaggcgaaaaaatcccgctgaccaaacgcgagctcgccgcagcgctcggcgcgggcgggacggtcgttgagacgcaaaaagagtatatggagctcgtgaataaacatgtatttcgttttgaatcgctcgagtcgtttcaagagctgattgaattgctcattcaactgcgcagcccgaagctgtcgaaagactttaagccgacggtcatttatgagattttggaaagttcgctgcctccgttgactgatgacgagctccgccatctatcggacacgatcgaaaacatggaccaagccaagcagcagcttgagcagctcgagcgcgacgagcgggcgttgaagcgcctctgcgatcaataccgcctgtacaacgaatatatgatcgccgaaaaggcggcagaatacgtaaaagcggtcaagcaggccgaacagctcgccgccgagcaacaacgcctgcacgatgaagaggagcaggcgcgaacgacgcttgatgagcttgaggagtccatcacccgcctcaaccgtgaagaagatgtgctgcgagcgcgcgaaatcgatttggctggccatgaagtgtttcagcaggcggaaaagtatgaacagctgaaagccgaacggcagcgctag

SEQ ID NO: 51333 - DNA, 1506 bp, Rhodococcus sp. ADH
atggtggaagaaacgagtgcgcccgattacgccgcgtacgccgacaccaatcgactgaagctgttttcgttcacgatcgcggaaaaacgggccgagtacctctgggtacttcgtgccttcgaccatgctcgcgccaactacaccgtcctgctgcatgccggagccgtcgcgcaaatcctcgagaagatcggtggatcggatccggcggccgatctgtcggcagcagaggtcactccccttttggatcagctccacgtgtgggagatcctcgagcgcagctacgacggcacccgcgcggccacgctggccgagtaccgcaatcgccacttcgtctaccagttcggtcaggccggataccaggtctatcgatcagtcgaagacgttctcgccgcacgcctggactcggcgtcgctctcgcgtctcgctttgccggacctgctcgcagacatgtccgaactcgccgaggccaaccgaagctccgacggcgatctgatcttccgcaagctcaagcgcctcgactcgacactctccgacatggctgatcgagccgcgcacttctatctgaccctcggggacctcgtacggaccacggagatcactccgcaggctttcctcacgcacaaggacgctctgctcacgcacatgcgggagttcagctccgatctggcgcgctacgcccccaagctcaaggaagcgatcgagcacgtcgaatccaccggggtcgatcgcatgatccgcctcgccgccgccagtgacgaacgggtgttcgtcccgatcaccgaacgcgaagacgactgggctgcgcgttggcgaggattgaccgcctggttcgtctccgcggaatcggggatcagcgagtccgagcgtctacgtgagggcacgatgagcgcgatcgccgcggttctggcgctccttcgccgcgtcacggaaacccgtcgcggcggcgtcagccgtgagagccagctccggcacctcgccggctggttcgccgccacgccgtccgaagacgcagctcatgctctgttccaggcagtgttcgacctcggtcgtccacgccatctctcgatggtgcatccggacgccgacatcatttcgcactcacgctcgtggtgggaggcaccgccggtcgagatcgcgcgaacactcgccgaaaccggccgcccgccctcacccggcttgccgagcaaagtcgcccgcaacgacggcagcatccgccgcctgcgcgaagagcagttggcggcgcaacgtacgcgcagtgccgcggcgcaatccctcgcgtcgaacggtgtttatcagcgcgaactcaacgagcaggagaccgaagttttgctgagtctgctcaatgcagcactgaccgcgcgcgttccggtggtgggacgcgtcaagagctccaccggtagtgagaacggggtgaagctgacgctcagtccctcggacggttcgaccaccatcaagactgctcgcggacgaatgcatctcgacggcatcgaggtcagtgttcgatga

SEQ ID NO: 51334 - DNA, 1443 bp, Rhodococcus sp. ADH
atgagagctcgcgagatcacgcccctagccctcgattcgtaccaacgagcggcgcgtgtgattctgtccaatcacctgatcacctcgacgtacccggatcgaattgcgttgccgctcttgcgccgttgggccaccgagctacgtgacgacttactggagctgttcggataccgcctcgaggtgacagagaccaccgctcgcctgttcacggtgtcggatcggctcaacccgtcggcaccggcccgaactgcctccgagcgaaccttcgatcgcacgcgttacgcctacctggcattgtgcctggccgcgttgggccgcgccgggaaccagatcacgttgtcggagttggcggatcacgtcgcggccgatgctgcacaagtcgacggcgtcgaactctccaccgatcgtgcgtccgaccgcgacgccttcgtcgacgcagtgggctggctcggagtcagaggcgccatcgccctcgccgacggtgacgcaaacggctgggcgtccaatcccgaagcgggagaagcgctctacgacatcgaccgttccgtcgtcgtagcgctgttccgtccaccgcgcgccctgcagcacctacactccatccgcggactcctggccgtcgagacctcgagcgcctccgaggacgacggaattcccgtggacgcgaaagagatcggacgccgagtacgtcgggcactcgtcgagcgcccggtcgtactggccggtgaactcgatcagcacgaattgatcgcgttggcgcagcccaagaccgcgtcggaagtcgaactactgacggggttggtggccgagcgccgcgccgagggaatcgcgatgatcgatcccaccggccgactctccgacgtccgcttcccgagcaccggaacgatcgctcaggtggcacttctcctggccggcgagattgccgaccgcgtactcgacgtcgacgctcctgaactgccgaaacttccgatcccgcacgtgtcggacgatcacctgatcgaacaactcgatgccgccatccccgaggccgggatcttcgaggacctcgccgacgaggacgacgacttcgtgctgcccgccggcgaaccggccgagccaccgccacccgtcacgtacccgaaaatcgacgacgactggctcgctgacaaggtcaccgagttggtggaccagttcgggcgaactttcgcggcgcagtggcaggccgatcacaacgggctgcgcaagcaggcgctcgggttgctgcaacgtctgcgcctgacgcatgcggtcgacggcggcgtactggtgttgcccgtccttgcccggtaccgcgacgtcgtggtctccgtgcgcgaacgcgatcctcagatcgacttcgcggtggacaactccgcaccggatccggtcgacgaattcggccccgaaccttcccccaacggcgaactatcagaggtagagaacgtatga

SEQ ID NO: 51335 - DNA, 4176 bp, Rhodococcus sp. ADH
atgagcaacgcccgcttccgacctactcgggctggaatcatcaacctctgggattaccgagaccaagagttctcgttcgccgacggtcgactggttctgcggggacccaacggatccggcaagaccaaggccctcgaggtcctgttcccgttcgtcttcgacggccgcatcgaaccgcggcgcctcaacccgttcgccggtgaagagcgcacgatgaagtccaacctgctctaccggggccaagacagcgcgcactcctacgtgtggatggagttctgccgcggctccctcgaagatcccgagtcggtgaccgtgggaatcggcatgcgcgcaacacgcaccaacgacaaggtcacccgctggtacttcgtcgccgacggccgcgtcggagtcgacttctcgctgatcggcaacgacgatcgtcctctcaccaagaagcagttggccgaacaactcggcagcgattccatcaccgaccgtcccctcgactaccgcacagccatcgacgcgcgaatgttcggtctcggtgtgcagcgctacgaccagctgatcaatctcattctcacgcttcgccgcccccagctcgcgaagaacctcgacccgaagggcctttcgcaggcactcaccgacggtctccgtccactcgacgatcagttggtcctcgaagctgcgcgttcgttcagcgacatggaggaagtcggccgcgcgctcgaggggctcgcggccgccgatcaggcagcccagagtttcatcggggtctacaccaagtacctgcgtcagcagtctcgcggagagatcgaacaggtcagcacccgcctcgcagcggtcaccagaggtgttgccgccatggacgagtcgtcgctcgcccagacccgcagccgtgaggcgcgggcagcagccgaggagcgcttcaaccaggccgagcaggcactcgagaacgcgcgcgccaatgtcgaagcactgcaacgctcgagcgcgtacgaaggcaaacagcaactcgacgacctcgcccaggccgtcgcgacgctcaagctctcgaccgagcagcaggcagacaagtcccggaaagcgcaggccgcactcgcacaacgcggcgacgaagccgacaaggctgcatcgtcggtcaagcgtgcggccgaagcactctcgcgcgccgaggacgaactgcaggcggcagccgaggacgccggcatcgtctggactcccctgcccgacggctcacgcagtgaccagatcacggcagcagtccgtggccatgccgaggagcgtgacggtgacgtacgcgtcgtccgcaccgcactggcgaccgtcgagaaggcggcgaccgaacgaacccgggccgaaaacagctctcgccgtggacaagagctgctcgaagcgtccaaggccgcggtactcgagggcgaagctgccgtggaactcgcacgcagtcagtgcgccagcgggctgcgcgcgtggtggaccgatcactcctccctgttttcggctgtcggcgccgacacgtcgctgttcgaagctctcgacgcggcgctcgccgaggtcggcgacgaagacgctccggcgctgtccgcagttctcgccgagcacaccgaggccggcaccgagacgctgcgcgagcgtcgacgtgaggccgaagctgaaatatctgcatcacacgcctccatcgcggctctcaaatccgagcgcaaggccgtctccgcggaacacgacgacgctccgcctgccttccacgcacgcaccgacaaccgcagtgaactgggtggtgcaccgctatggcagttggtgcgcttcgccgattccgtcgaaccagacgtggccacgggaatcgaatccgcactccaggcggcaaatctgctcgacggctgggtctgcccggacgagaagattcccgagcacgtcagcgagcagttcctgacggctctgcccgtcaagcagcgtccgaagggacgaacgctgggcgacgtcctcgaggtcgaaggcaatgccgacgtacccgacgctcgggtacaggacattctcgcgtcgatcagtctcgtcgaggcgccgggcgactccgatgcaagcgtcgcgatcggcgtcgacggccgcttctggcagggcgtcgcgcgtggccggcacgtcaaggccgacgccgagtacatcggcaccacagcacgggcgcgtcgacgtgaggctcggatcaccgagatcgacgcggctctggaagaacttgccgcggcagtcgatacggccaaggcactggtggcgcagaccaacgagcaactgagccggatcaactctgcggcaaaggaattgccgaagacaggttcgatcctgcgcgcactcaagacggtcaccgaatccgccggcgcactccgtactcgctcggaggccacggaaacggcacaacgcgaactcgatgcggcgatcgctgatctcgcggcgaaggaaaagcaactccgagcgacggcgtcgcagcaccggacgccgcatatcggccgtgaactcgactccctcgcggcggcgatccgtcatttcgagaagcagggggaactggcgctgcgctgccgacgggagcatgccaaggaagtcgaactcgaacgcgagtctcgcgaccgtctcgacgaatcacgcgccaatgcggaggaattcgccgaggaagccgccatcgccgaggagagtctgctccagcaggtgcagcgtctcgagacgctgcgcgacaccctcggtgccagcgccgagcagatcgacctggacctggcaaaagcccgcgcgaagatcgaagaatgcaaggtcgaacagcgtgcggcgcgaaaggcatacgacgccgccgtcctccagatcggcacggcggagggtgcgtacaacaccgccgtggagaccttgcgtcacaccctgaccgaaacccgcagtgatgcagagcgactcgcaccctacgcgcgcccggaccttctcgagttgttgggcgtcaaggaacatctgagctggccggcaagttcagcggcgtggatgagccccgatcagttggtctaccgcatccagaacgaagatcgcagcgaggacgcagcccacccgcccgtcctccccgaagacgtcgacaggttgtaccgagcgctcgaggctgcgacctcggcagtccgagtcaccgacggcgcccgaaaggcaacccgcacggcactgacctcggcgctgcaggacttcgacgcgcaactcgcagcggccggacaggactaccgtctgcagtgggatgcaccggatgggctgaccgtcgtacgagtccaggacgatcagggctattcgtcgatcggcgagttcgcaacgcggatccacgacgctcgcggcgatcaggagcagttgctcaccgaatccgagcgtcgcattctcgaagatgccctgttgacgggattggctcagcagatccacgagcgcacggtcgacgcacgcgagttgatcgcacagatgggcaccgagatgcgtgagcgtcggatgtcctcaggcaataccatcggcgttcactgggtgctcgccgacaacctcgacgacagctcgcgggcaatctccaagctgctggatcgagacgcgtcggccctcggcgtcgatgaactggcaactctgcgagcacatttcgcgacgcagatccgtaccgcccgcgcggcgcaccccgaacgctcgtacccggagattctgtcctcggcgctcgactaccgtcaatggcgcgtgttctcgttcaccctcatcagcggtgagggcaaggaagaccgtcttaccgtcgcgcggcacagcgcgctgtccggtggcgagcagtcggtttcgctgcaccttccgctcttcgcggcggcgcacgtcatgttggactcggccgacccgcacgccccgcgtctgctggcactcgacgaggctttcgccggtgtcgacgacaacggtcgcagcgagcttctcggcttgagcgttcagttcgacctggacctcttcatgaccggctacgacctgtggatcacgtacgcagacgtccccggctgtgcgcactacgacctcgcgcactccacggccgaacaggctgtcagcgccgcgctgctggtctggtcgaacggtgagctgctcgccgagcacgacggaacggatctggcgagggcattgggctcgccgctacggcgccgggtaccgacaccagccgaaggtgcgttggactacgcctag

SEQ ID NO: 51336 - DNA, 1455 bp, Actinobacteria bacterium OK006
atgagccgcgtctccgagggcgtctccccgctcgaactcgccgactaccagaaggcggtacggctcgtcctgcggcatccgctggtcacgcccgggtatccggacaggacggcgctggcgaccgtgcgccgctgggccgggcagctgcgcaccgatctgatggaggtgctcggctaccggctcgtcaccaccgccgacaccgcccggttgcagcgcgcccaggacggcctggacgccacccgcccggccctcacccgcgcgggacgccccttcgaccgccgccgctacgcctacctcgtcctcaccctcgcggccctgggccgtcacggcgcgcaggtggcgctgggcgagctggccgacgcggtcgccgccgacgccgtacgcatcgacggactcgggctcgacaccgcacgcaaacctgaccgggacgccttcgtcgacgccgtcacctggctcaccgaacgcggcgcgctcaccctcgccgacggctccgccaccgcctgggccggcgatcccgagcgcgccgaggccctgtacgacatcgaccgcgagatcctcctcgccgtccaccatccgacccgcgtcctgcagcacctgacctccgtgaccgcgctgctcgactccgccgacgcgctgggcatgtccgctggccgcgccgcccagcgccgcgaccaggcccgccgcgcccgccgcctggtgctggagaacccggtcgcgtactacgccgacgccgacaccgaactcctgggccagcttcgtgcccccgccctcaccgaggacctggagcgcctgaccgggctgacggtggagcggcgggccgagggcgtggcgctcatcgacacctccggcaggctgtccgacatccgcttccccggcggcggtaccgtcgcgcaagccgcgctgctccttgccggccggatcagtgccgccgtgcagcgtaccggagggcacgccctcgacctgctgcccgcgcccactgccgccgaacgcctcgcggcccgcgcccggcgtatcgacggcgccctcccgacgcgctcgctgatcgccgagttcgccgcgaccgacgaggtgggcgagttccagacgtaccagactcatgtgacgtacgagactcacgacgaggcgggtcaggagcgggaggagacccggtatcccttcgtcacggactcctggctccggggcaggctcaaggagatcaccggcgagtacggtgcgggcttcgccgccgatctgcgcggcgacccggaccggctgctcgaccaggctctcgacctcctggccgccatgtcgttgatcgcccgtgtcgacggtggagccctggcgttccccctgctcgcccgctaccgcggggtcaccgccagggtgaagacccgtacgccagcccgactactggcccaaccaccggcccagacttccctgttcgccgacgacaccgccaaggacccgactccgtga

SEQ ID NO: 51337 - DNA, 4173 bp, Actinobacteria bacterium OK006
gtgaggacccccgcttccatcccggctgcccgctatgtccccacccgcgccgggatcatcaacctgtgggactaccgggacgaggagttctccttcgccggcggctggctggtgctgcgcggccccaacggatccggcaagaccaaggccctggaagtcctcttcccgttcgtcctcgacggccgcatcgaccccaagcggctcaacccgttcgccgccgaggaccgcacgatgaagtccaacttgctcttccgcgggcaggacagtgcgcttggctacgtctggatcgagttcacccaccgggagaccggcgaggctgtcacctgcggcatcgggctgcacgcccagcggcaccgcgacacaccggctcggtggcacttcgtcgccgaaggccgcgtcggcgaggacttctcactcctcactgccgacgaccggccgatgacgaggaagcaactcgccgccgagctcggacgcgagttgatcgcctccacggccgactaccgcgccgccgtcgaccagcgtctgttcggcctcggccgggagcggtacgagcaactgctcaccctgatcctcacattgcgccgcccgcagctcgccaagaacctcgacccggccaagctctccgacaccctcaccgcgggcctgcgcccgctcgacgatgacctgatcgccgaggcggcccgctctttcgacgacatggagtccgtgcagctcaccttggaggggctggccgccgcagacgacgccacccgcgccttcctcgcgagctactccacctacctgcgggttcacgctcgcaccgccgcggacaggctcaccgcccgccgcgccgaaaccgccgagcgtgccgccgcagtgcgcaccgccgccgcggacctggcggcggcccgcgaacagcaggccgccgccgagacgcgcgccgagtcggctgacgcctcgctcgccgcccagcgcgcccgtctcgaccagctgcgctcctccgccgcctaccaggccatcgagcaactggccgacctggaacgcttggtgcgcgcctgcgagcagaccgcccggcaggcgagcgccgaatgcgaacgccgcaccgccgccaccggccgcgcccgcgccgaggccgaacgcgccgcccggctcgccgccgaactcgacgccgccgtctcccgggacgccgccaccgtcgccgaccacgcccacggcgccggcatcccctggacaccggcggacgccgagcccgcccgcctcgccgaccgttccgctgcgctggccgccgcccgccacgagggcgtccgggccgtgcgcggcgcccatcaggcggcacgcggtgccgagcagacccgtgacctcgcccgggtctcgctcgaccgcgcgcaggaggccgtcgccgcggccgaaaccgccgaagcggctgccgaggcggccctccgatccgcccgcgaacaggcccgtgcggcgctcggtcagtggacgggggaacacggcgcgctcctggccgaagcgggtgccgcccgactcgccgaagccctcgcactcatcggcgagaccgaggcggtcgcgcttgccgacgtcttcaccgaggccaccactcccgccgtgcaggagctgcgcgacacgctcgcctccttgcgcattcagcgcgccgatgtcgagcgtcggcacgcggagaccaaggccgaacgcgaccggatcggcgccgaacaggacgacgccccgcccccggcccgcggccgcactgccgagcggagcgagatgggcgtccccccggccgaaggctgggggagggcgcccagtgacggcgtgccgctgtggcgactcgtcgacttcgacgacgagctgacggatcatcagtgcgcctgcctggaagcggccctggaggcgtcgggcctcctcgacgccctcgtcgccgcagaggacctccctgtggcggccgggcacagcgagggctacctccgtgcaggtgccccggtgagtggaccgagcctcgccgatctcctgaggcccgagaaccccgataacctcggggatcccgagaaccccggggcccctgagcgcgaagccgcgatttcggccgcgcggatcaccgccgtactgcgcgccgtcgccgtcaccggcgacctcgacaccgggaccccccagatcagtccagacggccggtacgcggccggtgtcctggtcggtgcccacaccaaggagcacgccgagtacgtcggcgccaccgcccgcgctcgccgacgcgccgcccggatcgccgcctgcgagacgctgctggccgaactggccgcccagctcgacgagttggcgcgcgcacaggcccgaacggacgccgccctggaggcgtacgccgccgcccgcgccgccctgccccgcaccaccggcatcacgcaggccctgcgcgaactcgacaaggccgcggcgaggctgcgcgccacccgcgacgccgccgacgcctcccaggcctcgtacgacgagtcggtggccgcctgctcggtcgccgagcgcgccctgcgccgtaccgcggccgagcacgccatcgagatcgagcgcgtcgacgccgtcgagaccgccacccgctcttttgagacggcggtacgcgaactcgccgcccgccgccgcgaacacgcccgccagaccgaggccgcccaggcaggcgccgaccggctcaccgccgcagccgaggacgaggaggcggcgctggacaccgagcgcgcggcgcgccgccggcacaccgaggaggccgcgggacttcaggccctccaggaggccgtcggggccgaggcgcaggaggtgatgcgccaggcgcgggaggccgaggacgggatcgacgccttggtccgggaggccgaggcggctcgcatggcccagcacaccgcgatcgcgggcaccgctgcagccgaggcccgccgtacggccgcggccgaggccgggtcggtcgccgcggcggaggagaaggacaccgcccgcgggctgcgcccgtacgccgtccgtgaactcctcgacatcctgcgctgtccgccgggcctggcctggcccgcccaggaggccgactgggcaggcgaagcactcccgccggccgtgatcgccgtacacgaggcgatcctctccgcgacccgcgacctcacccccacagaaaccagcctcaagcagtccgtcacccgtctcaccaaggccctggacgacctgcaggcgcaactcgcggccgccggacaggactaccggcccgaatgggacggctccgacgggatcatcgtcgtccgcgtggccgacgaggagggcccgcttcccgtggccaccttcgcccagaagatctcctcccaccgccgggaccaggccgaactgctctccgagtccgaacagcgcatcctggaggacgccctgctcacccggctcgcccagcagatccacgaccgcaccgtcgacgcccgcgacctgatccggcggatgaacaccgacatgcgcaagcggaagatgtcctcggggacgacggtcggcgtgagctggctgctcgccgaccatctcgacgacgagcagcgcgccgtctgcgccctcctcgacgccgacgccgcccgcctcggccccgacggtctcgcccgggtgcgcacccacttcgccgcgcagatcaagaccgcccgcgcccgccaccgcgaccagccctaccgcgaactgctcgccgaggtcctcgactaccggcactggcggcagttcgcgttccagctggtacggcccggcgagtccggcaagacggaggagcggctcacccgcgcccggcacagccggctgtcgggcggtgagcagtccgtgtcgctgcacctgccgcttttcgccgcagcgcacgccatgctcaactccgccgacccgcacgccccgcgcctgctcgccctcgacgaggccttcgcgggcgtggacgacaccgggcgcggcgaactcatgtcgctggccgcccagttcgacctcgacctgttcatgaccggctacgacctgtgggccgcccacgcctccgtccccgccgccgcccactacgacctcgcgcacaccgccgtcgaccacaccgtctccgcgctgctgctcgtctgggacggcgaccggctcctcgccgacgacaccggcgatctcaccgccgccctcggctcgcccggcacccggcgcgtcccgacgcccgaggaggccgcggttgtcgactga

SEQ ID NO: 51338 - DNA, 1293 bp, Actinobacteria bacterium OK006
ttgtcgactgaggggcgtgagcaccatgagtacgacgagttgcggggcgcggggtggactcggttgcttgccgccgcccgccgcaggctggaacgcaccggcggcgtgctcgatggcgacatcgggctcgcgcggcccagtgaggccgaacgccgcaccgtcatcggcatcaccggccgctaccgggccgagaacgcccagcgcctcgccatatccttgcgcgagctggacgggtatctgcacgaccgctacggcaccggtctgctgacgaccctcggccggctccacggcccactgcgtgaccggccggccgaacggtccgacgaggaagcgcgccgcgaacaagccctggagtccgcccactccagccgactcgccgcgcagggatggttcgccgcctggctggagcggatcgccgccgacggcaccctcacccgtctcgtacgccgcggggacgcacccctcctcgacgcggcggtacgcgtcctggaaaggctccccggtgaccgggaccgcttccccggtgaccaggaccggccccctgcgcacccggccggcgccctgccgcttccggtcctcgccgagtgggccaccggcgacaccaaggccctcgtccccggcagcccactcgaacagctcgtcctgcgcgccctcgcccagcgcaccggtggcgacgtcccgcgcgtgcgggccgggcggcgcgccctgtgggagagcgccggagccatcgccgacgacctcgccagccaggtactcgtcctcaacatcggggccaagggcgacaccgtggtctgtgactggctgcgcgatgccgccgacttcggcatccccttccggctcacgctccaccagcttgccaccgccccggtcgttcccgccgcccgcagcatcttcgtctgcgagaacccggccgtactgcgtgctgcgtccggagaactccaggacacgagcgcggccctcgtctgcaccgagggcgtcgcgtctgccgcctgccacaaactgctcggcgacgccgtacgcgcgggagcccggctgcactggcgcgccgacttcgactgggccggcctgcgcatcaccgcgggcgccgtggtccgccacggcgcccgcccctggcggatgaccgccgccgactacacggcggcactcagcaagggcgagtccacaccgctcgcgggaccgcccgcggccagcccctgggaccccgaactggcccgtgccatggcggagtcgggcagcacggtcatggaggaacgcctcctgcccgcactcctgtccgacctcacccgcacctga

SEQ ID NO: 51339 - DNA, 1515 bp, Actinobacteria bacterium OK006
gtggcagaggattggtggaggcggcttgacccggatctgtgggagcccttggcagagaaagcccctgcagtccgcgaacttcgcgctgcagtcctcggggcgctgctgctggcgagcacacgcacaccgatgtcgactttggccgacgtgcgcagtctccttgctgaggtgggctatcacgacccggtcagcaacgaggatctcgacgacgcactgaaggccctcatcgacaccggtcacgtcgaaccattcgaggactacacagcagtggtctcctcgtacaccgacgccaaacggcgacgggaggcatgggctctcaccaaacgggcgcgaatcatggtcgccgcggtacgcgacgtcatcgacagcctggaccgctccctgcaactacccccgcggctcctcgatgccgtggaagccaccgtaagaaggatcctggaccactttcaccaagacgcagacctgctcgccacagacctcgcccaagtcaaagcccatctggagcagctccaggaggcgagcggcgacttctacggcgccgtggcttccctcgtccagcacgacgtcacagatgacgccgtgttcaccagcagccgcgaacgtatcctcctggctctacgccacttcgcctaccaaacacagcgcgcgctggatcgcgtccgtgccgccctggccgatctcaaggacgccggtacaagctcgatcgtcgagagggcactgcccggagcaggcatcctggacgcacgcgcccagcactcctggctgtccgagaaacggcaacagctggacggccttgatgcctggttcgcgccccgcggctcgatcgagcggttgattgatgcgtcagctggtgcgatccacactctgctgggagccatcgagcgccgcttctacgccaatgcccgtggcagtgatctgggggctgacttccgccagctcgcccgcatgatccacgcgcagcctgccgaggatgaggcgtaccaggtctttgcagcaggcttcgggatctggacggcacgacacccgcggcgccccgagtatgaggacatcgcgcccggtttcagcgcggctgaaggcgccctccaccctgctgaggccgttctgcgcacgaccgagcgcggcgcccgatccgcgggccgaccgcagaagatccctgacctggccgagaagcgggcgcaagccgaacttgtatccaaagtcgagctggagcggcgctccgcgctcgcccaagacctcatcacacccggcagggttcccctgacccacttcgccggcctggatgccgaccacacggctctgttcgtcaccttgctggaggaggcactcgacgccttcgaccacactgcgggccgcggtacggcggacacagtgggagcccgcatgcacgtatgggtgggcgagttcgggcggatggtcacgatcgaactggaggaaggccatctcacctcgcctgacctgcgagtcgaggtcatctctttggccgccgccacagccgggtcgacggaggtagcgtga

SEQ ID NO: 51340 - DNA, 1341 bp, Actinobacteria bacterium OK006
atgtccgacgctgatacgcctgcggacggctacacggacgatgaggttgcggagtcttcgaacccggaggttcgctccgtcatcgcgtccttcctgcgcagtcagttcttgaccatcgagtctgacccggatctctttcgtctcgcggttcatcacaaagacgaggtgcgcgcatggttcgccagctcggttggctggccattcgcggcatatccatccgacggcatgtgccgtctgtacaagagacgatgggatccgccctcggatcggcctccgcgcatcaaattgcagggcgcttccaaggaccgcacagcatcaccgttcgtgatcacgctcatgtgcctggtgtgcgagcagttgtggcgacacccagagaccagcttcaacgatctgcagcgtgccctcgtccagacctgcgctaccgagtccgagtcaggtcgcctgccgcgcttccagccggttgcacaggctggcgaggggcgggcacgagccaatgcacatcgtctcgggctggttgatgcgctccggcttctcgaggactggcacgtcatcgatgtcgatcagtcgctggacatcgcggaacaagaccatcgcgccgatcttgtcatcgtcgcccgcagggatcgtctcgccgcccttccggccagcctgtctccgtccctgctggacatcgacctggaccgcccggaaacccacgtgccggccctgtgcggggatcaggcggaactcccagagcacgcctctgctcgccagcacgatcggaggcggcggcacactgccctgcgcatcgtcgttgacgatcccggcgtgacgccgcatgccgactccgatgcgggccgctacctctcttcgcccagtgggcaacgtcaggccatcgacgccgccgctgccgctggtctggtctgcaacgtccgcagagactggtggatcgtctccgacccggacggggcaacgacagacgtcaccttcccgctcgcgaggaacatcgaggagcaggccgccctcgtcctgcttcagacactcagcaggccaggcagcgaggaatcgagtcccgaactgtcactcgaagaggccatcgcccgtatccaggagcaccttgaggagcaccctcactgggccgcgagccaccggtcccgcggagcgcagcgtatggctaagaacgccgtcacccgactggtagaggccgggatcctcatgaatgcgggacaagcagatggccggtgggtcatcactccagctgcgcacatgtggcaagtgcgcgtctccgacctgaccgaaccgtcttcgaccgccgcctcaggtagcgcgtccgatgtggccgaaggactctcagatgaatag

SEQ ID NO: 51341 - DNA, 5391 bp, Actinobacteria bacterium OK006
atgaatagcccttcccgtaccaaccgcgacctcacagccttcgcgagtcgtctctcgcagcccggcaccacgacaccgatcgatccccatccgggagtacggggacgttggcagccgacgcggtgtggcgtcgtcaactcgtggaagtgggccaacgagcagttcttctatggcggaggatggctcgcgatggtcgggagcaacggctccggcaagtccctgacgggagccacgttctgccccactttgatcgacggtgacgtcagtcaacgaagcctctccgcttcggggctctccgccggcactttgcacagcactcacacgctcgggcactcgggaccgcccaaggtcggcgtgtggtggcaggagtacggcttcactccagatgacggcgaagacggccaggagactcgctggctcaccgtcggcatgtggctgcgcagccgcgggggcaccaacaacactgtcgaccgcgcatggttcatcgcaccggcacgagtaggcatcggcctgatccttgagcgcgacagaagtcccgtgaacatcgaggacctggcccagcagctggcgcagcacgacggccagatgttcgcctcagagcagatggccaagagcgcccgcaaacacctcacggtggttgccgacgagaactccttcgccgaagctgtccgcgccaccatgtacgagccgctcgacgcagaccaggtcgatgccctcaccaccgtgcttcgtgcgttgcgcagcgttcaggccaacgacaaggtcagcccaacctacatgcagtcgactctgacatcggcgctcccggcgctcgacggcatcaaggtcaagcgcctggccgaggcactcgcaaagacggagcagctccagacccgtttggagagcgcgaagagcgagcacgctgtcctgtcgaagatcgcgagctcatacaggcgatatgcccgagccgtcgccgtgagagcttcggcgtatctccttgagcgcgagagcgctgtgcagcaactcgcgcgtactgaagcttcgttgaaacgccagctgcgtcagcaagaggagactcaccgcagcgccagttctacagcggaggaacttcaagaggagatcgaccggctggctgcgaccgtaggcatgctgcagctcaaggtggatgggcacccgggtgccagcttggaccggctcggtgatgaggccgaacgccgcgagcaggacgccgagcgatacaaagccgacgccacggaagccgagacccgggcgggggaatcccgtcagttcagcaaggaggccagcgagaaggccgaggaagcctcccggcacttgaaggctttgctggaggaactgcgtattcaggccgaggaggcgaacgcggaggcgttccacgaccggctcaagtcagtcgtagcgtccctcatttcccgcccctcagcagagcctccggcaggcaccgaggtagacgcacgcgccgcgaaggaggtctttcagacctggctcgaccaacgcacagccaccatcgagaagatcaacaaggcactggctacgttcctcgccgcctgcacagtccgcgacgacgccagcgacgactacgtggcgctgaagcagcaagcggaaatcaaggaacagcagtgggacgacctgggcgagaaggcggaggtcgtcgaggacgaggtgcgggccgagatcactcagctcatcagcaccttccgctacttctccgctctgccagaggaactcctttcttccgcaccccttcacgtcgatgcgctggaacgctgggctgaccagagcctgcgacaggctctgcgcacgatcgacgtggagggccacaaggctgaggtcgtcggcctggagaagctgctggcggaggcgctgcacaggcgccacggtgcgcagactgcggctgcggaatcagcacgtcggtgcactgacacgctgagcgatctcacctcgcgtcttctggagctcgtcgaaaccccgcaatctttcatcgagttgagtgattctgtcggccaggctgctcggctttgcagcccagagcgtgacctggcgggtttcgatgttgttgggtctttggaacgcgtcacggctctggcgcaagccgccgagcaggagataagggaacgccgtacccggctgcaagaggccgagcgcctcatccgggagcagagtgtcgcgcgcacgaaggcgcaggatagcgacgaccgggcaaaagcggccgagtccgaagcacgccaagcggtacagacagttgctgcggccgagagagctgcggaggaggcagctggcgcctgggtgaccggtgtccgccagtgggctgaagagctccaggagctcgaccgcacccgactgcggctgcccgcgcagggcccggtcggagacgctgccatcgagtacctggccagcgacgtctctgaagcccgcgacgccgccctgacccgacttacggctacgcagaccaaagcgcaggatgacgcgacacgcttgtctggtcttctcgatgacttcgacggccgcatcatcgaggccgaacaggaaatgacggggccggacgaaccgtcgtggcgtcctgaccgtactggccgttcgggcgccccgctgtgggcccttgtggagtttgccccgggattggacgacgagctcgccgacagactggagggtgggcttctcgccgctggcctcttggatgcttgggtctcctcggacggcacttgggccggaggcgacgttcatctcgttgaaggggcggctgtcgacggtcccacgctcgcagatctgctggtccccgactctgccagcagcatccccagcgaccgtgtgcatgcccttctcgcgtcaatccctctgaccgctgccggagatgtgccgaatggcgatgtgcatacggtcgtcggcgtagaagggattgtccgctccggtgtgctgagcgcgtcgagtcccaccggttgggagtctcgattcatcggtgctgcggcccgggagcgggcacgccaactcctgctcgccgggcttcggatccagcgtgaggacactgctgctcagctacttgaaactgaggagaaagtccagcgggcgcaggcatcgatcctgagggtcaaagaagagagccgctatcccgatccggctcccctgattgaggaacgccgggttgccgagcagcgatcgattgaggccaggcagcttcgagagaaggcaacgaccgcacgcgaagtcgccagggagcagaccgagcttgccgtgcaggcagaagtcgctgcggccgaggcatgcggagtggcccgcgtcctgaccgaccccgatgacatcaggggggccttgaacgtgtgtatcgatgtacccagtctcattgagcgggtcctcggtgccggccgctctgccgtcaacacggcggccaccgtgcacgcggtcgtcctgcaagtcagggagtacgaggagcagcaagccgtagctgctgtcgctctcgccgaggcccgggaagcggcacaggccgcggctgctgaacacaccgccctcccacctcttgatgtcgtacgtcaggctcaagctgacgcgagcacggcggaacgtgaagccaggtccgctacgtcagccgctgagcgggccaagacgaccctcgaagaacgtgagcgcggagtagcagaagctcgatcccagttgagcgaggtggggcgcactacggacgggcgtgtgctccccaccgaaccggatgtggtcgacgcctacaacaccactatcaccgagctgcgcagccgcgtctcggactgggcagaggccacggctcgcactctgctgctcgcttctgacgcagccaaacagcacacgaccgctcgcgacgccgagaaacgagctcgtgaactcgactcccgggcgcaacgggaacgagcagaagcaacgaaggcacggcacatgtacggggaggaactgcgtcaacacggccttccctaccaacagctggttgccgacctatctacgaaacgcacggatctcgtacgtgcgaagacgcgcgagggtgaggagcttcgtagggcgaacgaggcggacaaggagatcgtcagggttactgagcgtctcaatgcccaggccgagaaggtcgccgcgagtcaggcagcgcgggaccgttcggtggcagaggtccagtcgctcttcgaccgcgacctcatcagcgaactggtgagcacaacccccctgaaccggcccgacacttctgaggaggcatcggacgtagcgcggcaagtgatccttcagcggggcctggccgcgtccattacgccggagagcgccgagcgcgaggaatcatcagcgttcaaggaggtcggaacccgggtccagaagattcgcctcgacctgagtcggctgagccgggacatcagcatcgaagacgttcccgacacgaactggcggcgagtggtggtgaccgagcgaacccaggcggtcggcggtctgtccagtgaagtggccagcaccaaaccactccggtctgcactcgatgacctgggacgttccatcgacactctcgaatccgacttcgacgagcaggtacgaacagaagtgaaaggagcaattcttacagatctgcgcaaacacatccaagttcgtattcaactggctaaggagatcgtttcgggtattacatcgaccctcgccaccgtgcgcaccggcgtagcccgcgtcggagtgaaactcagttgggagccgagcgagagcgatcccgtcgcccgcgaagccctggccctcatccaagacctggacacagagggagagtttgaccggatgtacaacttctttgtgcagcagctcctgcatgaagagcgcaccgaggcatcctggcctgagcgagtccagaacgtgttcgactatcgaagctggttcaagtgggacatctccctcacccataccgacttctcggaacccggcagccctgctgaagtgttccgcaccgtcagcccgcgccggaacccactcgacaagctgtccgccggcgagaagcgcctggcgacgatgctgccgctgctggccgcggcccgagccttctacgaggccgatggctacgtgggcccacgcatgatcttcatcgacgaactcaactctgccctcgatgagcagaacctacggaagctgctcgccctgctgcgctcgtgggacttcgatgtcctggtcacgctgccttccatgcagcctttgctggtcaaggagacgggctccatcgggatccacaagatctttcacgagggaagctcgctccgctacgcgatccccagcatctggagcggacacggcgcaccagtcacggcgcgtatcgccgtgggcgtgcaacacctacctcggcaacggtcacaccacaccgctgcccccggcgatgggcaggactcactcttcggcaccgggacggagggcatcggctga

SEQ ID NO: 51342 - DNA, 1362 bp, Actinobacteria bacterium OK006
atgcgtaatcggggtgatctcgccgaccctgatcttcgtcctctgtggcaggccatcagtgtccgcctggctcagggaggcgacgcgggcagcatccagaccgtgagggtcgagctgtcccgcgcgggtcgcgccatgctcaccggctggctctcccgagcgcctcaggtctcccgacgcaccgtcgcgcttcgcatcgaggggggtttcacggtcgttcccgtgcaacgcgtgctgcgcgcgctcaccatgacggcggacgaacttcgcgacgtcgtcgagcagaacgtgggaaagattccgccgctcgctgaggaccgacggagggccgcacgactgagagaggacatatgggcgtatgcggccaccgtgctgcccgacacaccacgacttaccgcccgactgcaggccagaggtgtcgtggacgaccgagcaggcgacctgcgccatctgatcgatgctcttgctcgagtcagggccaaactacccctctcccgacccgccacgctggcacgactgtcgctcaattgcgctggtgacccccactacttcgacctgaacgacgctggccagggagccaggctcgttctcctttccgccgacatgctcggcgccgacatcccagacacacccgcagccgagcgggccctgctggcacggatcggcattgttgccgacagcctgtcccagaccgttctggttctgaacgtgaacgcgacggggaacggccccacggatcgggcactgcgtctggcccacgaagaccagcgccccacgcacctgactcttcatgacctgaccctgtacccgccgatactcgacagggcggagccgtggctcgtagtggaaaacccgtctgtcatccacgaggccctgatgcgacgagtacgttcacccgtcgtctgcacatcgggcactctcaccgctgtcgatcacgtgcttctcggcctggcccgtacacgtggcatccccatggagtactcgggggacatcgatacgggcggaaggaacatcgcctcagccgcgcaccgccgatacgacgtacccagccgggagatggacagcgacactcgccgagccgtattggccgcgggggcgctctcggaaggcccataccccgtccccacactcgcagggccgtcctacacgccatctgcggatgaccgcgatcggggcactggacggggcggcgattccgagccagtcattttccaggagcaccccaccgtccttgatcgactccttggctccgacccagaagaccctctgccgctccccggctcccagccccacaaccgtgactcatcggagccgccgcacattcccgtccaaggcggcgctctggcggacccattgccatga

SEQ ID NO: 51343 - DNA, 1488 bp, Kibdelosporangium phytohabitans
ctgtacgcgtacctgcaggccagggagcacaaagccacgtacctggcgatcatgcggctgttcaccgcgaccttgctcgccgatctttccgcaggtgacgtggccgcggcgctggcgcctgccgagcgcgacggcacggtcgaacgcggcgagtcgcgcatcgagaacgtgatcacccggctcaagcagctcgtcgagtggggcaacctggtgcagggccgccgcgaggtggtcgccgccagcattgccgagttccagcacggcagcgtccgctaccaggtcagcaagctggccgtgcgcgtccagcgcgacgtggacgagttgctgcgtgtgcccgaaggcgcccgtgaggtctcccgtgagctgctgcccgcgatcgaacgcggcctgaaccagctcggcaagacgctgtcgaacgcggtcggccaggagcagcgcgacgccgggtccggcgccgcgcagcggtcccgcgagctgctgtccgagcaggtcacgacgctgttcctgcagcacgccgagctcgccgccacggtccgcgacttctacgcgtacctcggtcaggtcgtcacgcgccaccacctggccgccgacgagatctccggattccgcaacctgctggtcgagtacatccagaaggtcgtcgaggacgtgctgcggcagaccccggcgatcgccgagcacctgaccggccggttcgccaacgcccggcccgagctgctgcggctgctcggcacgagcgagggcctcgggcccgaggtggaacgcgccaggggccgcagcacggcggactggcaggagctcacggactggttcgtggaccgccccggccgcccgtcgcaggtcacggtgttgcgtgaggcgaccgcacgtgcgatcggttcgttgctggcgagcgtgaagcgggcgaccgccggcgggggcttgctgccgggccgccgggcggagttgctcaagctggcgaagtggttcgacgacagcacggccgccgagtcggcgcagatgtacgcggcggcgttcgggatgtactcgtcacggcatgtcctacctgcgccggaacacgattcggacgacgagcgcacgccgtggagcgaaggccccgtgtgcgacgtgacggtcagcgtgcgcagccgtagcgaccggggcgcccgtggccgcacctcgcggatcatggacgacccgatcaccgagcagtcgctgctggccgacgcccggcgcgccgacgaggtcagggccgctgacgtggccgaactcgtggccgcggcaccgaagctggaccaggtcacgctgtcgcagggcgcgctcggcgtgctgtgcgaactgctgaccatggcgatggcccagcgcgacagcgcgcaggactccgggtcggccgaggatcaggtccgcggcctgaccgtgcggatcgagtacgccgaaggcgagaccgcgaccgtccgcacggccggtggaacgttgacactgcgggattcccggctggtggtgggatga

SEQ ID NO: 51344 - DNA, 1230 bp, Kibdelosporangium phytohabitans
atcagcgcggccgatccgctcgacggactggcggacatcgacgcggcgaacgtggtgcgctgcgcccgcaccctgcttcgccgcccgttgctgcggctcggcgggccggacggcgaactgcttccgttggtgtaccggcatcgcgtggtgctcggtgagatgttcaccgcgctgctgggctaccggctcgtggtcgagcgcaagttcgcgcggctctacaaagccggtcctggcgaggattccacgcgcggtgtgcaggagctcgcaccgcgcgggtacgcgtacgtggcgttgaccatggccgcgctgaccgggaccgggcgccaggttctgttgtcccgcctggtatccgacgtccgcgcggcggccgtcgaggcgggtatgcaggtcgtcgacacgatcgcggaccggcgtgcgctgaccgccgcgctgcgccacctggtgtcgctgggtgtgctcaccgagaccgagggcacggtcggctcggccagccaggacgccccggccgaggcgctgatcacaatcgagacggacctgctcggccagttgctcgccggaccggtcgcggacgcgcaggacgccgggcacctggtcgcgctggccgcgcggaccgcgccccggcgggtggatttccaggtgcgccgcaggctggtcgagactcccgtggtgctgtacgccgatctggccgaggacgagcgggaatggctgttgcgcaaccagaggcgcgagtcgtacctgctcgagcggtgcttcgggctgtacaccgagacgcggctggagggcatcctcgcggccgatccggaggagtacctgtccgacgtgatgttcccgggtaccagtacagtcgcacgaatcgggttgctcgcgctgcccgacctgctcggcgcgaaccccggcgaggaaccagaagaatccgaagtggacagtgctggtcgccgcccggtcaccgccgagaaggttcgcgaggtgtgcgaacggctcgtggccgactacccggcggcctggtcacgccaggcggccgaggatctcgacgggatcgtcacggaggtgctggcgctgttggtccacatgggacttgcagtcgctggcggcgagcggtggtggctgtcaccggccgcggcccgttggtggccggaacccgacggcgaccccgagcgcgagatcgccgagccacagccggagccggaagtgccggggtggtcactgttcgacgaggagggcggcgcatga

SEQ ID NO: 51345 - DNA, 4053 bp, Kibdelosporangium phytohabitans
atgacggatcgctggcggttgcaccggggcgggatcgtcaacgtctggcagtacgccgagcagaccttcgacttctccggcgggcgcgcgatcttccagggcaccaacgggtcgggcaagtcgcgcacgctcgagctgctgctgccgctgtgcctggacggcgacctgcggcaactgggctcgaaggggttcgacacggtcagcatccgcaggctgatgctcgacgactacgacggcggcccgaaccggatcggctacgcgtgggtcgagctgcggcgcgaagggcacacgctgacctgcggtctgggcgtgaaggcgtccaagacctcgcagcagatctccgactcgtggcggttcatcaccccgcaacgcgtcggcatcgacttccagctggccggccccgaccgcgtcccgctcggctccgcgcagctgcgtgaagtcctcggcgcggactgcgttctcgaggaggcggcgttccgcgccaagatcgccgagacggtgtacggcgtgcccgcggtgcgctacggcgacctgctgcacctgcagcggaccctgcgcaacccggacgtcggcctgaaggtgctggagggccagctcgagcagatcctgtcggacgcgctgccgccgctggacgcggccatgatcgagcagctggccacgtccttcgacgacctggagtcgatcagggagaacatcacccggctcggcacggcggacaaggcgctgcggacgttcctcaggacgtactccgactacgccctcgccgggctgcgcacggccgcggacaagctgaagtccagcgaggacaacgtcaggaaactcggctcgcagaccaagaagctgaccgcggagctggagaaggcgcgcggtgaacgcgccgaggccgagcgtgccgagcaggacctggaaggcggcgagcagcaggccgaggagaccgtcgacgcgctcaaggagctgcccgcgttccgcgacctgcaggatctgcagagccgcgagaagctcgtggccgcttcgcggtcggccgcgtcggcggcgctggacgtggcaggcaaacagcgcctggccgaggactccgctgtcgacggtgtcgtgcgattgctgcgccggttggcccaggacctcgactccgccggggaattcggcgagtcgctgcggacggcgttgcagtcggctggactggacaccacgctcgcgccgagcatgccccggatgaccgatggcgaaagcgtgaccatcaccgaacgggtccgtgccaaaccggatcccgaggccgagccgctgccgatcgagcgcaaagtcccgccgcccgtcaccgccgacgagctgctcacagccttgaccgaggctgccgagcgcgccggtcgcgcggcgaaggaagccaggcagcgcagtgctttgaccctcgccctgcaccagcaggcggtcgagcaggagaagcaggagcagcgcgtggagacgctgcgttcgtcggcacgggccgcccagcttgaggcgaccgaggcggccgggcgccgcaaccaggccaaccaggagctggtcaccgagtcggacgtgtggctcgagcaggtccggtcgtggtgtgccgcgggcccgttgacgtccgcgacgccggaacgcccgctgcaactgccgtccgtcgaggagctgtcggccaaccctgcccaggcccgcgaactcggcacggcggcgcgccagtggaccgcgccgctcgtccagaccgcccgcgacgtggcgcatacggcgtcccagcgccggaccgagacgcgcgacgccatcggcgaacgggatgccgagctggctgctttgcgtgcgggcaaggaacgttcgccctcgtcaccggtgtcgcgcgagtcctccggcgcggctttctaccggctggtggacttccgcgccgacgtgtccgacgccgaccgcgccgggctggaggccgccatggaggcgagccgcctgctcaacgcgtgggtcacgccgtcgggttcggtgcctgatctcgacgacgtgctggcttcgcccggcaccgccgtcgacggcccgtcgctcgccgatgtgcttgtggccgttgaggttccggacagtccggtgcccgccgaccgggtcgagtcgctgctgcgtggcgtcggcatgggcgagtcggcggcgagcatgacgctgtcggccgacggcagctggcgtgccgggacactgcacggccgcggctcgaaaccggctgccgagttcgtcggcgcgggtgcccgcgcggccggccgtcagcgccggatctcggagctggaagaggaactggccgagctgcgcacggaactggcggtcgcggaggagcagcagcgctcggcgaacgacgtcgtcgccgaatgggaacggcacctggagaagttccccggcgacgaggaactgatcgccaagcacacccggatgcgcacggaacaagaagcgaccgagcgcgccaacaagcacgcccagcagctgcgcgaagagcacgaccagatgcagaaccgttggcaggcgacaactgccgacctgctgcggcaagcgggcgacgcggggctctcgccgcggtcggaagacctccgccaagcccagcaggcagcggccgaagcactgggcgcggccgagcgactcgccgaggccctgcgccagcgttgccgtggcacagtggaagacctggtcgacgccacacaccgctaccacacggccgtcgccgaccggaccaccgcggagtccgaagcggaccagcgctgcgccgaatacgcggcgcaagcgggcacgttgtccgagctcaccggctcgatcggcggcgaggcaaaggaaatcgcggcgcggatcgcggagctggagaagtcccgcaagcagatgcgcgggcaactcaaggacatccgcgagtggatcacggcgttgcgtgagcaggcggcgaagctggacgcgcaactggaaagcgcgaccgagcaactggccacctccgaggaggtccaggcgggtgcctaccgccagttcgcctcgatcgccgaggctccgggcgtgctgcctgccgcgttgccggagctggcggagacggacctggcggcggtacgtgccgcggtcgtggcggcctcggaccgcaagtccgccggtgagacggcggtgatcaccaaactccaggacctgcagacggcgctggccggcgggtacgacatcgcggccgaggaacacgcgggcctgctgaccgtgtcggtggccggtgaggaaggcgggcggccggtcgcgcaggcggccaggcaggtctcgtcgaaactggctgagcagcgcggcttcctggacgagcagtaccagcggatcttcgccgactacctgatcagggacctggcggagtggctgcgcggccagatcacggtggccgaggacctggcccgccggatgaacgacgtgctggggcaggcgaaatcgtcccagggcgtgcacgtccagctggagtggaaaccgtcggcggcactggacgacgaaacgcgccaagccctgtccctggtccgcatgccctacggcgaacgcacttcggcgcaggacgcgaccctgcgccgcgtgttcaccgaacgcatcgaggcggaacgggacacgcattccagcggctacgcggaaatcctgtcccgtgccctggactaccggtcgtggcacgcgttcaccgtgcgcgtcgccgacaccggccctgacggcgggcaacgcgtccggcggctgcgccagctgtcgtccggcgaaacccggctcgtgtcctacgtgacgcttttcgccgcggcggctgccttctacgacgcggtgagcagcacgtcggaggacttcagccccctgcgcctggtgttgctggacgaggcgttcgaacgtctcgacgacccgacgatcgcccggatgctcggcctgctggtcgacctggacatggactgggtcatcacgtggccgagcggctggggagtttcggacaagatcccgcgcatgcacatctacgacgtcctccggccgcgcaacggccgtggggtggcgtgcacgcagacgacgtgggacggcacgggaatggatcgggtcgacccgtag

SEQ ID NO: 51346 - DNA, 1620 bp, Gordonia sp. QH-11
atgacgcacggcgtgggcgatgcaacggaaggcaccgacctccccctcgacgggtatgggcccttcgcatacctcagtgcgccgaacgcgccgctgtaccggcgcgtgatgcgtgcgctcatgagcgagaaggaacgcttcaccgtccacgtccgaccggatcaggtggctgccgccgtctccgccgacggcggcgaactggtctacgaagacacgatcggcgacgccctcgaacggctggcacgaccggaatggggcaacgtcctcgcgttcgcggactccagccgcgtcaccgcgctcgcggacttctaccgtcggcgcatgctgtaccagttgtcgcgcgaaggtgaggcggccgagcgcgcgctcgcacaatacgatgcggccctcggatcacgaggagccctccagtcggtggcgctggaagacatcgtcgtgctgttgacgtccctgcgggaaacggtcgccgataccgcctcgcgcgcggacgccgacccggcactgctgcatcagacgctgcgcggcctgcgagatcggttctcggagctggcggagaacgccgtcgccttcatgggctccatccagcggaccatcgacctgcacgatgccgacgtcgaagcgttcctggcgtacaaggagcaactgatcgagtacctcgagcggttcatcggcgacctgctgaccaagggggcggcgatcagcgaactgctcgcggccattccgccggacgccgtcgacttcctcgccgacacggcagccgcccgcgagacgatcgacgccgcaccgggcgacgccgacgccgcgtacgaggcggcacggtcggtctggctgcgacagtggtcgggcctgaccgactggttcgtcagcacccgcgagcgcgagagcgaatcacgtctcctgcgctcgcgcgcccgcgccgcgatcccggcgctgctctcggtggtccgagcgctgcacgagaaggcgggcggccgcaccgaccgcacccacgacttcctcaccctcgccacctggttcgcgacgctccccgcggacggcgatcggcatcgactgtggcgcagcgccttcggcctgacaccggtccgccacttgagcgtgaccacggcaaccgaagacgcgtgggccgacgccgaactgccgaccaacgtgccgtgggcagaggcgccaccggtggagatcagtccgcaactgcgtcgcaccggatcctacgagcggcgcggtaaggcatcgcgcgtcgccgaccggactgcggccaaggcgatgctggcggcgcagtcgcgcgccgagtccgagcagacggcacaggcgcggcgtcggatcctcaccgacgggccgcgcctgatgtcggagttcgggaccctcgacccgcaggcgtttcgcctgttcctcgggctgctcggcgacgcgctgtcggcgatcggtccgacgggcacgcacgcacaggtcaacacgtccgacggcgaactggtcatcacgctgacccgtatcgagggcgcgggccagatgacgatcagcacgcccgacggcgacctcgtcggcaccgatcatctcgtcgacatcgcccccgccgtcggctcactactcggtcggcaggcggcggaaccggcggcggcacgatga

SEQ ID NO: 51347 - DNA, 1263 bp, Gordonia sp. QH-11
atgacgcagcgcggcaccggcgtcgccgacgtgctcgaggccagggacgccgaggcgcgcatccgggtggtgcgtgcgctcctggcccgcccggtcctgtccgcgcaacgcgacggggaactgttccgtctggcccgacgtcacgccgacgccgtgcgcgcatggttcgcggcggagaccggctggcggttggtggtcgacggcgagacgattcgcctcttgacctcgtacgcgccggtcggcccgaccgccgcggcgatcgccgagcgccatccggcgcgcgcgaagaagggcgatccacccttcacccgccgccggtacgtcctgctctgcttgtcgctggccgttctggaacgctccgacctgcagacatcgctcggcaaactcgccggtgatctagtcctcgccgcgcggcaaccgggactggagagcatcgaattcaccctcggcacgcgcgcggagcggtccgatctcgtcgccgcgatccgggtgctcctcgaatacggtgtcctcgtccgtgtcgccggcgacgaggagtcgtacgtgtccgccgacggtgacgcgctgtacgacgtcgaccggcgcatgctctcgacgatgctctcgagcaggcattcaccgggcctgatcgcctcgtcgctcggggattcgccgaacatcgaccggatcgaggaagcactccacgagccgccgcctgcgtacaccgacgaagaatcgaatcgtctcctgcgccaagctgtttcccgtcgcctgctgtgcgacccggtcgtctactacgacgagttgcccgatgccgagcgcgcctacctcacggggcagcgggtgccgctgaccaaccgtctcgtcgcggccaccggactcgtcgcggaactgcgcgccgagggcgtggccctcgtggacccggacgaccagctcaccgacctgcgcatgccggagcaggggaccgacggccatgcgacgctgctgctcgccgagcatctggcgtccgccgggtcgtcgaccgtcggtgcgctgcaccgggtgatgcgcggcttcgccaccgaccactcgtcgtactggcgcaagtccacccgtgagccgggtgccgaggtgatcctcaccgacgaggcgctcgaccgcctggtcggcctcggtctggtgtccgtcaccggcgtcggcgcgggcgccgtcgtgcagtcgctgcccgctctccgacgcttcgcggtgagcgccccgaccatccgtgacagcagcaagcccacccgcgacaggaagtctcgatga

SEQ ID NO: 51348 - DNA, 4101 bp, Gordonia sp. QH-11
atgaccgaatccgtccgcagcacaccggttccggactccctcccgagcccgacgctctcgcgctggcagccgctcaggctcgggctcgtggacctgttctactacgacgacgagcagttctggttccacgacggccgactgctgttgcgcggcaacaacggcaccggcaagtcgaaggtgcttgcgctgacgctgccgttcctgctcgacgggtcgatcgtgtcgcggcgggtggagccggacgccgaccccaagaagaagatggactggaatctgctgctgggcggtgcgcacccgcagtcggaacgcaccggctacacgtgggccgagttcgggcggatcgacgacgacggtgtggagcacttcacgacgatcggcatcgggctcaaagcggcgtcgggtcgcggcatcgtcaaacagtggttcttcgtcacgtcccagcggatcggcgagcagttgctgctggtcgacgagcaccgcaccgtcctgactccggaccggctgcgcgacgcgctcgaaccgggttcgggcggtcaggtctacaccacgcaggagcagtatcgccgtgcggtcgacgaggcgatgttcggtctcggagccgaccggtacagcgcgctgatcgacctgttgatccaactgcgtcagccgcaactgtcgaagcggccggacgagaaggcgctgtcgtcggcgttgaccgaagccctcgcgccgccgagccaggcgctgatcgccgacgtcgccgaatcgttccggtcgttggacgaggagcgcgtcggcatcgcggccgcccgtcagacattgaccgcggcggagggtttcctgcggcactatcgcgggtactccgcggtggcatccaaacgagcgacaaccgatgtgcggctggctcattcggcgtacgagggagtgggccgcgaactgcacgaagcgcaggagcagcgcgcggccgcgctcgcttcggaggcgcggctggacgcggagaaggtacagacgcaggagcgtctgggcgctctgcgcggccaggagcaggcgctgcgggccagcccggagatgaaggacgccgacagcctcgatcgcgcggcacgctcggccgacgaggccaagggtcgcgccgaggccgcggccacccaggccgcccagtcccgcgagcgcgccgagcgcgatcaagccgcggcccaggagaccgccgaacgtcacgcccacacggccgaggcccaccagcggaacgcggccgctgcgctgactgcggccgccgcggcggggatggcgaccgagcatccgtcggtggtcgacgacgaacaggccgcgcgtcgcgccctggatcgacgccgcgaacagatccggcacgtgcgcggactgatccgcgacgccgaccgcgcgaccgccgcggccgcccagcagcgcagccgactcgactccgcggagtccgacctcgcgcggcgcgccgaggcgctccacagtgaggtcgcgggcgtcgagacggccgtcgaggcgtaccgtgacgcggtccgcgaaatggcgaccggactgagcctgatcagcctcgacgccgagccggacgaactcgtcggccacgcacaggtgtgggcggagagcctcgacggggagtccccggtgcgggccgaactcgaccgctcggcggcgcgcgccaccgagcggatccaccgggacctcgccgacgccgagagcgccgaacgcgagttgacgggccagcgcgacgacaccgtcgccgagatcgcacggctggaggcgggcgacgacctgacgccgtccgccgcacccggtcgcgccgacgatcgcggtgagcggcccggtgcgccgctgtggcgtgtcgccgatttcgcggctgacctcggcgacgacgcgcgcgccggcgtggaggcggcgctcacgtcggccggactgctcgacgcgtggatccaccccgacggttcggtggaggccgacggtgacgtcgtcctcggttcggtcggcaccgtcgtcgtgccgtcggcggggtcggcgctggtggcggcggtcgggccggacagcgaggtctccgcggcgaccgtcgacggtgtgctggatcggattggctggggtgccgactccggtgccgcgctgtggatcgacggcacgggtcggtggggcgccggccccgcccgcggccagtggcgaaagccgcgtgcggagttcgtgggcgcgggcgcccgcgaggcgtaccggcgcgagcagctggcggagctgaggcgtcggttggaccggatctccgacggtctcgccgccgcgaccgagcgtgtcgccgccgctgagcgggccggcgagcagatcctcgtcgaacgcggccggtatccgtcggccgccgagcacgacgtccggtccgcgcacggtcgggtggcggcggcgcagcgcgaggccgatgccgcgcaactgcggctggcggagatcagcgtcgagtgggaggccgccgtcgaacgggccgagtccgcagcgcaggtgctccacgagcaggcggcggagctgtcggtgccggcggtcgattccgacgtcgacgtgctcgacgtcgccatcgccgactacgacgtgcgcctggtgaccctgcggtcgtcggccacgatgctggcgctcgccgaggcggagttggcgcaggccggtcgtcgtgccgcggagaccgccgacctcagcgcacggcacacccgcgagcagcaggagatcggcgggcaggcgatcgcgttgcgcgccacctacgacgagctcttcgcgaccgtcggcgcgacggtcgccgaactgcaggaacgactggcgacactcgcgaccgagatggacgctgcgacgagcgaactcgatcggctcggcgtcgcccagttggcggcggccgccgagtcgggcactctcgcccagcgcgtcgtcgatctcacggcgcgccgcgaggagtcggcggccacgcgcgagggagcgatcgagcgactgcggctgttcatcgagaccggtctgctgcgcgtcgctctacccgacttcgactactccgacgatgtcgacgatccgagcgtgcgcgccgccgtcctgctgtcgcgggccgtggatcagcgactcgactccgttgcggcagaagacgatcagtgggctcgcgtgcagcaacgggtgtcgagtgcgtggaccgagctgacgtcgcagatggcggtgcacgggcacgtcacgtcgatggagcagcgcggcgagatcctggtcgcgcgggtgcggcacaaccacgaggacgtcgacgtggacgtcctcgcgcagcggttgagcctcgacatcgacgcgcgtgaacggctcctcagcgcgcgtgagcgggagattctggagaacagcctggtgaatgaggccgccgcgcatctgcatgaactgatctccaccgcggaggaacagatcgaccggatgaacgacgagctcgcgatgcgcaagacgtccaccgggatgcagttgcgggtgcggtggcgcgagcgtgccgacggtccggcgggtctcgccgccgcgcgagccatcctgaacaggtcggatgccacatggacgctcgacgatcggtctgcggtcggcgactttctgcaggcccagatcgccgaggtgcgtgacgccgacccggcgggcggatggcaggagcatctggcgcaggcgctcgactaccggcagtggcaccggttcgcgatcgaccgccgccagaacggggagtggcgctcggcgtcgggtcccgcctcgggtggtgagcgtgcgctcgtcgtctcgattccgctgttcgccgccgcgtccgcgcactacaactcggcgggcggcctcgcgccccgactgatcctgctcgacgaggcgttcgccggtgtcgacgacgattcgcgcgccaagtccctcggcctgctcgcgaccttcgatctggacgtcgtcatgaccagtgagcgcgaatggggttgctacccgcaggttcccgggctgtcgatcgcgcaactgtcgcgggtggagggagtcgacgccgtcggtgtgacgcgctggcggtgggacgggatctcccgcgagccgatgccggaggtcgacgccgccgcccgcgccgggcacccggtggcggtcgacgcggacgacgcgaccctgttcggctga

SEQ ID NO: 51349 - DNA, 1362 bp, Gordonia sp. QH-11
atggtgcgagaagaccgcggctccgtggagcggctgctgcgcgcgccggagctcgcgtggttcgtcgaccgcatccgcaaccgactgccgggagccgtcgccggagaacccctctcggggactgttcggctgcctcatccgacgccgcagcagcggacggcgatggccgatttgatcggtcgaccgcggcggtcgggcgtgacgctctcggtgaagttggacgacgtcgaaaccatgctgcgccgcggtccttggcccgccggactcgccgacctcgtcgtcagcgtgagcggtccggtggtcgatcgcagcgcgcagcggcgggccgacgacgctcgctgggccgccgtcgcacagcggatcgcacccgtcgtcgaacgctttccggcagtcgggccgtggtgggagtcctggtgtgcggcagggaagttgaagcgggtggcgcagtcggaggcgcggcgcatggggcgtgatgcggacgcggccgtcggcgccggtctggtcgaggccgtcgtggccgtattcgacgatctgcctgccgacggtgtgctgctcgcgatgctggcgcgacgcgtgctcggcgacgcccatgcgctcgatcaggcgcggccgctcggccggttgacgagcgccgtggtcgcggccgcgttcgagtccgcggcggacgcgtcgacccgcgaggtgtggggtgatgcgggcgtggtgatgtctgggttgtcgtcgacggcgttgtgtctcggtgtccgcggccgggcgggtgtggccgatcatgctgcggcgacatcggcggcgctggaagcgatgcgggctgcgcggagtccactggtcctgacactcgaccaggtgcggtccggcggcgtcgacccgctcggcgcacacgagagtgtgcacgtctgcgagaatccgagcgtcgtggacctggtgtcggagggctggcgtcgcggcggtggcgttgcgcgggcgggcgacgggcaggccggtgcggggcccgccgacgatgaagaagcctgggccgggagcccggtgctggtgtgtaccgaggggcagccgagcagtgcggtgatggaggtgctcgcgatcctcacgagcaggggtgcgcggtgccggtatcacggcgacttcgattgggccggcctgcggatcgcgcagttcgtggcgtcgaaggttccgtggtcgccgtggcggtacggtgtgcaggactaccttgaggcgatcgggccggatgcgccgtcgatcgggttgtcggacgaccgcgccgagtccgcgtgggatcccgccctttccgtcgcgatggccgagcacgggctcgcggtcgaggaggaggccgtcgccgcgctgctcgcagaggatctggtgaggtga

SEQ ID NO: 51350 - DNA, 1554 bp, Frankia sp. R43
gtggaggagcacgggggcagcggagcagaggacgaaaccgctgtgcaggacgcggcggccaggcgcgcgctgttcagctacctcaccgccgaggccgccgatgactacatggcggtgatgcggctcttcagcgagacgctgctcgcggacctgtccgcggccgaggtcgccacgcagctggtcgaacgcggccatgagctcgatgccgacgccgtcgagacccggtgccggcagttggtcatctggggcaacctggtgccgtccgtacgtgagacacgcgtgcgcacggtcgccgcgtaccaccgttcccgatcccgatatcaggtctcgaagctgggtggccggctccaccgcgaggccgaggagatcatgcgggccacggagggcgctcgggaggtcgcgcgggaactgctcgcgcgtgtctcggaaaccctgcggctgattcttctgcagctctcctaccgcgagcggccgatcgattccgagctgcttgccggccaggtcaccggtgtgttcaacgaccaccgcctgttccacgagtccgtcacggacttctacgcctacctgtccggcgtcctgacccgttatgacctcgctggtgaggaatacgcccagttcaagaacctcctgctcgactatgtcgacctgatcggcgccgacgtctcacggaacgcgccggagatcctcggccggctgaagacgctgctctccccgtccctcatcgacaccctgctcgagaacctgcccgagccaccggcgacgggcgatgcactgatcgtcgttgaacgtctgccagggcgtacccgagcggaatgggagcaactcgccgcgtggtacggggcgtcgagcgtccgttccggcccggaacagctgcgcgtcgcggcgcgccaggcgctcggccagctgatcgcgaacgcgaagcggatgctcgccgcatccgggaccggggtttcgcgtcgtgccgacctgctcaagctcgccggctggttccacggcgcggacagcgagaccgcgcacctccttttcgacgcggctttcggcgcgtatccggcgcgccacctgctgctcgggcccgaggagcaggacctgcgggctgggccgagcacgtcgtggtgggtggccgcgcccgttgacgtcccggtgtcgctgcgggagcgcggtgatcgcacggtgcggggccgggcgtcccgggtacccgacacgaaggagcagaccgatctgctgatgaatgcggcgcgggaacgtgcacaggcccgggaggcggcggccgccgagctgctcgcggccggctcgttgcaccgcagccggctcagccgagccgcccgggacctgctgctcgagctgctacccccggtgctcagcgccacggccggcggtgagacggaggccgaccaccacgcctcggatctggggctggcgttgcgcggcgtcccggcacccggccagctgacggtgatcaacggtgacgacggaacactgacggttgacggccttctgctgtcggtcgtcccgctcgccggcaccggccgggcgcgcacggcggcgagcgcatga

SEQ ID NO: 51351 - DNA, 1242 bp, Frankia sp. R43
atgaggcccacacccgagacgggcaccgcggccagctcggcccgggaacgagtcgaggcggcccgtgcgctgctggcacatccagtcctgaccgccgcgtcgcatcccgacgagttgtcgttcgtccgcctgcacgcccccgcgctgcgcggcatgttcaaggcgcagctgggctatgtgctcgtcgtcgaggcgtcgttcgcccgcctgttcaaggggccgcttgcacccggcgcaccctcccggcccgcgcggcgccgcgacaacagtccgttcgctccggtcacctacacccatctggctctgctctgcgccgcgctgctcgctcccggaaccggcgagatgatcctcatctccgcgctgatcgagcaggtgcgcgcggacgcggcgaccatcggcgtgcccatcggcgacacgctgccggagcgccgtgccctggtcaccgcggtcgagctgctggtccgctggggtgtgctgatcgaggccgacggcacggccatggcctggggcgaacggcagatcgaggaggccctgctccatgtcgcccgtaaccagctgccgcacctgctcgcccgctcgctgacgggtgttgtcaccccggacgagctgctcgcgcccgacccaccggcggctgagcagccgcggcgctcgctgcgccgccggctggtggaaagcccgctcgtccgccgtgaggatctcaccgacgccgagcgcgacgtgctctcccgcgaacgctccgagctgacccgggcgctggccgagaacttcggcctcaccctggaggtgcgcgcggagggcgcgctcgcctacgacgccaccggctcgctgacggacgagccctttcccggcacgggcacgatcaggcaggcggcgctgcttctggtcggcgcgttgctcgcggagcgggagccgcggcccggcgacaccgccgtgctgcgcgacgggcgcgcggtcgccggtctggcgattggctggcccgacgtggaggcgacgctcgcccggttgtcgtcccagtacggcaaggcatggagctcggccatgctcgacgacccccggaacctacgggagaagatcgcggcgacgctcgcggaggtcggcctggcgtcgatcctgcccggcgggctggtgatccatccagccgccgcccgctaccgaccccagccgaacaccgcgcggccgacccgagcggcccgccgcctcggtgacgggcaggcggcgtaccacccggaactggagctgtga

SEQ ID NO: 51352 - DNA, 4194 bp, Frankia sp. R43
atgcagcagaccctcgccctcaccgagggcaccgaggacaggttcggcccgacaccgatcaggcgtcatccctatcgctggcggctgtcccgcgccggtttcgtgaatgtgtggcactactacgacaacacgttcgacctctcgggtggccggctgatcctccgcggcacgaacggttcgggcaagtcccgggcgctcgagatgctgctgccgttcctcctcgacgcggaccggcgcaacatgggcaccgggacggcggtccgcatggaggacctgatgaccgccggtgccggggagcagacgaaccgcctcggctacatgtggctcgaactgcgtcgggacgtcgaggccgacgaggacccggccagcgggtacctgaccctgggagccctggtccggttctcggcgagcacgaaggaagccaaggtctggtacttcacgacggcactgcgggtggggcacgagctgtcgctgctcaccgcggaccgcaagccgcgcggccgcaaggaactgggccaggccgtcggcgaggaccggatcagcgacggacccgagccgcaccgcgaacgggtacgcgccgaggtcttcggtctggcgggcggcgatgccggcaaggaacgcttcaacgggctgatgaaactcctgcacaccctgcgttccccggacgtcggcaaccggatcgaggaaggcagactcccgcagatcgtctccgacgccctgccgccgctgtccgaggaggcactgacggacgccggccagcagctcgacggcctgaccagcacccgtgacgagcagaagcggctcgaagccgcccacgggcaggtcgtggggttcctcgacagctaccgcaggtacctggccggggtgctgacccggtcgctgaccggaaccaggcagcgtgcggcgaactgcctcgagaccgaggccgaggcggtgcggaagcgcgagatcgccaccggcctcgactccgagctcctcgagacgctggaacggcgtcagctcctggccgaccaggtctccgagctcgcggcggcgctggacgcgctcaaggagtcggaccgttatcgcggggcgaaggagctcaccgagctgagtgcgacggtcagctcgctcgccgagaccgcccgggccaagctggagctggcccagctgcgccgggagggcgaggtggagctggccggcgcggcgaacgccctgctcaccgacatgtcgagcgcggtcgacgagctttccgagcggatcgaccaggcccgcgaccagctgaccagggtgcggctcaccgcccatgagctgcccgcgtcgatcggtctggtccggacgcccccggagcgacggagcgacctggtccgcgtccgtcgggatgcaccgcccgtcccgacgctccggccggcggcggacgtgccgcgcctggtcccgccggatctgatcggcctgcgggccgcggcgggcagcttgcgggaggccgcggacctgcgggccgcgcgtgccaccagccgcgccgcggacgcccggcggctgtccgacgaccgggccggcgttcaacgggccgtggagaccgcggacgacgcggccgtcgaggcggagaccgcggcgagccgcgccgagcaggaggccgacgagcgcgaccgagaggctgtcggcctcgtcgagcgctggcgggcctggctgggggatcccggaacgggagatctcctgggcgacgtggactggtccgcccagccgaccctcggcccactgctgctggatcgactggtgctgtgcggcaccgaggcggatggcccggtcgacctctccgagctcgaccgggccgcggacgacgccgccgccggtgcccgcgaccggttggcgggcgaactgcatcggctcgacgccgacgacacggcggaccggcgtgcggtcgagctgctcgtcaccgagaggcggcagctcgaggcgtcccgcgacgatccgccgctcgagccgttctgggtcaccgcccctcgcggcgcggccctgtggcagtgcgtcgacttcgcacccggccagtccgcagacgagcaggccgggatcgaggcggcgatgctcgcctcgggcctgctgaccgccaccatcgacgcccgcggccagctgaccgccaccagcggccagctgctcgtctcgccgatcggcccccgggccgccgtctccgtggccgcaaagctggtgcccgacccggcgggaccgatcgatcccggggtgatcagcgcgctgctggggcggatcggtctggccgacccgtccgccgccatgtgggtcgcgcccgacggcagctgggcgaacggcccgctgcgaggccgccacgcggttccggccgcacggcacatcggcgccgccgcccgggaggcccaccgggtccagcgcctgcgtgagatcggcacggagctcgaggagctggccgcggcggcgcaggcgcgggcggaacagcgcgcccgcgtcgaggagcgcaagaaggcgatccggggccacctgcggtcggcaccgcggtcgaagccgctcagcgacgcccgggtccgggcggcctccgaggagcggcaggcgacccaggccgcgacgaaggccgccagactgcgggcggaggccgaccggcgggccatcgcgctggccgagagcgagaaggcacatcgcgccgcctgcgccgagttcggcctgcctgttgacgccgactcactggccgacctggcgcgtgccgcgaccgttgcggccggcacctgcgtcgcggtgatcggccaggtcgacgtcctcaccggtctggcggagcgacaccagcgggcggtgggcgccctggcggccgcggccgagccgcgggggtgggccgagggcgacgcggagctcgcctggaacgagtggcacgccggcgacacccggatcgaggcactccggcgggcgctgggggccgaccccgcgcgggtcctcgaggagctcaaggccatcgaggctggccaggtcgcggcgaagcgggaactcggcgccgcggaggcggccgtcggcgagctgcgaagcaccgccgcgaccgcggccgcgcaggccgacaacgccgatcagaaggtccgcgacgagcaggccgccctcgccgagcaggtggacgccgtgcgggcgcagctcgggcaacccggtgtcgtcgcctccgcgttcacggcgaagcccgccgaaccgttcaccgaccacaccgccggggccgtcgctgcggacgccgccgcgctgctggccggcctgcgcaggtcgcggatcgaggagaacgcgctgatccgtgcccaacaggtgttcgaccgggagatcgcagccagctacgaggtgatcgtcaccaggcacagcgaggtcctgctctacgaactggccgacgcggacggccgccggccgctcgtcgaggccgccgccgacctggcgcggaaatgcgaccagggccgggaggcactgaccgaacgcgaacagcgggtgttcaccgagttcatcctcggtgaggtcggggaggagctccgcggtcggctgtaccaggcggaggacctcatcaccgcgatgaaccgcagcctgcggtccatccagaccagccatggcatcggcgtccggctcacctggaagctcgccgcggacaacgacgccgccgtcagccggatcaggcagctcgtcatgactgccgcgtcgattcgcagccaggctcaggacgccgagctgctcgagctgctgcgcgagagggtcgccgcggaggcgctcgccgaaccgaacgccggatacgccctgttcctgcggaaggcgctggactaccgcacctggcacaccgtggaggtcatcatcaccgggccggagccgggccaggaacgccggatcagccggcgtgcgaagctctcccagggcgagacccggttcgtctcctacgtgacgctgttcgccgcggtcgacgcgtacctgtcgggcctcgacgacaccgccaccgcactgcggctcatcctgctcgacgacgccttcgccaaggtcgacgatccgacgatcgccgagctgctcggtctcctggtccgcctcgacgtcgacttcgcgatgaccggccacgcgctgtggggatgcgtgccgcaggtgcctgccctggacatctacgagatctgccgccaggacggcggcggcccggccgcgacggtgcacgtgcgctgggacggccgtaaccgccacttcctccactccgcatga

SEQ ID NO: 51353 - DNA, 1389 bp, Frankia sp. R43
atgacgtccccgccctcagcggcactgcccgcgcaggtgcagtcctatctcgaagcgcccgtgctgcggcccctgtgggtcgcggcacggtcccgactggagcgcaacggtctgcaggcgaccggaaccctcaaagtggacctggacgagaccgccgccgcgcagctgtccgggctgctgggcgtccgtgtcacggccgggccgaagcgtcccgtcggactcgccgaactcgacgccgcgctgcggcgttcgaaggcaggtcggggcctggtgtcggttctggagcacctcgacggccgccccctgcacgaccggaccgccgcgcggcgcgccaccgacgagcagtgggcacaggcctggcgagggctcgacgaggcgctggccaccgcgggcctcgccggggccccgtgggtctcgggctggatcgcggatctgaggcgcaccggcattctgacgcgcgccggagcggacaccgcgggccgcgccctggcctgcgccgccagcgccctcggactgctggcccgcacgtcggcgacgggcctcaggacaggcttcaggacgggcctggagacgggccccgagacgatgtcggccggaccgttcggcggtgacgaccctgtaggctggcagatcgcctccctcgcgaccgcgacgacaggtgacgctcatggcctggacgactcgcggctcacggcggcggccgttcttcgggccgcggcgatcgcctcaggccgcccggcgccgttgacctccgcacagcggcgcgagctgtggcacgccctcggcgtcgccaccgacggcgtgtccggcacggtcctggtctggtcgcttcggccacctggcgacgacgcctggtcggcgatgatgcgccagcgccgggacctcggcctcgtcacccacctcacgctgcatgaactcgggcgcgccggtgaggccgccctgggctcaccggagcagacggtgtcgatctgcgagaacccgcaggttctgcaggccgctgcccgggccggggcgccggctccgctgatctgcctctccggcagcccagcggaggtcgggacacggctggtacaggccctcgtccttggcggtgtcccggtgcgctaccacggggacttcgactggccagggatcgccatcgcggggcgcgtcctcgcgctgggagcggttccgtggaggctgtccgcgagcgactacctgggggcggcgggaggggtcgaagcctccgggggcgtcccgctcgcgggcagcccggccgcgactccgtgggatcccgacctggccacggcgatgggccgcacgggggtcgccgtccacgaggagtacctgctcgacatcctcatcgccgacctcatgcacgacacggaacgccgcagcggcggagtgtga

SEQ ID NO: 51354 - DNA, 1545 bp, Xanthomonas arboricola pv. pruni; identical to SEQ ID NO: 50718

SEQ ID NO: 51355 - DNA, 4128 bp, Xanthomonas arboricola pv. pruni; identical to SEQ ID NO: 50789

SEQ ID NO: 51356 - DNA, 1299 bp, Xanthomonas arboricola pv. pruni; identical to SEQ ID NO: 50790

SEQ ID NO: 51357 - DNA, 1476 bp, Caloranaerobacter sp. TR13
atggaaataaacgaaaagctgttaaaacaagtgacagaaacaaaatatttaacagttgaaaatgcttggagatatagagcaataatcagatatttttatttacaagcacaaaaaatgaaatattggatatataaagaagaagtatttgaagaattgaagaagcatgttgtatttaaggattatacaatagagcagtgcaggcaggacttagatgttttagttgagtggaaaaacttaaatgctgttcaagatacatcaaaagcttctacaatagaagaatttaaaaataaacaatttagatatcaaataacagactatacagttgaaatcgaaagaatgatattaaaacttgaaaacttgaaagttgaaggtgcttcattagagccttcgctactagaacgttttaaaaaagagttagaaaaatttaaagatatgaaagataaaggcataaaagaagttggaagttggtggatgtcgctaaacgaggattttaagagactaaatcagaattatcaagattatatcagacatttaaacagtgtcaaagcagaagagatgatgaagactcagcaatttttagttttcaaagataaatttattgaatatttaagagattttgtaaaaggattacagcaaaattcttatgcaatagaatctataattaaagatatagatgagattacagaaaaaatagtgcttgataaaattattgagtatagcaaatcaattcctagattagatacagaagtggcagaaaaggatattaaggagaatgttttaggtagatggacaagtatcacggaatggtttttagggaataattttcaagaaagtgaagcttcaaagttgtttgatattacaaatcaaataataagaaaaataacaagatatgcatttcagatagtagaaaataggaatacagctgcaaacagaaaagaagaatataaaaaactttgtaacattttcctacaagctaaagatatagatacagctcatatgatatcagcatatgcttttggaataccttatacaaaacatataagaatagatatgcatagagaaacagaaagcataaatagtggagtatatgatgaaaagccatacgaagttataataaaacctagggttagaacttacagagaaaagagagataggacgccgattaaagataatacagacaaaaagaagaaaatactaaaggaagctatagaaaagcgaaatcaagaaagaaaaataatggaaggatatataattaacgaccagatagatatatctaaacttcctaaaatagagccttatgttaggacaaccattttaaaatggatatctagggcaaacagttccccgaatggaaaggcaaaaacagaagacggacgaatatttaaaataataaaaccaaaaagtaatgaacggtgtattttaaattgtgaagatgggcagcttgaaatgccgtcttatattttaaagtttgaatag

SEQ ID NO: 51358 - DNA, 1158 bp, Caloranaerobacter sp. TR13
atggatgagttaagagaattattagatgaatattggatacttaaagataaagacaaagataaatattatagaattagagattctattccgaaattcagaaattttatatcggaaaaattaggttatcaaataataatgacttcagatttaataaagttagaaaaactccctgggaaagcagagccttggatgggaataagcacatttgataatagcctagagtatactttcttatgtttgctattaatgtttttagaagataaggaaaaagaagagcagtttttactttcacagcttacagaatttattcaaggagcttttccaggtgatgagaaaatagaatggacattatattcgcatagaagacatttgattaaagtattgaaatttgctatagatattggaattataaaagttaatgatgggaatgaagaaagattttataatgatgaattagcagaagtactatatgaaaatacaggaaattctaaatattttatgagaaacttttcaggcaacatactaaagtatagtacattagaagatttagaaaaagacgaatggttagatatggataccgatagaggacggataagaagaaatagagtatatagaaggataataatgtctcctgccgtatacagagatggagaagatgatcaagattatctgtatattaagaattatagaaatatgatacaatttgatttagaaaaatacctgaaaatggatttacatgttcataaaaatggtacatttttagtattagatgaagaaaagagatataagaattcatttcctgaaagtaaagcaattagtgatatagtcttgcaggtgaataaaattatagtggctaaggtgaaaaaaggagaactttcaaaaaatactgaggacattataatcatacttaaaactacatttgacgatcttattaaagaagcaaaacagagatatagcatgggatggagtaaggaatatagagagatgaagttagaaaagttatctaaagaggttataagctacatgaaggattttagtatgttaatggaagataatgatagcaatgagataattatattacctttagttggcaaaattgtcggggattatcctaaagattttaacaataaagagaaaggaaatgatttagttggataa

SEQ ID NO: 51359 - DNA, 4092 bp, Caloranaerobacter sp. TR13
ttggataataataggtggataataagcagagctggactaataaatttttggtactacgatgatgagaagtttgatttttctgatggaaagctcttattaagaggtgctaatggttcaggtaaatcagtaacaatgcagagttttataccacttttactagacggaaataaaagtccagatagattagatccatttggttcaagagctagaaaactagaaaattatgtattaggtgatgaagatttaggaaaagatgagaatataagttatatatacatggaatttaagaaagaaaagacagagaactacttaactataggtatggggttaaaggctaaaaagggaaagagcctagatttttggggatttgttattactgatggtagaagaatcggaaaagacttctttctatataagaagattgatcagaaggttccacttagcaaaaaagaactagaaaataggataggtgatggtggcgaagtaaaaactagacaaaaagattatatggctatggttaataaatatttgtttggttttgatgaactagaagattatgatgaacttataaaattacttattcagcttagaacacctaagctttcaaaagaatttaaacctacagtaatatatgaaatacttaataattctctacagccactttccgaagatgatttaagaccaatgtctgaagcaatagagaatatggataacataaaaaacaagttagaacaactagaactatctagtagagaggcaaagaagcttaagaaagtgtatgaaatatataacagctttgtgctgtttgaaaaggcaagggattatgtcaattcttatgatgaattgaaaggtctaataaaagaaaagagtaaactagaagagaaaaagaaccattatgaagaagaaattttaaatgctactgaaaatatcaaggaacttgagatacaacaaaataatttgaagttaaaggaagaagaattaagaaagcatgacagttttggactaaaagagaaaatagtttttttagaaagagaattgatcgatcttaagaaggaaagagacaaaaaagccgatgaacttgaaaggaagaaagatagagaaagagaactttatgtgaaaattaaaaaattagaagaagatgaagcatatagtattaataaaatacgtgaagatatcgaagagttagactcattagccgatgaaatgaaatttgatgaacagtattatatgaaacaagaattattaaaagatataagatgtgaatacaaatttaattatgtaaaagaccaggttaaagcttatagggataaagtaataaaaataaaaagagagttagaaaaggaaaaagttaagcgagaggcttatgaaaaagcttttgaagattttgagaagacaaaaggaaacaaaaaagaagtagaaaagagattagaaagtgcaaatttattgttttcagaaaccaaggaagagtttatagaacatatttataattgggagaaaaataatagtatttttaaaatagataataatgcattaagcaatatttctcaagctgttaatacctatggagataaaactagctttgatgacattttggctttagttagaaaagagtataatacagtcgaagatttattaaaagaagaaaaacaggatttaagtttaatcaagaataaatacattaaagaatacgaagaaaagtcaaaagaaataaaagaatgggaagaaaaaagagacccagagccaataagagaggaaaaagtactgttaaatagagaaaggttgagaaagaataaaataccattcattcctttttatatggctgtagattttagagaagagcttacagaagaagaaagaggaagattagaagaaacgctattagaaatggggatattggatgcactgataattccatctagatatagagataaggttcttgaaatggatgaagatatggccgataaatatatttttccatcgcccaagtatcttacttatgagttgtctagcaagctgcacattgaaaagattgatattgatgggattacaatagaagatgtagataatgctgtaaagagtattttaatggactatactgatgaaggcacatatataagagataatggagaatatggaataggaataataagaggaaaagttacaaataaatacagggcaaaatatattggctcaactgcaagaaagcgatttagaaaagaaacattagaacgattgacaatcgaaaaacaagaaattgagtgcaaaatcaaagaaatagataaaaaaatagagataataaatcataaacttaaaaatttagaagatgaattcaataattttccaaataaaaaagatttagaaactgcattgcaaactgtgagagaagagactttaaattttgaaaacatatcaaaggagttagataagaaacaggaaatattagacaatacttatcaggaattaaatataataaagcaaaatatacacaagcttacactaaatattaatctactagtaaatctagaggcatatgagaatgcagaagaatgtataagagaatatatagatttattaaacgaattagagagaaaacatttaaagcttttacaaacattgataacaagaagtaatattattgagagtaaagaagaaatagacatagatatagataatttaagatatgaccttaataacatagatagaaaaattaaagaaagtgaagacagattaaaaaactataaagaacagttagaattgacgaattataaagaaatagaaagagaaataaatgagtgtattgaacttttaagaaagataccaaatagaattaaagaacttacaggaataagagctagagccgaaactaaattagagcagactattcagaagttagatgagataaataaagatatagaacttcaaaagaagataaataacatttttgagaccggttttagagaagaatatttgctagggttagtttttacagatgatataggagatatttacaaattagcaaagagcgtttataacgaattgaaatattttgaagacaaaaataaaaatagagaagattatttaaacaatctgcataataagttctatgaaataagacagtatctaactgaatactcaccaaaaattgagattatctttaataaagaaatagatgacccagatgtttcagaaattgttttaagacaaaaaagatatgtggttaaggcaaagattagaggaaaatatatcggattttatcaattattagattatatacaagagggaattgatgaaaacaagagcttgcttagagaaagtgacagaaaaatttttgaagatatattaacaaaaagtataagcaaaaagataagagccaagatttatcatagtaagtcttgggttgaaaagatgaatagacttatggaaggtatgaatacttctagtggattatcttttaatcttaaatggaagagtaaagctaaagagactgaagaccaattagatacaagtagattagttgaactgttgatgaaagatgggaatttacttactgagggagagataaatgagctatctgctcattttaggtctaagattgaagaggctagaagaactgcttttgaaacgggaacaagacagacatttcatcaaataatgaaagaagttttagattatcgtaaatggtttgagtttagactgtactttaagaggacgaatgaaaaaagtagagagcttacaaataatgccttttataagtttagtggtggagaaaaagctatggctatgtatgtaccattattttcagcagtatatgctaaatatgagggggccagaaaagattgccctaggataatatcattagacgaagcatttgctggagtagatgagaacaacataagagatatgtttaaattattaagtgaattagaattgaattttataataaactcacagattctttggggagattacgatactgttaaatcgctgtctatatgcgaacttctaagacctaataatgcaaaagaagtagcagttcttagatataaatggaatgggaaagttagaactttaatagaaaatgtgggtgtgtaa

SEQ ID NO: 51360 - DNA, 1311 bp, Caloranaerobacter sp. TR13
atgagtaaattagcaatccaagcagcaaaatattttaaagagaataaaggatttgaaagagtttttttaaaaataaaagataaatacaggtcattagggaaaattggtggaacgataattttaaataatctaactaaagaagaaaaagatgctttatcaggttttttagggataggcttttatgataaaactgatgctagaataaagatagagaagtttcaaactgcattggacaattcaaggtttaaaggagtaaaactggaagatgtattagcagaatattttggcagtgctataataagtaaaaaagacgaaaaggaaaaatataaactagaaagagaaagatattttgaagaaatagttaaagaatttattgatactaaatcgtatacttggttaaaatatgtttttgaatctaaaggtaatgcatatagagtaattacgaaaagatacgatgaagataaacagtccttaaaagaagatttaataataactatgagaggtttaaatagcttaccgtttttaaaatctaaaataaaagaaagattggctatatttgcctcaagagttacaaagaatcctcatgcttttgatgaaaaaacagaagcaggaaaacttttaatgtatggtattagttatttattatgtagagattatcccaaaagtgcagaagaaagaaccgaatattattatgaagtaggtttaataaaagatgaaatatctaattttacggtatgcagcggactattggcttatagagatgatatgatttcagcaggttggaaagatttttatgaaacttctgaacctatgcatgtatcactatggaatttaagtaaattagagagaataattagtcctactggtaggatatttatatttgaaaatccaactgtttttagtgaagttctttatagaactttagaaattaagccaccacttatgtgcacctatggtcaagtaaaattagcctctttaattttattagatatgctagttaaagaaggggtcaaaatatactattcgggagattttgatccagaaggtatagtgattgcagataaattaaaaaagaggtatggagataatttaatcctctggcgatatgataaaaaagattattttaaatcaatatcgcgcgaaataattgatgatactagattaaagaagctaggtaatataaaaaatgaagatttaattcgattgagtgaggttgtaaaagaaaatagatacgctggatatcaggagttgatagttgaagatttgattagagatatagagattacgattagtgtaaatgtaactgaatag

SEQ ID NO: 51361 - DNA, 1536 bp, Blastochloris viridis
atgccagccgtcagcgattcagccgagctgttcaggcatgtgagcgccgaaaagtcggcgttctatcgctgcatcatggacgtgttcgctgcggccaaacgacaatatcgcctgcaactgcggcccgacgaagtcttggccgaagcccgatggccggacggacaaacgccgcgcatcgaggacgtcaacgccgcgctgagccagctttcggcctggggtaatctggaatcgcatcatgatacggcgcgggtttccagcctgaacgatttctaccgggcgcgcctgctctaccggctgtcgcagggcggcgaagccgtggaatcggcgctggcgctgttcgtgcaaaccctgcaacgccgcgccgagctgcaaaccgtggcgctcgaagacatcgccagccgattgcaggcgatgaaggcgctggccgacgagaccgaaccggacgccgcaaaaatccacgcgacactgcgggatctggtgcgggttttcgagagccttgccgacaacgcgcaagcgttcatggccggggtggcgcgcagcatcgaactgcagcaggccgaagaaaatgcggtggcgaactacaagcgacggctgatcgactatctggagcgcttcatcggcgatctggtgcgccgctccgacatgatcgccgggctcattctcgcattggagccgagcatcgacgcgatgttgcagcaggtggccgcgcgcgaggcccgcgatgccgcgccgggcgatgcccaggagcggatcgattcgcaaacccgatcctggaatgcctggcgcgaacgttggaaaggcctgcgcggctggttctttcgcaccggccatgagccgtcgcaggccgaattgttgcgggcgcgcgccaggtcggcgatcccgcaattgctcggcgcgatcgccgcgctgaacgagcgccgcagcggccgcagcgatcgctccgcggattttcgcatgctctcgctgtggttcgccggctgcgccgacgatggcgagacgcatcggctggcgcgcgccgccttcgcgctcaatccggcgcggcatttttcactcaatcccgacgccgacgctgagctgccggccagcacgcgctgggccgacgcgccggctttgcggattcacccgcggctgcgcgaatatggcgaagcggcgccgcgcggcccgttggcccgggtgcgcgaccgcgccgacgcgcgcgcccagctggcgcgcgaactcgccgaggaatcgcagcaggtcgaggcggcgcgccggcgccttgccaccggccatcccacccggctgtccgacctcggcgaactcgaccgtcacgccttcgggcttttcctcggactgctcggcgaagcgttgaccgaacaggccggaccggacgccaccgcggagcggcagaccggcgacgggctgttgcatatcagcctgacgccgctggcgccggacagtcgcgcccgcatcgacacgccgctcggcgtgttttccgggcgcgaccatctgatcaccatcacgccgacacgagacgccgatgaagcccagctctga

SEQ ID NO: 51362 - DNA, 1308 bp, Blastochloris viridis
atgaagcccagctctgaaaggtccagggacagtcgcagcatcggtcaacaacagcagcgtttccagcgcgaggagtttcgcagcgcggtgcgcgcgttgctgatgacaccgctgatgagtccggagcacgaggattttcccgccatccgccgccaggccgacgcgctacgcgactggttcgcgcgcgaaaccggctggccgctgcagatcgaacatgagggcgcccgcctttccaagcggccggccgacctcggcagcacgatgcgcggcctgcccggctacgatcgccgccgctatgtgctgctgtgtctcgcctgcgcggtgctggaacgcgccgacccgcagatcacgctgcggctgctgggcgagcggctgctgcaattggccgccgacccggcgctggcggcgtcggacttccgcttcacgctcggcgccccgcatgagcggcgcgaactggtggcggtctgccgcacgctgctggaactgggggtgctggcgcgcgtcgccggcgacgaagaggccttcgtgcaggccggcggcgatcaggccgacgcactttacgacgtgcagcgccgcgcgctcgccggcatgctggcggcggtgcgcgggccgtcgacctttcgaccggaagacgcgccggtcacgctcgaccagcggctgcatgcgctggtcgacgagcacgtggcggacagcgacgagggccggcgcaccgcgctgcgccaccacctcgcccgccggctgctcgacgatcccgtggtctatctcgacacgctggaccccgacgcccgcggctatttcgtcaatcagcgcggcaccatggcagcgcgcttgtgcgacgccgcgggcctggtggccgaacaacgcgccgaagggctggcgctggtcgacgaaaccggcgtgctgaccgacgtggcgatgcccgccgaaggcaccgacgcccacgccacgctgctggtcgcggaatatttggcccgcagttacagatcgcgcctggccgacgccaccactgcggcgccggcagcggcggcattcaccccggcgcacgacatcatcgccttcctgcgcgacgccaagaccaagttcggccgctactggcgcaaatcggcgcgcgagcccggcgccgaacgcgaactcgccgcgatcgcgatcgaacggctggaaaaactccacctcatcgtccgagatgccgacacggtacagccgctgccggcgctggcgcgcttcgcgctcggcgacgccgaaatccgcgacgcccgtgaaccgcgcgacggagccgtcgccgccaagcatcggttcggatcgccatga

SEQ ID NO: 51363 - DNA, 4179 bp, Blastochloris viridis
atgaacgaccgcccgacttcgtttcttgctgagaccgcaagacccgcgctgccgatcccgacgcggccgcgctggcagccgctgcggctcggcctggtggagctattccattacgacagcgaggagttctggtttcgcgacggccacctgctgctgcgcggcaacaacggcaccggcaaatccaaggtgctgtcgctgaccctgcccttcctgctcgacgcgcagctcaaatcgtcgcgggtcgagccggacggcgacagcagcaagaagatggcctggaacctgctgatgagcagctacgaccggcgcaccggctatgcctggatcgagttcggtcggctcgccgacgacggcacgccgcattatctcacgctcggcgccgggctttccgcggtcgcggcccgcccgcaggtcgacagctggtatttcgtgctcgacgatagcgacggcgcgccgcggctcaaccaggatctttggctgatcagcgagcagcgcaacgtgctgaccaaggagcggctgcgcgacgcgctgcagggccgcggccagctgttcgacaccgcctcgagctatcggcgcgccgtcgacgagcggctgtttcggctcggcgtccggcgctacgacgccttgatggatacgctgatccagttgcgccagccgcaattgtcgaagaaaccggacgagaccgcgctgtcgaatgcgctgaccgaagcgttgccgccactgccgaccgaactgctcggcgatgtcgccgaggcactcggccagttagaggaggatcgccgccaactcgaggaataccagacgctggcgaaagccatcgaccgtttcgagcagcgctaccggatctatgccggcacccagacccggcgccaggctcgggcgctgcgccaagcgcaaaccgaattcgacaatgccagccgggcgcgcggcgaggcgcaggagcggctggcgcaagcgctggccaccgaagcgctcgcgcagaacgcgcacgacgaggcggaccttgcgctcaagcgcgaccaggcgcggctggaaaccctgcgcagcggcccggggatggaggacgccaaccggctcgaaaccgcggcgcgcgacgccgcggcgcggcagcgcgcagcgcaggccggcgccacggcggccgacgaggcgacgcgccggctgacgcgtagtgtcggcgaaaccgaacaggcggcgcaacgcatgacgcgggccgaacgtcaggtcgccgaactgcgccgggacggcgccgctcatgccgcaaccgcgggcattgccgcggcccatggcggcaatccgctggcaagctgcgaggccgcggcactcgccgagttgacgccgtacgccttcgaggccgcgcgctccgagcttggcgctttggtcgccgaacgacgcgaccagatcgccgtgttgcggcagcgccaggcggaggtcgccgcggccgaaactctatatacgcaacaacaagcggcacgcgacgagcgacaggacgccgccgaagccgcggcgaaccgacgcgagcaggccgatgccgccgtggagcggcagggccaaaacctcgtccaggattgggagcgccacttcgccggcctgacgcaattgcgcatcgaccccgacgacggcctcgcggcgctgacggcgctcgccgactgggtggtcgccctgcagggcgacaatccggcgcggcaagaattgcaggccgcgcaacagcaggccagcgtgaattttgcgcagcgccgcgtcacgctcgacgcccagcgcgacagcttggaaaccgagcgcagcaccctcgatgacgaacatcgccggctgcaagccggcatcgatacggcgccgcagcagccagcgacacgcgatgccaatacccggattgcgcgcgcgggcgcgccgctttggcacttggtggatttccgcgacaccgtcaccgcgccgcagtgcgccggcctcgaagccgcgctcgaagccgccggcctgctcgacgcgtggatttcgcccgacggcgagctgcagaccggcgacggcggcatgccgttgcacgacacgcaaatcttgccgcgttcgccgtattcgcaatcgctcggcgattggctgcaggccgatgtgccggcggatggcacggtgccggccgccatcgtcgatggcattctgtctggcatcgcctgcgcggacaccgatccgatcgacagcgaagcctggatcgcccccgacggccgctttcgcctcggcgcgctggccggcgcctgggacaagccggcggcggtctatatcggctatgccgcccgcgccgcagcccgcatccggcggctgaccaagattgccgagcgcctgacactgatcgccgaagaactcgcggccttgcaggcgatggccgcgcagctcacgcgcgaccaggatcgggccgccgaggaatggcgcctggcgcccaccgacgaggcgttgcgccatgcccatctcgccgccgcagcctgcgcgcgcgaggcgcaagacgccctgcgacgactgggcgaggccaatgcgcggtgccgcgaggccgagcaggcgttgcagacggtgaggcagcggcttgccgcggatgccgccgacctgcgactgccggtgttgcccgccgacttgccggcgatcgaggcggcgctgaaccattatcacgacgcccagctccgcctcgggcaagccgctcacgaattgcgcctggcgctgcccgacctgcagcggcaacgcgaccgcgaaaacgaggcgcgcaaagacctcgcgaccaagcaagagcaactggcgacggcccgcatcgaggcggaagaggccgcgacccggctcgacgtgttgcgcgacaccgtcggcgcgatggtcgaggagttgcaacgccaattggccgaggccgtcgccgccgtcgaagcgggcgatgacgcattgaaattggcgcgcgaagccctgatcaactgcggcaaggccagcgcggtcgctggcgaaaaatccgcgactgcggagacggctttcgccgaacgcagcgacgcgcgcgccgaagcgatcgccaggttccagcattttgccgccaccgggctgctgtcagcggcgctaccgcaagcagaactacccgatatggccagcgcatggacgatcgatcccgcgctgacgctggcgcgccgggccgaacaggcgctgtccgaacgcaaggacgacgaggaaagctgggcgcgggtgcagcgggagatggccaccgacctcaccgaattgcagcgcgcgctcagcgcgctcggccaccaggcccaggccgaaaccaccgactggggactgaccgtccacatcgtctaccagaaccgacccgaaccgccggctcggctggcggtgcggctcgccgaggaaatcgcgcaacgcagcgaactgctcaccgccaacgaacgcgccgtgctggaaaaccatttgcaggccgagatcgcctccgaggtgcagcgcctgctgcaggccgccgaagcccagcgcgacgccatcaacaaggaactacacagccgcccgacctccaccggcgtgcgctatcggctgctgtggcagccgctgccggaagaagaaggcgccccggtcgggctcgacgccgcgcgcaagcggctgctgaacaccagcgcggatctctggtcggcggaagatcgccgcgtcgtcggcgcgatgttgcagcaacgcatcgctgccgagcgcgagcgcaccgatctgggcttcggcagggacggcagcggcagcctgatcgagcaactcgcccgcgcgctggattatcggcgctggcaccgtttccgcgtcgagcgctggcaggacgggcattggcgcaagctctccggcccggcctccagcggcgaacgcgcgctcggccttaccgtgccgctgttcgccgcggtcgccagcttctacggccagggcagctcggcgctggcgccgcggctgatgctgctcgacgaagccttcgccgggatcgacgattccgcccgcgcgcattgcatggggctgatccgggaattcgacctcgacttcgtcatcacaagcgaacgcgaatggggctgctacgccgaactgcccggcgtcgcgatctgccagttgcagcgccgcgaaggcatcgaggcggtgttcgtctcgcgctggaactgggacggccgcgccaagctccgcgacgacgatcccgaccgcaggttcgcgccgacatga

SEQ ID NO: 51364 - DNA, 1284 bp, Blastochloris viridis
atgagatccgcggccgatgcgcggctccagcgcctgctcggcggcgagcatctcgccgcgctacgcaagcggttgcgccggcgcttcgaacgccacgcgttcgacgccgccgtcgaaagcttccgcgtcgacaggctgaccgcgcaggagcacgccgcgctcgcagcattgctcggccgcccgcagcgctactccggctcgttgcagatcgaccttcgcgtgctcgatgccgcgttccaaaacgccggaatcgccgcttcgctgcgcgatgcgctggaacagctcgacggcccgatcacccacctcgccaacgcacgcctcgcgcgacaaacgctgtggtcggatgtggtcgctggctgcgatcaccccggcctcgttgaactgctccagacaccggccggcatcggactgatcaagcgtcttgcaagacagaatgctgcgacggctgtcgaactgtgtcgccgcgccgaggcggtgttgcaacggctgcctgcgcagggcctcacccgttcgcaattggccgccgacgtgctcggcgatgcccatgcgctcgacagcggccaagccaccgcggcgctggtgctcgcggttttgcgtcggcttgcgccgcaatcccgcgacggcgatgacgacgcgcaaattgacgccgcggcaaatggcagtttcgaacgcaacgccagcgtggagcgcgcccgcgagatctgggctagagccggcatcctggtcaatgagttggcgcggccggtgctgttcctgaacctgccgacccgcggcccgcagaacgatcaccggccaacgggcgagccgagctacgcatcattgcgatcgctgctgcgcgcgcggcccgcctgggacgtggccaaccgcaccgtctatgtctgcgaaaatcccaatctggttgcgatcgccgcggatcattggggttccgactgcgcgccgctggtctgtaccgagggcatgcccgcggccgcgcagcgatgcctgttgctccagctgagcgaagcgggcgcgcgacttcgctatcatggcgatttcgattggcccggattgcacatcggcaaccaactcatgcgtgagcacagggccgaaccgtggcgcttcagcgccgctgactacgccgccgcggccgcaaagatctcacgctttggacagccgctgcagggtaagccggtcacagcacattgggatggagcattgacgacggccatgcaacaatatcgggtcgcaatccccgaggaattcttggcagactcgctgttgcaagatctgatctgcaaatcctag

SEQ ID NO: 51365 - DNA, 1410 bp, Streptomyces venezuelae
gtgacgtcgtccgcctcgcgttcgagggggtgggcgggttgtggcctcgtcgctgtctgggggcgttgtcagtggcggcatttaccctcatttccacatgaatcacgcatacgtcaggagagggtgaacatgccacatctcgccacctttggtgatcccggcgctgacgactggatcgtcgacgagtgggccagaacgggccccgaggcacaggatccgacccgggcgctggggtacaccgtgagcagggtccgccaggagcacgcagccatcatgagcgtgctggaccaggccgtcgatcacctgactcctgcggagatcacgatggagctcgcagcccggggcgtcactcttcatccaggggtcgtagctcagcggctgaaggctctgcaggagacgttcctggcggtgtcggggcagccggacaacgagatcgaacgctggcaggagctgaacggtgcgcggtggcggtacaccgctacggcgtgcgggcggcaggtgcagcggctgtggaccgtgctgtcggcggaggggatggtgcagcgggaggttgcgctggacggactggcccggatccgtgaggcgctgacggccctgcaaggggaggatgtggcgccccaggaggtggcgaagtgggcggggcaggttttcgtggagcacgaccagctggatgcgtcgctggtggggcagacggacatgctggcccggctcgcggaccggttcgacctgggcgcggagggcacgggcgagctcaagcagctgatcgtggagtacgcgacccatgtggtggttcacctcgaccgggaggtggcggccgtacacgggctgctgatgaggctgcggccccggttcactcttctggcggcgggatgcggggcgcagtcccgggcaggggccttggtcgcgcgcggggtgctggctccttcacgcgggacgcagagcggggactgggagcagttgctgagctggttcgcgccggcgtcgggcagggcgtggcggttcgggcagcagctggtgcgggcgattccgatgatgcacgccaatctgcagcggcagcagagtgtggtggggccggggacgctgcgggccaaggcactgtccctggctgcggcgtgccgcgatggggagcgggggaggcggtgttccgggcgtcggtggcggaccggccgtgggcgaagctgcatacctgcgcggagggcgagggcagcgaggtcgtctcctggcatgaggggccgcgggtgcccgctctggcgatgctgcgcgccagtggtcagagcagtccgcgggggccggtcacgccgcggcgtgaacgtggggaggcggccagggaggtggcgcgcgagcgggagcgggtcgaagcggagaggagggcggcggcggccgaggtcctggccggggtgtttccgctga

SEQ ID NO: 51366 - DNA, 4185 bp, Streptomyces venezuelae
gtggccgagatcgagcggtggtggcggcgctggcatctgatcggcgccggtgtggacaacgtctggtactacacccgtgagtggctgccctgcccgtcggggcggtggctggcccgcggcccgaacggcaccggaaagacgaccctgctggagggcctgtgtcccttccttctcaaccccgttcacatgcacctgagttctgcctcggggcgggcgacgagtctggtgtcgctgatgaagggcggcagcagcgggaagcggcgcttcgggtgcatgtggctcagcttcgggccgcccggtgatccggccagcggggacgcggacgccggggagcagcactatgggctgcgtctggagtacgcggcgagcagcaacagcgtggagacggtgcccttcaggctgccggtggttcccggccacgacggccaggacctgtccatcatgaagcaggacgacttctgtgcgtgggtagcggcgcagggcggtgaggtcttcgcgtccaccgacgcctatgtcgccgatctcgcccagcggatcttcggctgcggcccgggcacgctcaagcggatcgcccggcggatcaagaaggtccgcaaccccgggctgctggccgggctttctcctgcagacgccgccgccgagctgcgcatggcgctgcctaccgtcagcgcggacaccgtgcggttgacccaggaggcgctcgccgctgccgaggcgacccgccggcgctacgagcgggacgcgaagaccgcgcaggtcctcgaggacctgtccgccgcatggtcctacgccgccgcccggaccggtacccaggctgtcgatgccgctctggcctgtgccggcgtgctggccaggaaccgggctgaagcgctgcaggctcacacggacgccgaggcgcgcgggttggaactggatgatctgcgggtgctgatccgggagagggctgccgcagaactccgggccggtcagcacgccggagcgctggcccgggatgccgcctccagcgatgtggcccacgcccacacgaaggtcgggcaggctcgaaaggggcacgagaaggactgcgaactcctcaccgcacacaccagggcggcctcgcggtgcgctggtgatgtgcaggatgcggcagatgcggtgacgggcctgatggagaaggtggcgctttcctgccggacggcgcaggtaccggtgccggtggccgtcactgccgcggtgagcgtacggcgcagcgagccgtcgccgctgcggatcggcgagcgggacttcgaccaggcccctggcgtggacgcggtcgtcgatgaggaggcggtcgggcaggcggcggagcagctggagcaggcgcgtgcccgtctcgagcggcgaggggaggcagccggcatgaccgtggtggcataccagagggtcgccaccgcgcaggaagagagcgtccaggcccggagcctggccgacgcagcggctgagacggcgcgggaggccgtcgctcgtcatcagcagaccctggaacatgcccaagcgtgcgtggcggatctggcagggggtgtgcaggcgtggacgcagacggtccgcgagcagttccgcaccccgctcatggacctcgggggcgtcgccgcgcagacccgcgagtggtgtgagggccaggagtgctcacaggtgatccacgacgccgggaaactggcgcggaaggtgaccaggtcggccgcacggagcggtgagagggcccggtcgcgtgccgatcaccacaccggccgggccgagcaggcacggcagtgggccgcggaggcggcacagcgggcacggcgcctggagtcgggagaactgctgccgctgccgggccccgcatggcacagggaagtcgatgagaagcgggcgttcgcctgtgctgtggagtgggcgttgccgcagacgggtgccagtgcggtgggtgatgtggccgaagcggtcatggccgccgccggcctgctgtcggccgaggtcaccgagcacggggccaacgggcacggccgctggctcgtgcacccccacggcccggcgctgcccgagggacagtctctggccgccgtcctgcgcgcgatgcccggacaccccctgcaggaagtgacgacccgcatcctgcaacggatcgcctacctgcccagcgccgtcgggcccgaagcggaccacgtgggggctgggctcgtcgtgggcgcggacggcaccttccgcaccggggtgacgaccgggcgcctgccggcgagcgccggacaggtgccccgtgcttctcacatcggcaccgctgttaggcgggcagccgctctgcgggccgccgccgcggcccaggccgattgcgaccgctggcagcagacggccctggggcacgcgcagacggcacaccggctgcaccggttcaccgacaccctgcaggaactcgccgccctgtttccccacgacaaggtggccgcggcggaccgggcggagaccacccgggccgaggcgtcacgcgccgcgcacacggccgccgtccacgcatccgagcaagaccgcgccgctcagcacaaggagagttcccaccgtgcggctctgggacagtggcgcgcctccgccgtggcgctggggctgcccgacaccatcgccgcggtcaagcaggaagccgaggacgccggggcacgcgccgcagccgtgagcacggcggccggcctggtagaggacgccagagacctcctgatgaaggtcacgcaggcggccgggcaagcagccgagtccggcgcgcaggctcagcaggccgcggcggcagcccaggcaagccatgctgccctccttgccgcccacgctgatctggaggcctgccggcagcgcagcgggatggacgaaatcgcgctggcccaagccgccgaggacgcctcggccgcccaccagacagcccaggagcagctggaggacgcccggtcccggatggaaggcgtatccggcagggcggcggatgccgcgcgtgccgcacaagaagccgaccggagcctggagcaggcggggcccgccgcacgcgaaagccttgcgcgcgtgatcggcctgctcgccttcgacgcactgcacgaactcctgggccgccccccgcaggacccgggcgacgaagacgccggtgcgtggctggccgacctcaacaagcggctggcggctgttcccgccgcgagcgtgccgttggaggagtgcgccatggctgtacggctgcacctggccggcgaggacgacgactggcagctcacccacggccaggcccccggcgaactgcccgtgcaccagctgacgctgaccgggtacaaggcgatgtcgccgcccaccgccgcccgagaggcaacggcccgcctccatgcagcccagagcgcctacaacgccgccgaagaccaggccctgcagaccttcgtcctcggccggatccccaccgccatcagcaacgcgtgggtcgacctccacgactgggtcgacgacatcaacggccagatgaagctcgcccgcgcctcctccggcctcctggtgcagctcagggtccgcctcgcccccgacctcacccccgcgcgcgcccgcatccaccacctcacctgcgagatcggcgacgccaaccgcacatccgaacagcagcacagcgtcggccaggaactgctagccgtgatgcgccacggcgaagagggcggcagcaccgatcgcgcgacacgcctggccgaggccatcgacatccgcaactgggtcaccgtggaatacgtcgtcgtccgcggcgacggcggggcggaggaagtctgggggaggcagaagaccacggtctccggcggggagagccggctggtcgtgctcgccccgatgctcgccgcgctggccgcggagtaccgcgacctgcccgcccacgccctgcggctgtgcgcgctagacgaagtccccggtgagatcgaccaggagggacgcgacggcatcgccgcctacaccgccagcctcgacctggacctgatgtgcaccagccaccactgggacggctcccccggtgcctgggacggcatcgacatccacgacctggccaagtcctccaccggcatcatcatcgccgaacccatgcacctctacacccaccagatgctcgccgccaccagccgcctccccgcccagaacgccggaccggaacccgaatcggccgggccggaagcggcccacgaggcgacccagtga

SEQ ID NO: 51367 - DNA, 1305 bp, Streptomyces venezuelae
gtgagcaccgcgggacccgactgcccccaaaagtggtgtaccggcggggcctgcgacggcgcccggctcgactccctgctcaccgaggaggcacgctggctgtgggagcagctcgccgccagggcggacaggagcggtgagccgtccatgacgggcggcaccgccgtgatcaccgcccccgccgccagcacgcagcgtgcagccgtcctcgggctgctcggatcccggcccctcgcgcccggagaacggcgcaggatccggctcgaggagctgacgctccgtctgcgccagcacggggaacgcctcaccccgggtgcggtcgccgcacacgcggccggccgcgctctcggctccacggccgccgaacgggcccgccagatcgcccgcaccaccgggctgcgcaaactgcgggcgcgcctggcgggcgccctgcccaagaatgcgcggctgaggccctcggaggaggcatggcaggagctgcaccgcaccggccgcgtcgcccgggtcctgcagcaccctcagcccgaacaactcctcaagaccgcggccgaggtactgcggctgctgcccccgcaaggacgcgtcgaccgccggttgctggccttcaaagcggcaggcgacccgcacggcctggacgcgggcaccgacctggccgggctcgtcctggcagaagccgcagccgccgggctcaccacctccggcatgccgccccgcacggcgtggggcgccctcggcgtcgacctcgaccgcctgggcggaggactgctcagcctcggcgtccaccccgacggctggcttgtgcccgcccggtttcccctccccctgccccctgccaccctcgccgacgtcagctggcccgccccaccccatgagggctcctgggtgttcgtgaccgagaacccctcggtcactacagcagcccttgagctggacccggccgtccccgtccggctgctgtgtaccgtcggcacgccctctgccatggaactcgacaccgtggcccgcctcgcggacagcggctggaacatcgccgttcgcgccgacttcgacgcctccggtatccagcacatgcgcgccgccctacgggccgtcccccgtgcacgtccatggcgcatgaacgccaacgactacgtccgaagcctgcaccccaccccgttccagcccactgccctggacaccgaacgcctccccgagacgggatgggaccccgcactccacaccgccatgcgcgcacagggccgacccgcctacgaagaagcccttctcgacgacctcctcaacgacatccgccgcggacacccttag

SEQ ID NO: 51368 - DNA, 1542 bp, Frankia sp. ACN1ag; identical to SEQ ID NO: 51033

SEQ ID NO: 51369 - DNA, 1149 bp, Frankia sp. ACN1ag; identical to SEQ ID NO: 51034

SEQ ID NO: 51370 - DNA, 4173 bp, Frankia sp. ACN1ag
ttggccccgggcccgactcaggcaccggtcgccgccgcgcggtggcggccgtcgcgggcgggaatcctcaacgtctaccagtacggcgatgagacgctgcacttcgcgggcgggcgcctgctgctgcggggggtcaacggttccggcaagtcgacagcgatgaacatgttgctgccgttcctgctggaggccgacactcgccggatcgatgctgccggggagcagaccggcgtcctgcgttcgtggatgctcgccgacaccgaggaaacgcagcgcaccggttacctgtggatcgagttcgcccggccggacgacgaggtccccggcggggtgcgctaccactgcttcggctgcggcatccgggcgaaccgcagcaccgaccgggtcacctcctggtggttctccaccccccgacgtgcccggatcgacttctccctcaccgccgaccggacccccctcaccatcgatgcgctgcgcgcggaactcggggcggaggccgtgttcgccagggccgcggactaccaggacgaggtgtcccggcggctgttcggtggcgcgaacccggccggctacctcgcgctgctccaccagatccgcaacccacgggtcggtgaccgcatcgacgccgacctgccgcaacgcctgcgggaggcgctcccgccggtgccccaggacgccatcgccgacgccgcccagccgctggaggacctcgaggaccaccggcgcaacgtcaccgcgctggagcagaccgaccgcgccctgggcagcctgctcgacacctaccggcactacggtcgccgggtgctgctcgccgcggcgacgcaggcggtgaccgtggtcagcgcggcccgctcggcggcccagcagcgggggcggctacgcaccgctgccgagacggcggtcgagaccgagcgccggctcggtgcccaggtcgacgcactggtgaaggagcagtccacgacgcaggcgcgcctgaccgggctgcgcaactccgccgcctaccgcgaccaccaggccctgctcgcccgcgagcagcacgtggcggacctgcgcacgcaggcgacgcggatggcggcgcagcgaacggacgcccagcgtcgcgtcggcgtggccgcgacgacggtgaccgcccggcgggcccgcgtcgatggcgatctggaccggatccgactcgggttggccgaggtcgctcggcgggctctgcccgcggccgtcccgctgcgcctgccggacccaccggtgctgcgggtcgagccccacgccggtggggtggagggaccgcggtcgggcgtcgacccgctggccgaactctccctgcggtccgccgcagacgcgctgcgtcgacgccgccaggacgtgcgcgaggtgagcgacctgctacggggcgcggaaagggccgacagcgcggccgcgacggcgaacggcgtcgccgagacggctggcgtcgacgccgaccgggcgcgcgagcacgcggcgaaggcccgtgacgaggccgcgacggccggagagcgccatcgcgccgccgtgctggactgggccgggcgcttcgccgagctgctgcgggcggtgccgccggccgagccggccggccccgcgggctggctgcccgtgccacccgcgcctgaccccggcggcgacgagctgcgggccgtcgcccgcgcccgcgtcgacgccgcggccgcccttgccgccgatgccacggaggcgctggccgcggccgtggcggcggcgggggtccgcgtcgaggcggccacgttcgaggccactgggctggccgcggagctggccgcggtgcgggccgccgccgagctaccgctgccgcggggtggttggcgcgccgcggaaccggcggacgccgccctgttcgcctcgctcgtcgactttgcccccggtctcgacggcgccgcccgggccggtctggaggcggcgtgcgaggcggtcgggctgctgacggcacgggtgctcgacgacggcagcgtgttggcggcgacgggcgagctgctcgtcgtcccgggacccgcggtggcgccgaacctcgccgccgcgctcgtcccggcgttgccggtcggggcggcggtcggcgcggacgccgtgcgccgcgtcctcgagcatgtcgggctgggcgccgcggccgggaccgcgctgtgggtggacgtcgacggcgccttcgccgcgggaccgctgcgcggccggcacgccaagaccggtgccgagcatgtcggcgcgggcgcgcgggccgcggcccggcagcgccggatcgccgagctcgccgcggcgctggacgtcgccgagcggcgccgcgacgtccagcgggagacgcacggcacgctgcggcggcacgccgaggcgctgcgcacccacgcccgcaccgtgccgtccaccgcgccggtcgacgacgcggcggcggccgccctcggcgccaccggtgacgcccggcgcgccgccggccgggccgccgaggcgcgcgaggctgcggtcagcgccgaacgcgcggccgagcagacctgggcacgggcccagaccggcgcggcggccgcccggctccccctcgacgacgacgcactgaccagcgccgcagccgcggtcaccgacgcccaggcggagctggaccggatgccggggcgagtggaggctgccaggcgttccctcgacgactgggcggcggccgtcgcggcctttgtcgcggagtccgacaccctgaccagggccgccgaggaggccgccgagacggggctggccgccgagacggccaccgaggagctggccgcggcccgcgcggcgctcggtgaggaaccgcgccgggttgccgagcagatcatccagctggaggccaggtgtggccggatcgacggtgagctggctgccgcccgccgcgcccacaccgaggcgttcggcctgtcggtgtcggcgcgggagagggcggacagcgccgcggacgccgcggaccgggccgagcgggcatgccgcgaccagcggacggagctgctcgccgtggccacggtcgacggcctgctcgcggcgtccgcccgggaacgtccgagcggcaccgagaaccacagcgacgccgaggaccacagcggaccggcagaccaggacgaacaggctgcacaggacgggcaggtgcgaccgccgtccacgccggacaccatcgaggggacgtcccggctggtctcctggctgcgcgaacgcgtgccggagccggagcgcgacgtcaacgaggacgcactgcaccgctcgctgcgcgccatccgggacggcctgggcgccggctgggacgccgagtcccgccgcggcgcggacggcgcgccgctggccgtggaggtgtccggcccctacggccgccgcgtgctgcccgacgccaccatccaggtcgcggccgacctgcgccgcgcccgcgggctgctcaccgcccagcaggatcaggcgctgcgcaacctgctgcacggccgggtcgcccaggaggtcgcccgcgcgctgttcgacgcgcgggagctgatcgaccggatgaacgcggtcctcacagcggtgacgaccagccagggcatcggcgtccggctcgactggcgaacccgcggcgatctcgacccggccaccgccaccgcgctgcggctgctggccaaggacccggacgcgcgcaccgccgaggaggacgccgccgtgcgcgccgcggtcgccggcctcgtcgacgaggcccgcgccgagcgtcccgaggcgtcctaccgagacgtcatcggcgtggtgctcgattaccggaactggtacgaactgcggatctacctgtgccggccggggcgcgccgacgagctgctcggccggcggacccggctgtcggagggagagaagaagctcgtcacctacctgccgatggcggcggcggcctccgcgtcggcggccgcccacgatccccacggcgtcggcgcgccgcgactgatcctgctcgacgatgccttcgcgaaggtgtcggaggacaaccacgctcggttgttcggcctgctggtgagcctggatctcgacttcgtcgtgacgagcgagcgattgttcggcacccacgcggacgtacccgaactgtcgatcatcgaggtgctgcgcgacccggacctgcgcacgatcgcgctggtccactaccactgggacggccgggcgcgcaccgagctggcggtcgcgtcccgatga

SEQ ID NO: 51371 - DNA, 1236 bp, Frankia sp. ACN1ag
ctggccgatccggcgctgcgcccgctgtggcagtccgtcgcggcggcgctggaccgcaacggcctggactggcgcggccggctcgcgctgcccgctctgccggccgagggacgccgccgcctcggggtcatggtggaacggcccgtgcccgcgggacgccgggcgctgccgctcaccgacgtggccgccgcggtcgaacggctgaccgggaccgggctcgtcgaggcgctcaccgcccttggctacgcgccgcgagggcgccacgaggcggcgctggtacggcgcgaggagtcccggcgacgccgggccgccctcgacatggcggtcgagacccatctcgcggccctcccgcggccggaccgggataccggttcggcgaccggctgggcgaccggctggcgggacgcggcctggtccgacgggttgttcgccggccgcgcgccggacgaggtcgcggccctggtccgcacggtggcggcggtgctcgcgcacaccggctcggggctgagccgtggggagatcgccgccagggaatgcggcgacgcccacgcgctggacagctccacccggctgaccgccctggtcactcgggccctggtggcccgggacggcccggcgggcgagcgggccgcctgggagcgcgccggcatcccgctcgacctcgtctccgcgccggtcctgacctgggcactgccgctactcggcgactcggccgcggccttggccgcccgcgcgatgaccgccgccgggctgcctgtgcacctgaccgtgctggcgctgcgcgcggcgccgatcgccgtcgtcgcgggcacgcccgtgctcgtggtcgagaacccacgcctggtcgaggccgcggcccgccgccggctgcccgcggcggtgctgtgcacgggcggcaacccggcgaccgccccgtcggaggcgatcgcgcggctgcgggcgagcggcgcacagctgcgctaccacggcgacttcgacgccgccggcctggcgatgacggcgcgggcccgggcggccggctgcacaccgttccacatgtcggccgccgactacaccgcggccctcgccgcggcccgcgccgaaaacgtcgacctcccccgcgactcggccccggccccacccaccccgtgggatcccgatctcgcgacggcgttcgacgacacccgggcgatcgtgcacgaggagcgggtgatggacgaggtactcaccgcccacggcggcacattcccgcggtga

SEQ ID NO: 51372 - DNA, 1491 bp, Geobacillus sp. Sah69
atggatgccacatggctcaaacccattgtcgaaaccaaatatttatcgaccgaaaacgcgcaccgctaccgtgcgattttgcgctatttctacattcagcacgagcggatgcgccaatatttgtttccagaagaagtgtacgcttttttaaagcagcacgaggagtttgccgattacacagaagatgacttgcagcaagacctcgaccagctcgtgaaatggaacaacttgatcgcccgtcaagagacgtcccacgtgcggacgattgaagagtttaagaaaaagcgattccgctaccaatgcagcccgtacacggtggagatcgagcggatgatccgcacgcttgagcagcttggggattcgttcggaggatcgcttgagaaaacgcggtttgaccgcttgtatgcttccctttcccgcatcgaggcgatcatcgcctccgggtttcaggaacagagagatgaaatgtaccaagtatgggaagagacgttcgattatttcaagaaaatcatccaaaattccgcagactatatggcctatttacatagcgaaaacgtggaagagcggatgacgtctgagtcgtttctcgtctataaagagcagtttacggcgtacttgcgcgattttatcgtcgccttgcaaaaaacgtcgatgcagattgaacaattgcttgaagatctgccggaagaaggggttcggcagttcatcgggcatgtcgtcgactatgagcggtcgatcccgcgctttgccgatgcgccgccgccgcgcgctgtgcagattgaagaaaaatgggagacgtggcgcagcttgtgtgaatggtttttaggccgcaacgggcgcgagagcgagctttcgtttttgcaataccagacaaatgaggcgattcgccgtctgacgcgcgtcgtgcagcggcttggcgagcggcatcatcattttcgcagccgcaaaggcgactacttgcatttggcgcgctggttttcccgccttgaatcgattgaagaggcgcactgcctgtcagcggtcgtattcggctgcttccatacgaaacatctcgtcgctgatgcggaggcgactgacaacatataccgcgacgtatgggacgagccgccagccgagtgggtgacgaagccgcgcgtccgccattacggggaaaagaaaaagccgcaggcgattgaagacaaagaacgggagaaagaagaagcgcgccttcgctatttggaagaaaaagagcgcgaggaagcggcgctcagacagcttgtgaccgatggaaaaatcgtgctggctgaccttcccgaggtgactccatatgtacgaaaaacgctgctcggttggatcgccaaggcgatggggcgcgaggggcaagcaatgaagacggaaaacgggtgggtggtcaaagtggtgaacaaagaggggacgatttgccttcgcgcagaagatggggaactcgtgatgccgaactacgaaattcatgtgctttcgggaggtgagtga

SEQ ID NO: 51373 - DNA, 1197 bp, Geobacillus sp. Sah69; identical to SEQ ID NO: 51178

SEQ ID NO: 51374 - DNA, 4122 bp, Geobacillus sp. Sah69
atggcgaatccatgggtgcttcatcgtgcggggctgattaatttttggtattacgacgagcagtattttcatttcgctgacggcaagctgctgttgcggggaagcaacggggcgggcaagtcggtgacgatgcaaagcttgatcccggtgcttttagacggcaagaagacgcccgatcgcctcgatccgttcggctcacgggcgcggcgcatggaagactacttgcttggggaaaaagacgtcgtcaatcgcgatgagcggacggggtatttgtttttggaatacaaacgaaaagcatccgaccaatacgtcacaacgggcatcggcctgcgggcaaagcggcaaaaaagcctcgacttttgggggtttgtcatgttcgacaaccgccgcatcggctatgaccttcagttgtataaacaagaaaaaacaggtgaaaaaatcccgctgacgaaacgcgagctcgccgcattgctcggtgcgggcgggacggtcgtcgagacgcaaaaagagtatatggagctcgtcaataagcatgtgtttcgctttgaatcgctcgaggcgtttcaagaattgatcgaactgctcattcaactgcgcagcccgaagctgtcgaaagactttaagccgacggtgatttatgagattttggaaagctcgctgcctccgttgaccgatgacgagctccgccatttatccgaaacgattgaaaacatggaccaagccaagcagcagcttgagcagctcgaacgcgacgaacgggcgttgaagcgcctttgcgatcaataccgcctgtacaacgaatatatgatcgccgaaaaggcggcagaatacgtaaaagcggtcaagcaggccgaacagctcgccgccgagcaacaacgccttcacgatgaagaagaaaagacgcgaaaggcgcttgatgagcttgaggagtccatcacccgcctcggccgcgaagaagacgtgctgcgagcgcgcgaaatcgacttggctggccatgaagtgttccagcaggcggaaaagtatgaacagctgaaagccgaacggcagcgcctagaggaacggcgggagcggcacgagcagacgattgcggaaaaagaacgacaggaacgtcagcaccgccgccgcctcgatgaagcggaagcgcggctggatgaccttgagcggaagcttgaagacgagctggagcagctgcgtatggatgccgacgaaggatccttttccttgcatgaaacgaacgaagacgattttcaccgccatcgccaaaagcaacaagagttttcgtttgccgcgtggaaacaggaagccgaccgccatatcgagcagctcgaggagttggcgcgtctttggcgcaggcatgacgaggtgaaacgacgctatgaagaagcgagcagcgaagcgggcgaaaggcggcgggaaatggacgaatggcgccaccagcaatggaaatgggaagagctgttcgaagaggagaaagagcggtttgaacaagccgtgcttgcctgggtcgagcagggaggaatcgacgtttccgaaacggacattcaggcgtttttgcaacaaatgggcgccctctatgaacagtattcgctcgatgatttgaagcgcccattcgtgcaagcgtattacgatgccgtcggcaagaaaaaggatgagaaatggcggctcgagcatgacatccgtatgttggaagaaaaacgggcagagcgcgaggccgaactgcgtcaatggcgggaacaacgcgaccccgagcctgaacgggatgaacaaaccactgccgcccggttggcgttggaggagaaaggcattccgtttgtcccgctttatgccgcggtcgaatttgtcgacgatgtgcctgacgatgtgcgcgagcgaatcgaatcggcgctttcacacgcggggctgcttgacgccctcattactgctcgcgagatcgacgtcgcctgcgaccgtgtgctcattccgaaaccggtccatatggcgcacacgcttgctgattatttgcgcccagatgccaatgcccctgtgtcaatggagcggattgacgaagtgctccgaagcatcgtcatcaccgatgccgaccaagaaggcggcatgacgatcgatgaaacggggcgctattcgctcggccttgtccacggccatgcaccgcggggatcgaaggcgatgttcattggccgtgcggcgcgcgaacggtggcggcttgagaacatcgcggcgctggaagccgagatcgccgctgtggggcaagagatcgaccgtctgcgcggggcgcatcaggcggtggaagcggccatccaagcgctcgccgactggttggcgtccttcccatcggaccgcgatgtgcgcaccgcgtttgacgaagcgcaagaagcgcgccgccaagccgaaagcaaagaacgggaatggaagcggcaagaagaaaaagccgctctcttggcgcgcgaatggaaacaaatcaaacaacagctccacgacgagtcggccgagctcgatttggcctttactttagacggctgtgaacaagcccagctcgccatgaaatcgtacgtccgccatgtgcacgaactcgaagtgctttaccgcgaaacgcgccataccgaggcgatgatcgcccaacagcgcgagcggctcgcggcgctggaaacggagatcgacgaagcgaaaggcgaacgaaatcggcttcgggatgaaaccgagcggctcgccttgcgaatcgcggagatggaacggacgctcgcgcaaatgggggcggatgacattcgcgccgaaatcgcccgcattcaagaacgattggcgtttttgcgccaagaaattccgcgccttgtcaacgaacgggcgcggacggaacagcggctcatgcgcttagtcgaagagcgggaaaaaggggcgcagcgggaagcgttcgcccgcgagctcgccgcgatgtgggaaaagtcgtttgcccgtgaagcggcgcttgggcttgtggatcttgatcgttcccgctccctcctagagcaggcgaaagaagcgaaacaacggtacgaagcagtgttaaaagagacgcgttcctcgcttctggcgcggctgaacaccgtctttttccaagagtcgtccaacttgaccgaataccgggcgtccttcgagccgctggaagaacaaacgaagcccgaatggaccgccgctgccccagacgatgagatggccatgaaagccgcggactggcgggagaaacaagaacggcacgtcatttacctcgactacaaaggcgagcgcgccacgccgtttgcggtgctggcggaagtggagcgcgacatcgtcttgcagcacgagtatatgaaagaacaagaccgcgagctgtatgaggacgtcatcttaaaatcagtcggccgcattttgcgcagccgcatccagcgcgccgaacggtgggtgaatgagatgaataaactgatgggcggcctcgacacatcatcagggcttgtgctgtccattcaatggaagccaaaaacggcggagacggaagcggagctcgatacgaaagaattggtgcgcctgttgcggcttgatccgcggctgcttagagaggaagatttacagcgagtgacgaaccatttccgctcgaaaatcgcccgcgcccgcgaattgcttgaagagcgcggccaaggcagcacgctccatcaaatcattaaagaagtgctcgactatcagaaatggttttccttcactttgtactatgaaaaaacaaacgagccgaaacgcgagctgacgaaccaccgcttttaccaattcagcggtggggaaaaggcgatggcgatgtacattccccttttcgccgcggcgtattcgcgctaccaagaagcgggcgatgatgccccgtacatcatttcgctcgacgaggcgttcgccggcgtcgatgaaaacaacatccgcaacctgttcggacttgtcgaacagctcggctttaactacatcatgaactcgcaggcgctttggggcgactacgacaccgtgcccgcgttgtccatttgcgaactcgtccgtccgcgcaatgcgtcgtttgtgaccgtcattcattaccgttggaacgggcgcgtcaaacagctcatggtcgatgacaaagaatgggagatgatcgaaacgtga

SEQ ID NO: 51375 - DNA, 1221 bp, Geobacillus sp. Sah69
gtgagcacggccaaggaggcggctgcctttttccgctctgaaccgggcttccgccgtctgtttatcgagatgaagcacaagtacgagtcgctcggccgcgtcggcggcgcggtgtctttagaggcgttcaccgatgaagagcgggaggcggtggccgcctttttcggcaaagacgtctcccgcgtctcccttatcgcgtttgaaaaacagctcggacagacgaggtttgcgggcgttgggcttgtcgagctgcttgaacagtacttcggcgccccgcttgtctcaaacaaagaacggcgccaggcggaggaagaggaacgggatcgtttttttgcgcgtctgaccgaggagcatcattgggttgagtcggtccgccctcagcgcttcgtccaaacggcgtacgaaaccgaccgccgcagcctggaggaggccatccgccttgtcagcgcggctttgggccgcctcccgctcccgtcatacatgcgcctcccgctctttgcccagcaagtggcgggcgacccgcatgcgttcgatttgtccacgctaccggggagattgttgctttcggcgttgcaagcgaccgtgcccggggattgggacatggcatctgtagagagcgtcaacgagttgctccagtccgtcggcttgctccgtgaggatatcctgaactttgtcacatgcgccaacattcttgctgaaaccaaggacggaccgcatcctgttttctccgctgcctgggaggcgaacacagcgctgaacatgccgcttagagatgtgctgtcgcttgtccgcgcccgccctgcccatggggggacggtgtacattgtcgaaaacgcgggcgtcttttcgacgctgcttgacacccgcgccccgcttgtcagcacgaacgggcaaatgaacgtggcgacgatgaagctgctcgatcttctcgcctcttcaggcgccaagctgtattactccggcgacttcgacccagaaggattggccatggcagagcggctgcaggagcggtatggacaggccgtcaccctttggcgcttttccgtcgaggattatagggccgccaaccctgtcgtcgacctcacccccgagcgcctcgccaagctcgcatccgtaacgtcgacgccgctgcagccgctgaaagaggagatggcggaaacgaaaaaagcggggtatcaagaggcaattatcgggaggctgacagaggatatcaacgggtag

SEQ ID NO: 51376 - DNA, 1560 bp, Pseudonocardia sp. EC080610-09
atggtccggttcccgcaggtgccgcgtgagctcttccgctttacccagggcgatcgtgccgagctctacacggcggtgctgcgcgtcttcggcgaggccaacgaccggctcgagacctccctcaaacccgatcagctaagagatcggctgcggggcgtcggctggttcgacgcgttggaggacatcgatctgacggccgcgctcggcagtttgcgtggctgggagctgctcgatgccacgcaggaccacgcgggggagtaccgcaccgcggaggaatacgagcaacgcaacgtctccttctccctcactcgacgaggggaggccgcgctcgccggaatcgacactgtgctcgcggtgctggcctcggccggtgcgctgcagaccgcggtgctggatgcgatcgcggcccggctcgcgatgctcggggagctactcgcggacccgactacgtcgaaccgaacggtattcgtggcactgaccgagcttgagaaccatctcgaggcgctgcgcggcaacacccggcagttcaacggcgagctgcagcgcctggtccgcggcgaggccgccgacgtcgaggtgttccgcgaggtcaaggcggcaacggtcgggtacctacaggagttcctggtgaacctggatcgccgggccgtcgcggtgtcggacgcggctcgccgggttgaggcactcggcgtcgacgagctgttcacccgggcgttggctggggcggatcttccaccgaccccggacgaggatcgcgcgggggtctggttggacggtcggcggactcggtgggccgggctgcgagcgtggttcctgcccgagcgcgggacacctgctcggatcgagcagctcaccactgtcgccagacgggcggtgatcgcccttctgcaggctttggaccgcatcacagagtcgcgtaaacgggtcagcagcgcgggcgaggactttcgggccctcgcccgctcgttcgctctcgcccccaccgaggacgactgccaccgcctgtggaatgtggcattcggcctcagctcgtcgcggcacgcgcaccttgcccaccccgatcccgagctggtggggccctcgacaccgtggaccgccgcgcccccggtgcacgtctcggcgttgctgcgttcctctggacgcacagaccgacacagccgccccggacgagtccgcgacgtcgcagccgtgcgcacagcacgggcgttgcaagcccgacgggaacgcgccgaggccgtccgagcatgggaggaactcgctgggaacgggcccggcccggtaccgctgtccggattcgcgcagctcgaccacactgtcttcctgcgcctgatcgacctgctcggacgcgcgttgtgcagtcaggtgggcaccgatggcctccgccgcgcggctacggccgacggtcggatggagctcgtgctacgcgacccgccccccggtcgtccgcccgccacgatcagtaccccgcggggcacgttcaccggtccggactacctcgtcgacatccgtcgtgccggggagcgggctccaagggcgaccgcacggaaggtggcacggtga

SEQ ID NO: 51377 - DNA, 1239 bp, Pseudonocardia sp. EC080610-09
gtgagccggctaccaaaccaactcgtccttgctgagaaggaggacgtggctcgcggtatcaggcttctcctggcagagcccctgcttaccgcgcacaaggacccggccggattcgacgtcgtccgccgccgccgcgacccgctcgcggcctatttcgagttctactgcggatggcgtctggtggtcgaggcacgcatgggttacgcacggttgaccaaagtccgggtgagcgcggacgcgagcaggcccgcccggcgtcgccgagcgggtgcggcccccttcgaccgccgccgctacatcctgctgtgcgttgccgcagcggagctgatcgggacaccagtcacgaccatcgggctgctcgccgagcggatcgtcctcgccctggcggtcgatcccgacctccccgcgtttgacaccagtaaccgggccgagcggatggctctggtcgacgccgtgcggatgctcgagtcttacggcacgctcaccgccgtcgacggtgcgaccgacagcttcgtcgaaactgccgcggccaaggtgctgtaccgagtcgatgccaccctgctgatgcggctactcgcagcaccgaccgggccgtcccggctcagcgcgccgccgaccgacccggcaggacagcgcgccgagctgctcgccgagcagcggtacgggccagcacctgatcccgccgagctggcggagggccccatcacggtgcagcgcaatctcgcgctgcgtcatcgggtgttccggcgcctgctcgacgatccggtcgtgcaccgggacgacctcactgaggccgagcgctcctacctggagtcgctgaccgggcgtcggctggtgcgcgacgccgccgagcaggcgggcatggtcctggaggaacgggcggaggggtggatgctggtcgacgtcgatgccatcgccaccgacgtccggttcccggacgacggtagccacgcacggatcgcggcgctggccctgctcgaccggctcaccacgtccggcccggcggttcccgagcagctcaccgtcgcgacaagagctctactcgcgcggttcccggcctgggcacaggcctaccaggacaccgacgggcaccagcggctgcgcgacgcagctctcacggtcctcgcgcagttcgggctcatccgctgcgacggcgtcaccgttcgggccactccctccgccgcgcggtacgcggtgatcgccatgaccgaggcacccacccacgaggagaccccgtga

SEQ ID NO: 51378 - DNA, 4098 bp, Pseudonocardia sp. EC080610-09
gtgagtgtcaccctgttgcaccccgaccacaccgccgcaccgacgcgctgggtgccccaccgcgccgggattgagaacgtctggcgctactacggcgaggtcttcgagttccacaacggacggctgctgcttcgcggtgccaacggcagcggcaagtcgaaggcactagagctcctgttgccgttcctgttcgacgccagcctgcgcgcccagcggctctcgaccttcgggacctcggagcggacgatgcactggaatctcatgggggagggcaccgacaacaagactcgggtcggctacgtctgggtcgagttcgccggctccgccggcacaggccccaacacgccccggcggtacttcacatgcggggcccggttgcaagccaccgtgcatcgcagcagcgccgatgccgacttcttcaccctcggccgcgcggtgtcccccggtgagttcaccacgaccgacggacggcctctgaccgtggcgggcctgcgcgagcggctcggccacgacggaacagtgcacgactccgccggggactaccgggcagagatccggtcagtgctcttcggcgggatcaccgagcaacgctacgactccctcgtgctggcgttgttacagctgcgcactccaaaactgtcccaacggctggatccctccctgctctcaacactgctgtcccgagctctgcccccgctgggtgagagcgagctcggggaactcgcggagggattccagcggctcgaccggcagcgcgaggaggtggagcggctcgacgacgaggccgcgactgcgcggtcgctggcgaccgcccagcagacatatgcgcgccgggtcatccgagccgccgccgcggaactgatcacggcgacatcggtgatggacggacacacccggaccgtccgggagaacgaggaagagctcgcggcagcacgtctcgcgcacggccgggcccactccgacggagctgcggcccggacgcaggtagaacgggtggcgatcgaggtcgaagagctgcaggcgcgatcggaataccaagagggcgccgcggctcttcgacggatcgcggacctgcagagacaactccggagcgccgaaaagcatcgcacagaggcggccgcgcgggccgccgccgccgagagccacgcccacgacgacgacgagtcggcccgctgcgccgcagaggaactcggctccgtgtcggcgcgcgccgcggagctcgacgaggcggccgcggaccgggcggctcgggccgggatgctctccgtgcacgcggagatgctcgccccggccggcgccgaccgccgccgggccgaggcgctgctcggcgccgcggtgactgggcggctcggtcagatcgatgaggtccgtaccgctctacgcgagcacgaacgcgtcatcgaccgccgcggtcacgtcgaaaacctcgtcgagcagtcccgcgagattctggagcaccgctcgcgggagcaggacgagagcgcggcgaaccatgaggccgcccggctcgagcgcgcgggtcggctcgcaaactgggcgcagcagtgcacggagctgaaggtcaatccggctgccgcccgggccgccgcggatgacgaaccggagctgacgcgcctggtcgaggtcgccgccgcggggatcgtgaccgagctggccgacaccgacgccgatctacgggtgcgggccgatgccgtggcgcgccgactgcaggaactcacagaggagaccgaacggatccgcgccgcccggcacgtcccgccgctcgttccagccacccgcaccgccgaccggtcgagggcagtcggtgccccattgtgggaactggtcgacttcgccgagcacctgcccgaggatcggcgggccgggctcgaggccgcgctgcaggcatccggtatgctcgacgcatgggtgggacccgacggtgccgcacgcatcgacggccacgacgtcctcgctgaccccgaggcgctcccaccggcaccgaagcggtcactgatcgacctcctgcgcccggaacccggcggtgtcgtggcggccgaccgggtcactgccctgctgtcagtggtggcggccggggaccagttacctgcatcccacccggcggcgatcgggaccgacgggacgtggcggctaggacccacgaccgggagctgggacaagccggaggcgcagcacatcggagccaccgcccggagccgttccagaaagaggcgactcgctgagctcgcgaccgagtcacgggcggccgaggccgagcgggagcaggtccgcgcagaccgcgcggtcgtctccgaccgtcggctcacactcgaccgcgaccgggccggactgcccgcccgggcggaactcgaccgggcccacgagcagtggcagcgcgccgtcgccgcgaccgaattggccgacgccgccgtcgccgatcacctggcgctgctaacccgtgtctccaccgaggcggcggcccggctgcggaagctggacgacacggccgccaggaccgggctgccgaccgacatcgcggacctgcaccaactcaccgccgcggtcgaggcgttccgcggtgcggccaccagctggctgtcgagtgtcgccgatctcgctgcggcgtcgcgccgggctgcggagacgggggccgcggcagagcgctcggcatgcacggcgcgggaccaacgggacgcggcggcagaggccgccgagcgggccgagggactcacccacgccgtgcgtaccgccgaggacgccgtcgatcagtcctaccgcgaaatcgtcgaccggctggcagatctgcggacagccggtgatgcggcgaagaagcgactcgacgccacacagaagcaagagcatgccgccgagctgacgaccgcgcgtcttgaggccgtcagcgcccgtgccgtagccgaacaggatgcggcgatcctccaccgcgacgacgcaggtgcctggatgcggcgggtcaccgcggctccgttcggatccgacgccgggctcgacgacgacgccgagatgaccggggacggggtgcgcgccaccctggagactgcccgcggagtcgccacacgttgggcggcgaccccgcacgagccacggctcgtcgtacaggccctcgaccggctccgcgacgagctctaccgcgcgcgagaggtgctcagtgcccgagcggacctgcagctcgtacccgtcgaggagcaccaccatctgctcactgcatcggtcgacggtgtccggaccggtgccgcaggactcgcggcggcgctgtcggacgaggcgttccgggcccacgaggacatcaccgagtccgagcgtgccctattcgagaccaccctcaccggggacacccgccgtcacctcgccgaccgtatccgacgggcggtggcgctggttgacgatatgaacgcccggctcgacgaagtgcgcactgcctccgacgtcgcggtccgactcgactggcaggtcgacccggagctcccggcctcggcccgggcggcgcgcgagttgttgttacgcaacccggccgccctaggtgacgacgaccgggccgcgctgcaccgcttcttccgcgatcgggtggacgccgcccgcgcccgcgatgactcgatcagctgggaacagcagctcgccgaggtgttcgactacactatgtggcaccgattcgtcgtccgactcgaccgcggtcgcggcgagggctggcaggtactgacaaagaagctgcacggtgcactatccggcggggagaaggcgatcgcgctgcacttgccactgttcgccgccgtcgcggcgcactacgagtcggtgccgaccgcgccccggatcatcctgctcgacgaggtgttcgtcggcgtcgacgagaccaaccgcgggcaagtattcgcgctactcgcctcgctggatctggacctgctcctcacttccgaccacgaatggtgtgcctaccgtgagctggacgggatcgcggtgcaccagctcgtcaccggcgacggagacgacgccgtgaccaccgcccgcttcgtctgggacggcgaggactggcgcggcgaggacgacgacgaggagcagacaggaaacgacgcgaacgacggggacggggacgaccgtgccggctga

SEQ ID NO: 51379 - DNA, 1242 bp, Pseudonocardia sp. EC080610-09
gtgccggctgagtccagtgtcccggcaccgctggaccggcccgagctggagccgctgtggcgcgagatccaccaccgactgggcacagggcggcccatcgcccggattcgggtcgatcagctcgacgacggtggccgcgccgcactcgccgacctactcggcacggtccggtacccgagcacccccatcgcattcgaccggctggagtcggccgtcgtccagatcgccttcctcgacgtccggaccgtggtggaacaactgatcggcccggtcgatgaccgggcagaccgccgcgccaaggactccgcagcccgtgcccggctgtggacgtggctcgaggggcacccactagtgggacagcgtccggcactggccgagtggatagccggtctgcgacgggccggcatcggcgacgtcgaacatgcccgcgctctgctcaccgatgccgtcacagtattggggcgacttcctgctgatggggtgccactgccgaccttcgctcaacaggccctcggccgcacccacgccctcgacaccggcactgcattgtcgtcgaccgtgctgcgcggcgtcgctgcactgcttggcgccgatcccgccacggacgctgagggacggcgtgagctctgggagcggatgggcgtcgacgccgacgagttgtcctcgaccgtgctggtcgctggcatgcgaccagccggatccggcctggcggcgatcctcctaggtgcctcggccgacgccggtgaggcgtgcgtgctaacactcgcccaggtccggagaaaccaggggatccgactcgatgggggcgcggtggtgcacgttgtggagaacccgtcgatcgtcgcgatggcggtggaccgcctcggagcccggtgccctccgctggtctgcaccaatggttggccgagcggcgccgcgatccggctcctacgcgcgctcgccgcgcgtcacgagatccgctaccacggcgatctcgacggcgacggtgtgcgcatcgccgcgcacgttgtaacggcgaccggggcccgactctggcggatgggggccgacgactacagcgcccacgtccccgaggtcggagcaccagtaggacgggtcggcgacgctccctgggattcggacctggcccccgccatgcgggcaagcggagtgtccctgtccgaggaacatatcgcggagctgcttctcgacgacctcaattcatccggggccaacaacggcaacgacgccggaatcagatga

SEQ ID NO: 51380 - DNA, 1560 bp, Pseudonocardia sp. EC080619-01; identical to SEQ ID NO: 51376

SEQ ID NO: 51381 - DNA, 1239 bp, Pseudonocardia sp. EC080619-01; identical to SEQ ID NO: 51377

SEQ ID NO: 51382 - DNA, 4098 bp, Pseudonocardia sp. EC080619-01; identical to SEQ ID NO: 51378

SEQ ID NO: 51383 - DNA, 1242 bp, Pseudonocardia sp. EC080619-01; identical to SEQ ID NO: 51379

SEQ ID NO: 51384 - DNA, 1542 bp, Frankia sp. CpI1-P
  modified_base (1398)..(1398): a, c, t, g, unknown or other
atgagcgacgccgggaccgccgggtcgagcagtaccacgggcgcgagccgaggcgaggtgcacgcctcggtgttcgcctacgtgaccgagagcccggactaccgggtgatcctcggaatcttcgcgggaaccttcttcgccgagctcaccccggacgacatcaccgcccggctcgccgaggcgggcgtgatcctcccgatcgagacggtcaccggtcggctggagaagctgcgcgagtggggcaacctcgacgtgtcggcgtcggtcggcacggtcggcaccgtcgccgactactaccggcgccgcaaccggtatctcatcacccggatcgggcaggaggtgcacgaactcgtcgagggcgtactcgcccaggtcgacgacgtccgcgacgtctccctcggccggctcgacgcgctcgccgccgcgctggacgcgttgctgcggcttgacctcgaacgtgccgacccggcggtgctcgccgaccacgtgcgggccgtcttcgacccgcaccgcgccttctccgccgagatcacccagttcttcgccgcgatcaaccagtggcagtcgcggttcgacctcgacgagaccgagttcgcgttcttctccgaggtgctcgtcggctatgtcggcgagcggctggaggcgctggaacgccgggcccggccaatcgccgcgctgctcgcggtgctggccccggacgtgggtgtgctggtggcccgggcccgggacggcctggccgcgcgggtcgccgaggcggggctgaccggggtgcgggttcgcgccgagcatggcagcagcgcggcggactgggagaacctcaccgcctggttcctcggacggccgggcactccgagccgggtcgcgaccctcggccacgatgcggtgaacgcggtgcgcaccctgacccagaatctcacccggctgtcccgctccggcgtcggcggcacctcccggcgggccgactacctgcgcctcgccgcctggttcgagcaggccggccgcgacagcccgcaggagtcgcaccggctcgcggcggccgccttcggcctgttcggcgcccggcacctcgccgcggcggccggcgacgagaccgatcccgtcccgtccgccacgtcgtggtggaacgcaccggtggcgcgggtgccggtcagcctgcgccagcgcggcgacaccaccaaccggggccgctccgggcagatcctcgaccgttcgcgggaacgggcgcacctgctggcccgacgccgggcggcgcaggagcgggaggccgcggcgcgccaggagctgctggccgccgccggccccgacggcgccctcggcgacggcaccccgctgtccgaggcggcgctggcccgcctgcaacgcctgctgggaccggccgtcgcggcgatggggccgagncggtcgaagggcgagtccgaggccgacgggttgcgctgcgtcgtcgaacgtcgaccggggcagccgaccacgctacgcaccccggtgggcaccctgacggtgcacgacctggccctgaccctgctcccgctgcgggaggcgtga

SEQ ID NO: 51385 - DNA, 1149 bp, Frankia sp. CpI1-P
  modified_base (80)..(80): a, c, t, g, unknown or other
  modified_base (1141)..(1141): a, c, t, g, unknown or other
atgacgcgcgacgatccgcagcggcccggcgagctgacggccgccgcacgggcgctgctcgcccggccctggcgcccggncgaggccgaccggtcgctgttcgtcctgatccgccggcatgccgacgtgctcgaccgctggttcacccagcggctgggctaccggctcgtcgtcggcgccgacacggcgcggctggtcaagtccggctacgttccgcccgaccggccgctgcgcacccacaccgaccatccgttcaccacccgccagtacgtcgtgctcgccctggtcctggccgcgacggcggcgggccccgaccggatcagcctgcgcgacctcgtgctgcaggtgcgatccgcggcggccgacgcggagatcaccctggacggtgccgcgggggaacggcgggccctcgtcaccgcgttgcggttcctcatcgagcacggcgtggtgcgtgagctggaccggtcggtcagcggctacgagacggacgagggtgcggacgccctgctggagatccgcaacgaccggttggcgatgctgcccgcgccggcgctggtgggggcacgatcggccgccgacctgctggaacgggccgggggcgaggggcgcggtcgggcggcgctgcgccggcggctggtggaggacccggtgttgtacgccgacgacgtggcgcccgaggactgggcggagctgcgccgccgcttcggcgaggaggcccgctactgcgaggagatgttcggtctgctcgtcgaggcccgggccgaaggggtcgccgccatcgatatcgacgggggatgcagcgacgtggtgttccccgcgggcgggacgacggcgcacgcggcgctgctgctcgtcgaggcgctcgtcgcccgccaccgcggcggcgccaccacggacgacgtcgacgacgagctcgacgatctgctcgaacgttacggccggtactggcgcaaggacgccgtggccgagccggcgcggctgcgcgacgaggccgtggcgctgctcgcctcgatggggctggtccggtgggagcccgacggccggttgtgcccccgtcccgccgccgcgcggttcgccgcgcgcgtcacggtcagcgaacctcgaagcgagccgccggcggacgagcccgagcaggcaatgntgctgtga

SEQ ID NO: 51386 - DNA, 4173 bp, Frankia sp. CpI1-P
  modified_base (4052)..(4052): a, c, t, g, unknown or other
ttggccccgggcccgactcaggcaccggtcgccgccgcgcggtggcggccgtcgcgggcgggaatcctcaacgtctaccagtacggcgatgagacgctgcacttcgcgggcgggcgcctgctgctgcggggggtcaacggttccggcaagtcgacagcgatgaacatgttgctgccgttcctgctggaggccgacactcgccggatcgatgctgccggggagcagaccggcgtcctgcgttcgtggatgctcgccgacaccgaggaaacgcagcgcaccggttacctgtggatcgagttcgcccggccggacgacgaggtccccggcggggtgcgctaccactgcttcggctgcggcatccgggcgaaccgcagcaccgaccgggtcacctcctggtggttctccaccccccgacgtgcccggatcgacttctccctcaccgccgaccggacccccctcaccatcgatgcgctgcgcgcggaactcggggcggaggccgtgttcgccagggccgcggactaccaggacgaggtgtcccggcggctgttcggtggcgcgaacccggccggctacctcgcgctgctccaccagatccgcaacccacgggtcggtgaccgcatcgacgccgacctgccgcaacgcctgcgggaggcgctcccgccggtgccccaggacgccatcgccgacgccgcccagccgctggaggacctcgaggaccaccggcgcaacgtcaccgcgctggagcagaccgaccgcgccctgggcagcctgctcgacacctaccggcactacggtcgccgggtgctgctcgccgcggcgacgcaggcggtgaccgtggtcagcgcggcccgctcggcggcccagcagcgggggcggctacgcaccgctgccgagacggcggtcgagaccgagcgccggctcggtgcccaggtcgacgcactggtgaaggagcagtccacgacgcaggcgcgcctgaccgggctgcgcaactccgccgcctaccgcgaccaccaggccctgctcgcccgcgagcagcacgtggcggacctgcgcacgcaggcgacgcggatggcggcgcagcgaacggacgcccagcgtcgcgtcggcgtggccgcgacgacggtgaccgcccggcgggcccgcgtcgatggcgatctggaccggatccgactcgggttggccgaggtcgctcggcgggctctgcccgcggccgtcccgctgcgcctgccggacccaccggtgctgcgggtcgagccccacgccggtggggtggagggaccgcggtcgggcgtcgacccgctggccgaactctccctgcggtccgccgcagacgcgctgcgtcgacgccgccaggacgtgcgcgaggtgagcgacctgctacggggcgcggaaagggccgacagcgcggccgcgacggcgaacggcgtcgccgagacggctggcgtcgacgccgaccgggcgcgcgagcacgcggcgaaggcccgtgacgaggccgcgacggccggagagcgccatcgcgccgccgtgctggactgggccgggcgcttcgccgagctgctgcgggcggtgccgccggccgagccggccggccccgcgggctggctgcccgtgccacccgcgcctgaccccggcggcgacgagctgcgggccgtcgcccgcgcccgcgtcgacgccgcggccgcccttgccgccgatgccacggaggcgctggccgcggccgtggcggcggcgggggtccgcgtcgaggcggccacgttcgaggccactgggctggccgcggagctggccgcggtgcgggccgccgccgagctaccgctgccgcggggtggttggcgcgccgcggaaccggcggacgccgccctgttcgcctcgctcgtcgactttgcccccggtctcgacgacgccgcccgggccggtctggaggcggcgtgcgaggcggtcgggctgctgacggcacgggtgctcgacgacggcagcgtgttggcggcgacgggcgagctgctcgtcgtcccgggacccgcggtggcgccgaacctcgccgccgcgctcgtcccggcgttgccggtcggggcggcggtcggcgcggacgccgtgcgccgcgtcctcgagcatgtcgggctgggcgccgcggccgggaccgcgctgtgggtggacgtcgacggcgccttcgccgcgggaccgctgcgcggccggcacgccaagaccggtgccgagcatgtcggcgcgggcgcgcgggccgcggcccggcagcgccggatcgccgagctcgccgcggcgctggacgtcgccgagcggcgccgcgacgtccagcgggagacgcacggcacgctgcggcggcacgccgaggcgctgcgcacccacgcccgcaccgtgccgtccaccgcgccggtcgacgacgcggcggcggccgccctcggcgccaccggtgacgcccggcgcgccgccggccgggccgccgaggcgcgcgaggctgcggtcagcgccgaacgcgcggccgagcagacctgggcacgggcccagaccggcgcggcggccgcccggctccccctcgacgacgacgcactgaccagcgccgcagccgcggtcaccgacgcccaggcggagctggaccggatgccggggcgagtggaggctgccaggcgttccctcgacgactgggcggcggccgtcgcggcctttgtcgcggagtccgacaccctgaccagggccgccgaggaggccgccgagacggggctggccgccgagacggccaccgaggagctggccgcggcccgcgcggcgctcggtgaggaaccgcgccgggttgccgagcagatcatccagctggaggccaggtgtggccggatcgacggtgagctggctgccgcccgccgcgcccacaccgaggcgttcggcctgtcggtgtcggcgcgggagagggcggacagcgccgcggacgccgcggaccgggccgagcgggcatgccgcgaccagcggacggagctgctcgccgtggccacggtcgacggcctgctcgcggcgtccgcccgggaacgtccgagcggcaccgagaaccacagcgacgccgaggaccacagcggaccggcagaccaggacgaacaggctgcacaggacgggcaggtgcgaccgccgtccacgccggacaccatcgaggggacgtcccggctggtctcctggctgcgcgaacgcgtgccggagccggagcgcgacgtcaacgaggacgcactgcaccgctcgctgcgcgccatccgggacggcctgggcgccggctgggacgccgagtcccgccgcggcgcggacggcgcgccgctggccgtggaggtgtccggcccctacggccgccgcgtgctgcccgacgccaccatccaggtcgcggccgacctgcgccgcgcccgcgggctgctcaccgcccagcaggatcaggcgctgcgcaacctgctgcacggccgggtcgcccaggaggtcgcccgcgcgctgttcgacgcgcgggagctgatcgaccggatgaacgcggtcctcacagcggtgacgaccagccagggcatcggcgtccggctcgactggcgaacccgcggcgatctcgacccggccaccgccaccgcgctgcggctgctggccaaggacccggacgcgcgcaccgccgaggaggacgccgccgtgcgcgccgcggtcgccggcctcgtcgacgaggcccgcgccgagcgtcccgaggcgtcctaccgagacgtcatcggcgtggtgctcgattaccggaactggtacgaactgcggatctacctgtgccggccggggcgcgccgacgagctgctcggccggcggacccggctgtcggagggagagaagaagctcgtcacctacctgccgatggcggcggcggcctccgcgtcggcggccgcccacgatccccacggcgtcggcgcgccgcgactgatcctgctcgacgatgccttcgcgaaggtgtcggaggacaaccacgctcggttgttcggcctgctggtgagcctggatctcgacttcgtcgtgacgagcgagcgattgttcggcacccacgnggacgtacccgaactgtcgatcatcgaggtgctgcgcgacccggacctgcgcacgatcgcgctggtccactaccactgggacggccgggcgcgcaccgagctggcggtcgcgtcccgatga

SEQ ID NO: 51387 - DNA, 1302 bp, Frankia sp. CpI1-P
  modified_base (21)..(21): a, c, t, g, unknown or other
gtgaggccaccgacggttccnggcaatgccgagaccggcgcccagacctccgacgcgcacccgttcctggccgatccggcgctgcgcccgctgtggcagtccgtcgcggcggcgctggaccgcaacggcctggactggcgcggccggctcgcgctgcccgctctgccggccgagggacgccgccgcctcggggtcatggtggaacggcccgtgcccgcgggacgccgggcgctgccgctcaccgacgtggccgccgcggtcgaacggctgaccgggaccgggctcgtcgaggcgctcaccgcccttggctacgcgccgcgagggcgccacgaggcggcgctggtacggcgcgaggagtcccggcgacgccgggccgccctcgacatggcggtcgagacccatctcgcggccctcccgcggccggaccgggataccggttcggcgaccggctgggcgaccggctggcgggacgcggcctggtccgacgggttgttcgccggccgcgcgccggacgaggtcgcggccctggtccgcacggtggcggcggtgctcgcgcacaccggctcggggctgagccgtggggagatcgccgccagggaatgcggcgacgcccacgcgctggacagctccacccggctgaccgccctggtcactcgggccctggtggcccgggacggcccggcgggcgagcgggccgcctgggagcgcgccggcatcccgctcgacctcgtctccgcgccggtcctgacctgggcactgccgctactcggcgactcggccgcggccttggccgcccgcgcgatgaccgccgccgggctgcctgtgcacctgaccgtgctggcgctgcgcgcggcgccgatcgccgtcgtcgcgggcacgcccgtgctcgtggtcgagaacccacgcctggtcgaggccgcggcccgccgccggctgcccgcggcggtgctgtgcacgggcggcaacccggcgaccgccccgtcggaggcgatcgcgcggctgcgggcgagcggcgcacagctgcgctaccacggcgacttcgacgccgccggcctggcgatgacggcgcgggcccgggcggccggctgcacaccgttccacatgtcggccgccgactacaccgcggccctcgccgcggcccgcgccgaaaacgtcgacctcccccgcgactcggccccggccccacccaccccgtgggatcccgatctcgcgacggcgttcgacgacacccgggcgatcgtgcacgaggagcgggtgatggacgaggtactcaccgcccacggcggcacattcccgcggtga

SEQ ID NO: 51388 - DNA, 1542 bp, Leifsonia sp. Leaf264
atggcccgaaacgaccccgccgatggacccaccgcacccccgcgtgctgagctgtccaccgacgcccggcaagcccgccggcagctgttcgcgtacctgacggcggagcacgccgacgtgtacggcgccatcatgcgggccctcggcggcgacgtcctcgcccgcgagatgtctgcaacagagatcaccgatgcgctgcgggctgactacgacgtcgacgaggcattcgttgacgtgcgactggttcagctggtcgaatggggaaacgtcatccccggcgttcggaaccctcgcgtgtccaccatctcggagatcctccggtcccgaggccggtaccaggtctccaagctcggggcgagagtcgcccgcgactccgacgagatcctcgccgccgcagacggggcccgcgaagtggcccgcgaactcctcggtgtcatctcggaccagctcgcagccctcctcgaatccttccgcgacggccgcgacccagacaccggagagattgccgcagcggtcacctcggtgttcaacaaccaccgggtcttccacagctccctacgcgacttctacgggtatctcaacaccgtcatcacccggttcgacctcgtcggcgacgactacatggacctgaagacgatcctcatggggtacgtcgacctgatcggtgcggacgtccgacggaactggccggccatccaccgcaccctcgccgagctcgaaccgcacttcgacctcatcatcgacaagctcaacgcctggcagaccctcaccgacgagaacatcgaacgggccgctggccgcagccgggtcgagtgggaggaactcagccgctggtacaacggcgaggaagagacgtccggcccggcctcactccggaacgccaccgaccaggctctgaaccagttgatcgtgaacgccagacggatcatctccaacgctggatctggtgtgtcccgccgcggcgacctcctccgtctcgccgtgcagttcgacagcgccgaaccggaagatgcgcacaccctgttcgcggactcgttcggcttgtacagctggaggcacctgctgtacggagagacccagacggtccagccgatcgcctccacctcctggctgaacgctcctccggtcgacatcgccgtcagcctccgagaacgcggagatcggagcgcgcgcggccggaccagccccatccccgacaccgacatgtatgaccagctcaccatgaaggaggctgaggagaaggaaagccgacggcgcatggccgcggccgagctgatcgccgctggaaccctcgacaacgtgaagctgtcagcggccgcagaagcgatgttcctacacgctctcacccagatggcgatcgggaccgcaggtgaggaaacattcgacttcctcgaaaccgggatcagcgtccaccgcggagcagtcgacggagtgacgaccatccttctcgacggagggtccctcaccatcgaagggttcctgttcaccgtcacggcatacaggatgggcgccgcactgacggaacaggcggtgaacgcatga

SEQ ID NO: 51389 - DNA, 1170 bp, Leifsonia sp. Leaf264
atgatcgaggaagcaatcgaaccggacctcgtcgccgcggcgaggtccttggaaagcacccagtttctggacagcgccaccgacaaggacatgttcgcgttggtgcgccggcacggggtcgagctgaagtccaggttctcgcacaacctcggctaccgcctcatcatcgagcctgggttcgcgcgtctgctgaaagccgagcagcctgatggcactccggcgaggacgccgctgcggacaggtaagggcgtcccggtgaccagcgcccgcgtgtaccgcgacatcagcctcatcgcagcctccctccaggcacccggagtcggggagcagatcctcatctcccagctgctcacccagatccgcgccgacgctgccgaagcgggcatcgtgctcaccgagacgatcaccgaccgccgcgacttcgtcaccgccatcaccatcctcatcagctgggggctcatcacggagacggacggttcagtcgccgactggtccgccgcccagcacgaagtgctcctgaccgtggaccgcaaccggttcccctatctgctcgccaatctgtccaaggaccacggcggccgccgggtcagcgccctccagtcgctcaccaggaaactgaccgagaacccggtcgttgtccgagcagacctccccgaggatgagcaggtcaccctccgccaagaccgcgccaagctggaggcggcgctggcgatgttcggtctgaacctggagctccgacgcgaaggcgcgctcgcctgggatgacaaaggcgacatcaccgacgacccgttccccggcgaaggtgcgcttcgccaagcagcactgctgttcatcaacagggccaccgcagacaggcaagcgtccgaagacgggtgggtgacgctgaccgccggcgcagccacctccgtcgtgcagagcctgctcgacgagaacaagggtttgtggcggaaggagttcgagccggacgcacccgacgccgcaagccgcgtcctgcgtgacgttctgacctacctgaccggcttcgggctgatcaaggaaggtgacggctacatcacgattcacccggccaccgcacggtacaagcccacgatcaaacgcgagccgaccagcacacctccgagcccggaacccgagcagacagcactcttcgacgacctaggagaacaatga

SEQ ID NO: 51390 - DNA, 4086 bp, Leifsonia sp. Leaf264
atgagcatcgccaccgtcaccaggatcgcacccgccacgacaaccgagttcgacgatcgggccagatggtgccgcgccggcatcgtcaacgtgcaccgctacgcgaacatcaccttccacttctccaacggccgcctctgcctgctcggaaccaacggctccgggaagtcccgcggcatggacatgctgttcccgttcgtcatctccggcgatcgccgccgcatggggtcgggaaccagtggcctcgtgtctgtggaatccctcatgaagaagatgatcgggtccgtcaccaaccgggtcgggtacgtgtgggctgaatgcatgctgccggacggcagctacctcaccgtcggtgcgtacctgaagtactccactgccacccgaacctcgaaggtggagtacttcatcaccgacctgcgagtcggcatcgacctcatcctggtcgacgacgagaagatgccgttgccgaaggaccagctgaccgagcagatcggctcccaccgggtcaccagctccgccagcacccaccgggaacgggtcgcacgtgagctctacggcatcaccgacgaccgcggcatggagcggttccgcgcctacctcgacctgatgtacaagctccgcgcccccgacatcggagtccgcatcaacggcggtgagctcacccagctcctctccgaaaccctccctcccctctccgacgaagtcctcgcccaggctggcggtcatctcgacggactccaggatatccgggccgaacagtcacgactggagcggcagacggaacaggttgatgctgccctgaaggtgtacgccgggtatgccgtcggggtactcagcaacgccgcgaaagatgccgaagccgctgccgttgaggaccgcggtgcccgcatccggcaggctgacgcccaggcgtccctggacgaggcccgggacgaactggcgaaggcgcagagcgaagagtccaccgctaggcaggcagctgcgaccgcccagtctcggctgacggccatcgtgagctcctcggcttacaaggaccatctcgccctcaacgagaagtcagccaccgtggctgcgatcgcgatgaccgcgaacaccagcctgggctcctgggccaccgcccgggcggccgctgaccgctacacggggacggtgaccgaggcggccgaaagcgtcgagcttcgcggccgtaaggcctccgccgccgtctccagtctcagggcagccgcggccggcgcgggcatcgccaccgacgtacccgatgtgcaggtggtgttgacctcgtcatccgggaaggtcaggactgtgcgtctgacggtcacagaatcggaggtggatgaagctgcgcccgacatgacggtcgtgacggtcgacgatgtaaccgcagcctccaccaaggccaccaacctccgggaagccgccgccacgaaacgggatgcggctgccgcaaggcatgcggcagcggagctgctgcacgaagacggccgtcagatcgaggcactggaagcggaagcctccgccgccgcgtcaagagcggaggccgcccgcgcacaggtcgagcagatgacagctgaagctgcatccgccagggcagagctcgccagccgttgggtggcatggtccgctgatgaatgggttcgccaggcgttcaccgggtacgcatgggccgactcgccgatcggcgggttcctcgaggatcacctcgacccgttccccgacccggcccagctcgaccggctcgctgacaccgttgccggcggcgcgagggaccggctgtctgagagggcatccgctctgacgacatccgccgctcaacttcgcacccaggagtccgagctccgcgcggagatgcaggcgctcaccgaccggaccgtggacatcgcaccgacagctccgtcgtgggcgggcaagaccacaggccttcagctctggcgatcggtcgacttccgcccggacgtagatgatgctgtgcgtgcggctgttgaatccgctctcgaagcctccggcttgctcaccgccgtcatcaccgactccggggccgtcattcacgacggtgagctggtggtctccgcagacggcccggttgcgacttcgtctctgagtcaggtgctggcgtcggagcccgacaccgacgtgacggcggtcctggacaggatcgggttcaacagcctcgaacaccctacgaacatcagcagcgacgggtcattccgcgtcgggcagctccacggcaagcaggccgtgtcgtcccaagcccggttcatcggcgcgacctctcgtgagcgaacccggaaggctcgcttggaagagctgcaggaacaggtcgccggcatcctcggccagctgaccctgcacgatgagatgcaggcccaggtcaagcaggagcgcgaacagatctccaagctggtgtccgaagcacctaccgccgacgacgtccggaacgccgacgccagagtgggagcgtccaacacggaggaacgccgtcgcaggaaagagctcgacgatgccgaggaggctgccctgaaggcccgctccggctgggacacccggatgcaggctcatcggaacctctgtagcgtcgccggcctcccgtggagccggaccgagctcgccaccgtgcagagcgccgccgaggcgacccgtgcggccgccgaaaacctcgtccaggtcctcgcggaactgaccatcgacgtccgccggttcgaggaaacgatggcccgtcgaacccgcagtgaagaggaagctgcagatgcgggagcgactgcgttgcaggcgtggagggaatggtcggccgcgaacaccgaactggtccagcttcgaaggtccgtcggagcggaatcggctgctgttctcgcagaccaggaatctgccactgccgacctgaacgcagccacgaagctgatgaaccagtgggggtcagctgtccccagattgtccaaggtcgaagggacgtgtgagtcgaacctcgccacagcctcatcggaggcgaccacggccgccgctcgtgcggctgaagcgctcggagggttgcgttacatctgccagcgccccggcatcctcgccgcagctaccggccaggacctcatcgcccaggcgaacgtcgccacatcgcaatgggtgaggtctgcgatcgggaaccggtcacgggctcgtatcgacagcgtcttcgtcgccctcgacgcgctcatcacagatctgtcctcggacttcgaggtggtccgccacacagacgatctcgccggcgttctcatcgtcgagctcgctgacgcggaaggacagcactccctcgccgatgctgctgccactctccgcgaccgaaccgtcaccgggaaggtcaccctggcacgcgaggagaatgaacgcttccagcggtacatcatggacagcgtcggtgaggagctgcgccagtcgatgcttctcgctgaggagaccatcgcagccacgtcgaagcgggtgtcgcagtaccgcaccagcaacaacatcggggtgcggcttcggatgacggcgaacgacaccctcgggacggaactggtccgcatccgtgagctggtgagaatcgccggccctgtccgaaccgagcagcagaccgctgagctctctacgctgctccgcggcgttgtcgaccaggagcactccgcgaacccgggcgccggctatgaggcagcgctggcgaaagggttcgactaccggaactggttcaccgtcgaagctgtgatcctcggaccggagatcggtcaggagcgtggcatccgtggcgcgcagctttcctccggtgaactccggtacatctcctacctgacgttgacctgcgcgatcgatgcgcagatgtccgcgctgccgtctgccgccccgcgcctgttgctgatggatgacgcgttcgcgatggtggatgtcaccggacgtcggaacctcgtccaggtgatcgtggaacgtgacatcgacttcgtcatgaccggtcacgacctctggctcacttacccggaagtgccggggatcgacctgtacgaaatccacacccacggcgaggatgcgccggctacagccatccactaccactgggacggcagcaaccggaagatccagttcagctga

SEQ ID NO: 51391 - DNA, 1269 bp, Leifsonia sp. Leaf264
atgccggtctcggaaggaacgctggagtacctccgcgatccggcactcgctgccctgtgggattcggtctccgcacggcttgagcggaacgacttggaggcgaccggcgctgtccgggtgccgttcagccctgtcggtgcagcccagttgtccgggctcctgggccgcactgtcgtatccggcaccgtcacggtgaaactcgcggaactggacgagaggctccgtgggctggagggaagcggcggcctcctggccgtcaccgagcaggtgcgcggtgtgaagctgacggacaagcgaaaggtacgagccgaccgttcgcaggcggcgttcgagctgtaccggcagtgggatgatgccatcgccgaggccgggctgacacctgctgcagctcagtcacttggtgcgtcggtgcgatcctcaggcatcctcactcgcgccggcgggacggcaagctccgggatcgcacggttcgcaagcggctgggctgaactcgtgaaggtgggggcgttcgacgccatcggtgaacccaggctgcttcttggggagctggcatcgaagaccaccggaaccgcgcacggtttcgatgaaggcaccgtcgcttcgaagttgatgatgcgagcgctggcggcgcggttcgacgaacccgtgccggaaaccggagaagaccgaaggcgcctctggatgatcgccggtgtgtccaccgactcggtttcggggaccgcgttgatgtggggttttcgcccacccggcgacgacccttggtccgccatgatgcgatcccgggctgaccttgaagttgtgactcacctgaccctgcaggagctgcgggtggcggcaggggtgcttctcgccccgccaggctcgacagtgttcgcgtgcgagaacccgcaggtcctccaagccgccgcgaaagccggcgcatcgtcagccgtcctctgcctgtccggtcaagggtcggctgcggcttggcttgtgctgcgtcgactcatcgcagacggcgtcaccgtcgcttaccatggcgacttcgactggcctggcgtcgcgatcgccgggagggcgtatctggctggggcgaccccgtggaggatgtcggctgccgactacgtcgcggcggtcgtggagagcgcagagcaggaaccgttggaaggccgccagacagccactccatgggagacgggcctggctggagcgatgcgcacacacaacactgccatccacgaggaagcggtcatagacagtctgctccgggacgtcggcgtccccgtctga

SEQ ID NO: 51392 - DNA, 1539 bp, Pseudorhodoferax sp. Leaf274
atgacagtccgcgccggcgtccaagccgaactttttcgtcacgtcagcgccgaaaagactgcgctctaccgcgccgtgatgcagacctttgcagccgccaagcgccagttccgcctgcacctgcggcccgacgaggtgctgatcgaaggccactggcagggcatgcccgctgcgccacggctggaggagttgcaggccgcactggcccagctcaccgaatggggcaacctcgaatcgcagcccgacaccacgcgcgtggccagcatcgccgatttctaccgtgccaagttcctgtaccgcctgtcgcagggcggcgaggcggtggagtcggccctggaaaccttcgcgcgagcgctctcgcgccgtgccgagctgcagaccgtggcgctggaagacatcgcgcaccggctcgaagccctgcaagccctggctgaggaggaagcgcccgacgccgccaaggtgcacgccacgctgcgcgacctggtgcgcgtgttcgagggcctggcagacaacgcgcaagccttcatggccggcatcgcgcgcagcatcgagctgcagcaggccgacgcacaggccgtggtggcctacaagcgccgcctgatcgactacctggagcgcttcattggcgatctggtcagccgctccggcggcatcgcacagcgcatcctggcggtggcgccgcgtatcgagatgctgttgtggctggccgtggagcgtgaatcgcgcgacgcagcgcccggcaacgaagaggagcaacgcgaggcgcaagtccgcagcctgcgggcctggcgcgagcgctggcgcggcctgcggcgctggttcattgccgagcggcacgacccaccccaggccgagctgctgcgggccaaggcacgcgccgcgatcccgctgctgctggccgccgtcgccgcgctcaacgagcgccgcagcgggcgcagcgatcgctcggccgacttccgcgtgctggccggctggttcgcttcctgcgaggacgatccgcagacgcatcgtctggcgcgcgcggccttcgcgctgcagccggcacggcacttcgcgctgaaccccgcgctgcaacccggcgccgccgaactgcccgccagcacgccctgggccgaagcgccgccgctgcgcatccacccgcggctgcgcgagtatggcgaggccgcgccgcgcggcccaatgccccgcgtacaggcgcgcgacgacgcccggcgcctgctcgcagcccagttgcacgaggaacatgcgcagatcgaagccgcgcgccagcgcctcgccacggaccgacccgtgaagctctcggagctgggcgcgctcgacccgcatgccttcggcctgttcctcgccttgctgggcgaagcgctggccgcgcaacccgaccccgaggcctcggtcgagcaagccagtggcgacggcctgctgcgcatccggctgcagcccttggcgcccggcagccgggccgagatccacacaccggccggcgtgttctccggccgcgaccacctgctgaccatctccgaggtggacacacgcgcatga

SEQ ID NO: 51393 - DNA, 1251 bp, Pseudorhodoferax sp. Leaf274
atgacagacacccgccagatcgcccgccagcagcagagccaccgtgacgacgagcgcgtccacgcgctgcgcgcgctcttgatgactccgctgatgacgccggcgcacgaagacttcgcggccgtgcgccgccatgcggacgacctgcgcgcctggttcgcacgcgaggccggctggccgctgcacatcgagcgcgactgcgcgcgcctgtataagcgcccggccgacctgtccgacgccagccgcggcctgccaggctacgagcgccggcgctacgtgctgctgtgcctggcctgcgccgtgctggagcgcgccgaggcccagatcaccctgcgcctgctcggtgaccggctgctgacgctggcggccgatccgatgctggactcgcgcggcttcactttcaacttgaccgccccgcacgagcggcgcgagctggtggccgtgtgccgcacgctgctggcgctcggcgtgctgcagcgcgtggccggcgacgaggaaggcttcgtgcgcgatgccacggccggcggcgaaggcgccgatgcgctctacgacgtgcagcgccgcgtgctggccggcatgctgaccgccgtgcgcggcccctccacctggccggacacgcaggcaccggtgacgctggacgagcgcctggcgtcgctggtggacgaacacgtgcccgacagcgaggacagccagcgcacggccctgcgccatcacctggcccgccgtctgctggacgacccggtggtctacttcgacacgctggaagaagccccgcgtgcgtacttcgccaaccagcgtggcgccatggccacacgcctgtgcgaggccaccggcctggtgcccgagcaacgggccgaagggctcgcgctggtcgacgaggacggcgcgttgaccgacgtggccatgccggccgaaggcaccgaggcccacgccaccttgctggtggccgagttcctggccggccggcaacgcgccggtgcggccgaaggctgcggcctggacgagatcgccgccttcatcaccgaggcgcgcaagcgctacggaaactactggcgcaagtccgcgcgcgagcccggtgccgagcacgaactcgcccgcactgccgtgcagcgcctggcgcagttgcgcctgatctccacgcagggcgagcaggtgcgcccgctgcctgcactggcccgcttcgcactcggcgagaccgaactgcgagccgccaccgccccttcacagaactccctgttcgacgccgcatga

SEQ ID NO: 51394 - DNA, 4146 bp, Pseudorhodoferax sp. Leaf274
atgaccgacaacgcccgccccgccctgccccaacccgatctgccacgctggcagccgctgcgcctgggcctggtcgagctgttccactacgacagcgaggagttctggttccgcgacggccacctgctgctgcgcggcaacaacggcaccggcaagtccaaggtgctgtcgctgaccttgcccttcctgttcgacgcgcaactcaagtcctcgcgcatcgagcccgacggcgatcccggcaagaagatggcctggaacctgctgctcggccgccatgagcggcgcatgggctatgcctggatcgagttcggccgtgtcgatgccgacggcacgccgcacttcctgacgctcggctgcggcctcgcggcaacggccgcgcgggcgcaggtggacagctggttcttcctgctcgaaggcggacgcgtcgggcaggacctctggctgatcggccccacgcgcgtggtgctcacacgcgagcggctgcgcgacgcgctagagccgctgggcggccagctctttcccaccgccgccgagtaccggcgcgccgtggacgagcgcctgttccacctcggcccggtgcgctacgccgcgctgatggacacgctgatccagttgcgccaaccccagctgtcgaaaaagcccgacgaggtcaacctgtcgcaggcgctgaccgaagcactgccgccgctgcccaccgacctgctggccgacgtggccgacgcactgagccggctggaggaagaccgccgagagctggccgagtacgaggcgctggaacgcgccgtcgatcagttcaaccagcgctaccggcgctatgccgccacgcaggcccgccgcaaggcgcgcaatctgcgcggcgcgcagaccggcttcgacaacgccagccgcgcgctgaacgacagccgcagcgcactgacgcaggccgaggcagcagaaaccgaggcaattgcgcaattggcggcagacgacgccgcattggccaccgcacgcctgcgccacgaagcgctgcagaacgacccggccatggccggcgccaggcaactcgacaacgccgagcgcgaagcccggcgccggcaggacgaagcgggcaaggcagcagtcgatcgccgcgaggccgaagcccgcctggcgcgggaacagcaggccagccgccagcgcggcgagcgcagcgaacaggccgcgcgcgtactggccacccggcgccgggatgcggcgcaggatgccgccaacgccggcctgacgcgcgcgctcgacgcgaatcccctagccgttgccgagctcgccacgctggaaccctcggccgttctggcggcacaggacgagttgcgccgcgcgctcaccttgcgccgcgagcaggccgccttgctgctgcagcgctgcgacgccgtcgagcgcaaggccgaaatgcatcgccgcgaacaggagcaccgcgacctgtgccgcgacgaagccgaggatgccgccgcccgccgcgccgaagccgacgctgccgtcaacgaacaggcccaggtattgcaagacgcctggcagaaccacttcgacagcctgcgcgagctgcacctgctggacgcgccccaggtgctggaccggctgacgacctgggccctcgatccgcaagggcagaacccggccagtgcggcactgctgtcggcccagcaggccggcgccgaccgcctggcccggcgccaggccgagctggaggcacagcgccgcacgctggccgaagaacagcagacgctgcaggccgaacgcacacgactggaacagggtgaagacgcgctgccgccggccccgcactggcgcagcgaatccgcccgtgccggtcgggcgggggcgccgctgtggcagctcgtcgacttcgcatccgggcttgccgatggccagcgcgctggtctggaagccgcgttgcaggccgccgatctgctggacgcctgggtcacaccggacggcgggctactcggcgccgacggctcaccactgctgcatgacacgcagtggctggcccggcccacgcaagccgcctcgctggcggactggctgcaacccgcagacaacagcacggtggcgcctgtggtgctgcggcgcctgctcgaaggcgtggcctgcggaaccgaagatgcaccggccgccgaagcctggctctcgcccgacgggcgctttcgcctcggcgcgctggctggcgcctggtccaagccgcgcgccgaattcatcggctacgcggcacgtgccgccgcacgcgcgcggcgattgcaggagatcgtcgagcgcctgtccgagctggccacggatgccgtcgcattggcgcgatccttcgaccagctcgtagccgctcgccaacaagccacgcaggaatgggagcgcgcgcccggcgacgacgcattgcgcggtgcccatgcccaggccgccgccagcgcccgcgaatacgaagccgcccgcctgcggctggaccaggccgagcgccgctggcgcgaggccgcgcaagcctgggagctggcccagcacgcactggcgcgcgacgccgaagacctcgcgctgccggcgaaccgcgaggccttggccgccattgcgctggccttgcagaccttcggcgaggccatccacgcgctggcaacggccgcacgcgagctgcgggatgcctcggtcgagctggcgcagcagcgcgcgcgtgaacacgaggccatcaccgcagccgagagcgccgcggagcaagccgccgagcgcgcggcgctggccgaggaagcccagatccattggcagaccctggtggagtccatcggcgcagcggtcgaggacgtgcgccggcgcctgagcgaagcgcgcagcgccgtgagcaccggccaacagcggctgaaccagcagcacgaagcccgccgacaggccggcgaaggccgcgccaaagccgaacaaaaagccctcgccgccaccgccatgctggacgagcgcacggccgcgcgccagcacgccgtggcccagctgcaaggcttcgccgccaccggcctgctggccactgcgctgcccgacgccgaacagccaccgcagacaacgccctggaccatcgagtccgcgctgaccctggcgcgccgcgcggaacaggcgctgtcggacgtgaaggacgacgacgaagcctggagccgggtgcagacccaggtgtcgcaagacttcaccgagctcggccgcgcgctgtccgcgctcagccaccaggcgcaggccgagaccagcgaccatggcttcgtggtccgcatcgtctaccgcaaccggcccgagcggcccgaccagctcagcctgcaactggcggccgagatcgcgcagcgccgcgagctgctgacggccggcgaacgtgaggtgctggagaaccacctgcaggccgagatcgccgccgcggtgcagaagctgctgcgcgaggccgagcatcaggtcgaggcgatcaacacagaattgcacaagcgccccacctccaccggcgtgcgcttccgcctgcaatggcaaacgctgcccgaaggcgccgagggtgcccccgtcggcctggaagccgcgcgccgccgcctgctcaacaccagttcggacctgtggaccgcggaggaccgtcgcgtcgtcggcgagatgctgcagcagcgcatcgcggccgagcgcagccgcgccgatgccgaacaaggcggcagcctgcaggagcaactggcacgtgcgctggactaccggcgctggcaccgcttccgcgtgcagcgctggcaggatgggcaatggcgcgccctgtccggccccgcctccagcggcgaacgcgcactcggcctcaccgtgcccctgttcgccgccgtttccagcttctacagccaggccggcagcgcgcaggcgccacggctagtgctgctggacgaagccttcgccggcatcgacgacgccgcacgcgcccactgctgggcgctggtgcgcgagttcgacctcgacttcgtcatcaccagcgaacgcgaatgggcctgctcggccgagctgccgggcgtggccattgcgcagctgcagcgccgcgagggcgtggacgcggtgcatgtctcgcgctgggtctgggacgggcgcatgcggcggcgcgaggacgacccggaccgccgcttcccgccggcacccccaccgccgccagccgatggcaacacctga

SEQ ID NO: 51395 - DNA, 1284 bp, Pseudorhodoferax sp. Leaf274
atggcaacacctgaccctcgcctgcagcgcctgcttggcggccccgagctggccgcgcttcggcaacgcctgcggcgccatttcgagcgcggcggcgcggccgagggcatgttgcaactcagccaattgcagccagttgagcgcgaggcgctggcgctgctgagcggccggcccgccaaagtgacgagctcgctgcgcctggatcttgccgaattgcaggcccgactacagtctgccggcatcgcaggttcgctgcgcgaagctctggagcggctggacgggccgatcacagacttccttgccgaacgcgccgtgacccaggccgcctggctggtcatactgtccaggcccgaccgccatccgttcctgcatgcctggctgcaatccgccaccgctgccggattgctaaagcgcctgtcgcgacaggatgccaatgccgccgacatcttgctgatgcaggccggcagagtcctcggccgcttgccggctaccggcttgccgcgctcgcagctggccgcacagatcctcggtgatgcgcacgccctcgaccccggccgacccgtcgcggcattggtgctggcagcctggcgccatgccgaagcagcgcgcggcgtgcccgctgccgaaatcggtgacgaggctctcgatgactcccgggaggagccgcccggccccgctgtcgacgaacgcgcgcgtgacatctgggcgcgcgctggtgtgctcgtcaatgaactcgcccgaccggtgctggtgctgaacttgccgttacccttaggcttggacaccgcgccctggctgcccggcgaacccgcctacctgtcgctgcgctggctgctgcgcgctgcacctcaatgggccatggccggccgcacggtgttcgtctgcgaaaaccccaatctgctggccatcgccgccgaccaactccacacccgttgcgcgcctctggtttgcaccgatggcatgccggccgccgcacagcgaacgctattgcaacagttggcgaggtccggcgcgctattgcgctatcacggtgacttcgattgggccggcctgcgcattgccaaccatttgctacgctatgccggtgctgcaccctggcgcatggaaatggccgactacgaaacggccgcacgggccgcaacgtccgcacgccacgccctgaccggctccgaaacagaggcgctctgggacgcacatctggcccccaccatgcgtcgatacggcctggcgattgccgaggaagcgctggccgagtccctgctcgatgacttgtgcctcacctga

SEQ ID NO: 51396 - DNA, 1491 bp, Modestobacter sp. Leaf380
atgaacgatcccgcagcagccaccgaccggctcaggctcttccggtacgtgagcgacaccgagcacacggccgactacctggccgtgatgcggctcttcagctcaggactgctcatcgacctgtccgcgtccgagatcgccgagcggctgcgagagcagtccggcatccacctggacgtcgacaccgtcgaggaccggtgtgactccctggtgggctgggggaacctgatccggtcggtccgggacgcccgggtgcggacgatcgcggactggcagcgtgcccgcacccggtaccagatctccaagctgggcggccgggtgcaccgccaggtggaggaactgctggccacctccgagggtgcccgcgaggtggcccgcgaactgctcgccgggaccgccgaccggctgctgctcatccgcgagctggcggtggccgatcccacggaccccgaacggctggccgccgaggtcacgaccctgttcagcaaccagcgggtcttcctggacagcctggccgacttctacgcctacctcgccaccgtgctcagccggtacgacctggccggggacgagtacgccacgttcaagggcgtgctgttggactacgtggggttgctggggtccgacgtcggacgacacgccccgctcgtcggcgaacggctgaccgggctcgctccgcacctaccggcggtcctgggccagctggcggcgctgcccgggctctccggaggggccgccgcggtcgagcggctacccgggcgcaccgagcgcgactggaccgagttcgcggagtggttcaccggcgcacggtcgggtcccgaacgcctgcgcgcggctgccgagcaggccctgggccagctgctgaccaacgccaaacgcatggtctcctcggccgggaccgggctctcccgccgcgacgacctcctccggctggccgcggtcttcgccaccgacggggtcgacgacgacactgcccaccggctgtgggccgcgacgttcggcgcagctcctgcgcgacacctggcgctggggctggaagacgacgacggtcgcacgccgccgtcgacgtcctggtgggacgcgcccccggtcgacgtcccggtgtccgtgcgggagcagggtgaccggaccgcccggggccggtcggcacgggtccccgaccccggactggaccgggtccggttgctcgccgaggcagcggcggaagccgcggcgctgcgggcggccgccaccgagctcgcagccgcgggacgcctgcacggcgcgcggctgtccccggcggcccgggacctggtgctggaccagttggccgcggtgatcgccgtcgaccagctcctggtcggcccggccacacgtaccgactccgacctgggactggtcctgctggtggagcccggcggggagaccgtcgtcgagtccacggacggccggacgacggtgcacgggctgaccctgagcgcgcggcccctcgtcggggaggcgaccccgtga

SEQ ID NO: 51397 - DNA, 1224 bp, Modestobacter sp. Leaf380
gtgagcgccgtgaccacctctgcgcacgatgcggccgagcgccggacggcggcccgtgcgctgctgctgaccccggtgctgaccactgcccagcaaccggaggtcatgcgcctggtccgccggcacgccccggcgctgcgcaccctgttcggctctcagctggggtacaccctcgtcgtcgaatcgaccttcgcgcggctgctgaagaccccgccggaggccggcatgccggtccgcccggcccgtcgcgccgacggcgcacccttcgccgcccgcacgtacgtgcacctgtgcctggtgaccgcagccctgctcgctccctcggccggcgagcaggtcctggtgtccaccctcatcgagcaggtgcgggccgacgctgcggggttgggtctggagctccccgacagcctcaccgagcgccggtctctggtcgcggcgctggacctgctggtccgctggggcgtgctgtccgagaccgacggcagcacggcaggctgggcagaacaccgcgaggaggcgctgctcaccgtgcaccgcccgctgctcccgtacctgctcaaccggccgctgccggccggggccgacgtcgacgccctgctggcgcctgccgaggaccaccagccgcgccggcggctgcgccggctgctgtccgagaacccggtcgtgctgcgttcggacctggacgcggagaccgccgacgtcctctcccgcgagcgtcccgtgctggcccggcagctggacgaggcattcggtctggtgctggagacccgcgccgagggcgtgctcgcccacgacccggacgcctcgctgtccgacgtgaccttcccgggcacgggcacggtccgacaggccgcgctgctgctggtcgagcacctggcgatcgaccacctccccgaccccgacgcgcgggacgccaccggcgctcacccgtcgtcggtgctggtgtcctggtccgccgtcgacgactgcctgggtgtcctgctgacccgctacggccgggggtggcagcagcggttgcgcgaggacccgctgcgactgcgcggggaggtgctcgacctgctcacctcgctgtcgctgaccacaccctcggcggacggcgtcctcgtgcacgccgtcgccgcccggtaccgcaccgaggtgacccaccaccgggccacccggcgcgcacccgaccccgagcccgagcccgatgccggcctgttcgacctggaggacccgcagtga

SEQ ID NO: 51398 - DNA, 4101 bp, Modestobacter sp. Leaf380
gtgagcgactcgaaccgctggcggctgcaccgcgccggcatccagaacgtctggcactactgggacgccgagttcgtgctctccggggggcgcatggtgctgcgcggcaccaacggctccggcaagtcgcgcgccctggagctgttgctccccttcctgctggacgccgaccggcggcggatggactccagcggctccgggtcggtcagcctggaccggttgatgcgcgtcggtggccgggaggtcggcaaccgggtcgggtacctctgggtggagctcgcccacggtgacgggacgggcgtccccgtccggttcctcaccctgggcgcccacctcaagtggtccgccgcgaccggcaccgtgaaggtgcactggttcaccaccgaccaccgggtcgggcacgacctgcacctgctggacggccagcggcaggccctgcgccgggaggacctcacccgtcagctcggcccggagcaggtcaccgattccgccgacacgcaccgggagaaggtccgcagcctggtcttcggtctggtcgacgcccgggccgaggagcggttcgagggactgacccagctgctgcacacgctgcgctcacccgacgtcggcaaccggatcgacgagggccggctgccggccctgctctccgatgccctgccgccgctctcccaggccacgctggatgccgccggcgccaagctcgacgagatctccgagacgcgcgccctgcaggagcggctggaacgcagcgtcgcggacctggagaccttcctggcctcctatcggcggtatgcgcagggtgagctcggcgcagcgacggcgcaggcccggtccgccgtccgcgatcggggccgggccgaccgggccgaagccactgcccgggtggcactgaccaccgccgaggaggccgctgcccagggagctgcccgctacgcccagtgcaccgaacagctggccgaggtgcaggccaccctggccgggctgcggcagtccgccgagcggcaggacctgctggagcgtgcccgcacggtcaccgcactccgcacgtctgcggacggcgcggccgaccgggcgtgggacgcccgggccggggaggagcaggccgcgacgcgggtcgcgggcgccgtcgacgacgcggaggccgcgggcgcccgggccagcggtcagctcacggcactcgccgagaaggcaggcgtggccggcgtcccggacccgctgccctccgaggtgccgctgcgccgggtcgagctggccggtgccgtggatgccgtccggctgcggccggaccgggacgcggagccactcgctcgacccgcgatggtcgacctggacctcggcgatgccgacctggaggcctggcggaccaccgccggggccgtccgtcaggcggcacgggaccgccgccaccagctggaagggcggctcgtcgagcaccgtcggctccgcgacgcggaacgagcagtgctgaccgcggagaacagacgcgaccaggccgccgaacgcgagcaggcggcccgcgttcggcgggaggccgccgtcggcacggagagcgcggccggtggggacctgcgcgggcagtggctgcgctgggcccgctcgccggacaccacggagcacctgggcgacgtggagtggtcggggacggtcggcgggtggctgggtgcagcggcacctgacgacgtcgacaccgtcgttccagacaccgcggctctgggggccacggtcctggacgagttggacggcgccgcacaggacgctgcggccgatgccgccgaacgactgtccacccagcgagccgacctgcggcgacgaaagacgatcctgctcgaccgggccgcggacctcggctcccgacgggaccggttggtggccgagcaggacccggaccccacggcgctgggctgggtcaccgcggcggcgggcaccccgctgtggcgggcggtggacttcgcgcccgacgtcgacccggaacagcacgccggcatcgaggccgcactgatcggggccggcctgctcactgccgcggtgggcgccgcgggcgcgaccggtccctcggtcggtgagctcctggtggacgcctccagcccacgcgcccagcatccgctgtcgacggtgctggtccccgatcccgatggtggcctgcccgccggccaggtgaccgacgtgctggaccggatcgggtgggcggaccgctcgggatcgtgttgggtggacgtcgacggcagcttccggctcggctcgctcaccgggcgccacgacgtcccgcacgcccggcacatcgggacgaccgcccgggcccggcaccgggccgagcagttggccctgctggagaccgagctccgcgaggtcgcggcggagacagcgaccgtcgccgccggactgagcgaggccgcggaccgcaccgaggcgctgcgccggtacgtccgcacagccccccggacgacggcgctgcgcgaggccggcacccggcggcgcagcgcggacgccgacctcgcgcgtgaggccgccgagaccgtgcgcctgtcccaggtggcgacgggatcgcgctcggcgtgggacgtggaccacctccgccacaccgaggcatgcggccgactgggcctgccggccgacgacgaccgtctggcggcggcccgcgaccgcgcgggggacacggtcaccgcggccgagaacgtgagtgctgccctgggtgacctcgcccgtgccgtgcgccgggtgagggcagaccagtcggttgtgcagacggcgcgggcgcaccgggtggcggccgagaccggcgccgagcaggaccggtcccgctggcacgaggccgccaccgagctggcggcagccgagctggtcgcgggactggacgccgacgcggcccgcgccgagctcgcggcggccgagcgggaggtcggacgagctcgggcagcacacaccgctgccgacgcggaacgactggacaccgcccaggcggcgagcagcgcgcgccgggacgccgagaacgccgccgtctccgccacggcgacccggacggctgctgcgacggccgaggaccggttgcgccaccgggccgagttgcccgggctcgctgaagccgccgggctgtccgagctgccgaccgccggccctctggtcgacgtcctgaccgcagggctccccgacccggtgcccgaccgcgaccccgacggctaccagaaggcgctgctggagttgaaccgccggcgtgaccccggggactacgacctgctcccctcggtggcggacggggtgaacctcgtggagatcggcgaggccgccggccggcgctcgctgccgggcgccgtcgccgaactggtccgccgccgagacctcggccgggccgcgctcaccgagaaggagcagcgggtcttcaccaccttcgtgctgggcaccgtcgccgacgagctccgacagcagctgctgtggtcactcgagcaggtcgaccggatgaacgaccggctggccggcatccggaccagccacgggatcggggtggagatccgttggccgttggccgaggacgccgccggctcggccgcacggatcgaggagctggtgctgacccgcgcctcggcccggtccgtggacgccaacgccgagctgaccacgctgctgcgtggccgggtcgaggaggagctgcgcggggaccctgcgcaggggtacgcgaccgcgctccgggcggccctggaccaccgctcctggcacaccgtcgaggtctacatcctggggcccggcaaggacgaacgccgcaagatcagccgccgggcccgcctgtcccagggcgagacgcgggtcgtcagctacctggcgctgttcgcggccgccgacgcgttcttcaccgggctccccgacccggaggcactgcggctgatcctgctcgacgacgcgttcgccaaggtggacgagccgacgatcggggagctgatggcccagctggtcaggctggacctggacttcgtgatgaccggccacgcgctctggggcttcgggcccggggtgcctgcgctcgacgtctacgaggtacgccgagccgagggaacgtcggcgatcaccacccgggtgcactgggacggtacgagcaggcacgtgttcgggtga

SEQ ID NO: 51399 - DNA, 1209 bp, Modestobacter sp. Leaf380
gtgagcctgctcgacgagcttggggacgcggcgctggccggtgtgtggcgtgccgtgcggcgtcaactcgagacgaccgggctgcagccctccggtgcggtcacggtgcaggtggacggggtcgctgcggacctgctcggtgggctgctcggacgacgtccgcaggtggggcggtggaggatcggtctcgccgatctggatgccgcgctgcgtgcctctcccgccgcggtgtccctggtcgaggccaccgtcgtcctgcacggcccactgcgggaccggcccgccgagcggcgtgcggccgagacggccaggatcgcagcaggcggggtctgggccgagtcactcgtggccgcgggactgcccgcggagccctgggtcgttgactggacggcggggctccggaccaccggcttgctcgggtcgtcgccggcgtcgctgcaggccgcggtgtcggcggtcgccaccgtcctcgccgatccccggccgcggacgttgggcgagctcgcggccgcggtcaccggcgacgcccacgggctggacccgggccggcgagcaggtgcggtggccctgcgcggactggccgcgcggagtggacagccaccgcccggccaggccgacgcccggtcccggctgtgggcatcggtcggggtggccgtcgacgacgtctcggggacggtgctggtgctcaactggcgtcctccctcgaaggaccgatgggcagtgacgatgcgggagcgggccgacctggggctgccgacccacgtgaccgtgcgggagctgcgcaccgcaccgggcccgtgggcgctgccgggccatgtggtgcacgcgtgcgagaacccccaggtgctccaggccgccgccgaccgtcgcctgcccggcgcgttggtctgtctgcagggcaacccgtccgctgcagcggcgctgctggtgcaggggctggcctccgcgggggccgtcgtccggtaccacggggacttcgactggccgggggtggcgatcgccggccgggtgttcgcgctgggcgccgcgccctggcggttcggggctgccgactacctggacgttgcacccgctctcggcgtgccgctcaccggacgccggacccccaccccgtgggaccccgggctggcagaggcgatgcagtcgcagggcagtgccgtccacgaggaagccgtgctggaggagctcctgtccgacctggttctctga

SEQ ID NO: 51400 - DNA, 1617 bp, Kitasatospora sp. Root107
gtggtgcaggagaccggccggccggcgggcgcggaggctgctgggccggggccggaggagcagctgtggcagcggctcaccgcgtacacctacctcagtgcgccggagcggttggagtacgtcgcgctgatgcgggtgttctgcgcgaccctgctcgccgacctggcggtgccggacatcctggtgaagttggccgagagcgggggctggtcgcggcagcccgatgccgagaccgtcaccgcccggctcgagcagctggtgaagtggggcaacctgctgcgcagcacgcacacggtcaaggcggccagcatcgcggagtaccagcgttcgcgggcgcgttaccagctgtcgaagctcggcgagcgggtgcagcgggacgcggacgaggtgttggcgggagcggatgcggcccgggaggtgagcagcgaactgctcgccctggtggaccgcgggctgcgcgagctgctggtggcggtggcccggcccggcggggcggatgcccaggaggcgctggagaagatcagcacactgtttgtgcagttcgccgaattcgccgactcggtccgggacttctacgcctatctgggccaggtgctgtcgcgctacgacctggacggcggcgagtaccagggattcaaggagctactgctggactatgtcgaggcgatcaccgaggacgtctccttccgatcgccgaggatcgcggcgagtctcgcggcgctgtggccggacctgccgggtctgctcaagcggatcgacgagcatgcggtcggcctcgggacgatggcgacggcggtggagacgagggtgcagcgcagccgggggcgggagctgtcggactgggaggggctgcgcggctggttcgtcgacactgacggccagggcagccaggtggaccaactgcggggcgccacactgcgggcgctccagtccctgctggccaacgccaagcggatgctgcgctcggcaacgggcgagatgtcccgccgcagggacctgctccggctcgcggcgtggttcgatgctgccgatcccgagactgcgcacgacctggcggtggccgcctacggcctgtacggtgcacgccacttgggggtcgcacccgatccgaacgggacggtgccggcctacgtgagttggtggagcggccccgtggtcgaggtgccggtggcgctgcgggagcgcggggaccgcgcccagcgcggccggaacgccgcggtcgaggaccactccacccagaagctgcgcctgctggacgaagcacgggcgcaggcagcggcccggcaggcggcagcggacgaactgcgcagtgcctcgggccggttcgggcaggtccggctgacctccgccgcgatggcattgctgctggagctgctcgcctctgcgctcggcaacgcccagctccgcagatccgcccgggggagcgatttcgccctggacgacatctccgcaggtgacgccgagttggatatcaggctgacggcccgtcgggccgtcggcagcggctccgtgctgcactccgtggacggtgacctgctggtggacgacctgggcctgaccctcagtcgctacgcaggcccagggcactcggacggctccgcagcggagcgtgcctga

SEQ ID NO: 51401 - DNA, 1329 bp, Kitasatospora sp. Root107
atggcgcttccctccacccatgacgtcgcgctggccgccgagcggcgcgcggcggcccgactgctgctcgcgcgtccgctggtgcacgcggacgggccggatggcgagacgttcctgttgatccgccgtcatgccgactggctcgggccgcggttccagcaggtgctgggctaccggctgctggtggagtccacgttcgccaggctgttcaaggcgggtctcggtcctgcggccgggcaccggctggtgcgtgccacgggcacacccttcaccccgcgtacctacgcctgcctcgcgctggccctctcggccctggtgaccgcccctgagcagatcctgctgtcgcagctggtggcggatgtgcgagcggcggcggtcgacgcgggtctggagctcgccgacaccggccgccaggcggagaagcggacgctggcggccgtgttccggcagctggtcgagtggcgggtgctgacggaggtcgaaggcagtgtcggctcggtgaccgaggaggcgggcggggaggcactgctgacggtcgatcgggagatcgcccgctcgatcaccgcgggcccgctggcccagagccgggacggcgccgagctgatcagccgggcggccgacccgggcttcggcggcatccggacctatgtgcggcggagactggcggagaccccggtggtccacctcgacgacctcacggccggtgagcgtgagtggctgcgcacccgccagcgtcgggaggccctggcgttcgccgaactgctcggcctggaggcggagatccgggccgaggggattgccctggtcgacccggaggacgagctgaccgacctgcacttccccggcacggggacggtcgcccaggccgccctgctcttggtggagcggctggtccggcagctccgcccggatgacgcgggccacccggcgaccggtggccggctggtgatcggggtgccgatcccacccggtctggtggacgagatcctggccgacctggtcgaggagtacggccgccggggcaactggcagcgcggctacgtcgaggacccggcggcgctgcgtacggacgtgctcgacctgctggccagaatgcggctggccgccccggccggtccggtccgggcggacggccgcggcgtacccgaggggtacgaggccgatgcgccggacggtcggccggtcaccgaggtgcgggcggcccggggccaccctggcggtggctgggtgctgcttgccgccgccgccaggtacgccaccaccgtcaccgtccggaaggccgcccggccgtcgtccgacaccagcccgcagggagaaccgacaccgtga

SEQ ID NO: 51402 - DNA, 1266 bp, Kitasatospora sp. Root107
atgaacccggtaccgtcggcagccctggactggctggggcaaccggagctcgccaagctgtggggggcggtgcgggcccgtctggagcgcaacggtctgcaggtcggcggcagcgtccggctcaccggcctcgacgcacccgaacgagaggcgctctcgctgctcctcggccgccggatcggccgccccgacaccgccgtcccgctggccgagctggacacccgcctccggaccggcgcggccgcctgcggcctgacggacacggtccggctgctcggcggtccgctcaccgaccggcccgcggcgcggtcggccgcccaggcccgacgcaccgacctctggacctcggcggccgcggcgctggccgcctcaccactggcggaggcggactgggccgatcagtggctgaccgaggtccgccggaccggcacgcccggtcgcctgcagcccgaagcagccaagaacctgctccagcaggcgatccagctgctcgctctcctccggcccaccgaacagcaggcggtccccaggggccggggcgaactcgccacgctggtcaccggcaccgcgcacggcctggacgacgacaccctgctctcccggctcgtcctgcgcggcatcgcccttgcccacggcgaaccgccgccgagcgacgccgccgggcggcgagccctgtggcggctcgccgccgtcgcccctgacgaggtgtcgagcaccgtcctgacgtacggcctccggccggtcggcgaaggctggcgcgaacgggccctgcgcgaacgcgcggaccagcacgcggagacccacctgaccctgcgggacctgcgatccctcgaccttgccggacagacccgcacccgggtgcacatctgcgagaacccgcacgtcgtcgaggcagcggccgcctcgggctgccgagccgcgctggtctgcacctcgggcagcgccgccactgtcgtgctgcttctgctcgacgaactcgccgccgccggatgcgagttcgcctaccacggcgacttcgactggcccggcatcgccctggccaaccggctcgtacggcgataccgggcccgggcctggcggatggcggccgaggactacgaacaactcgccacccacacccgggcccagggcagcccgcccctcccgctctcgggaaccccggtggaggcggcctgggacgcagcgctcaggcccgccatgacggctctcggcaccgccctgcacgaggagtccgccctgcacctcctgctcgccgacctggtctga

SEQ ID NO: 51403 - DNA, 1512 bp, Rhodococcus sp. Leaf7
ctgaccgcctaccctgttgcagtgaccgaatccgccgactcctacgtggtggacgacaggctccggctcttctcgttcgccacagccgagaaacgtgccgactacctgcgggttcttcgagcgttcgaccatgcccgcgccggatacgtcgtgctcctgcacgccggtgaggtgtccgacatcctggcccgcaccgagggcgccgacgttctcaccggtgtggagatcagcccgctgctcgaacagctgcacacctggggagtgctcgaacggagctacgacggcacgcgcgcggcgaccctcgccgagtaccgcaaccggcattacgtctaccagttcggacaggtcggatatcaggcataccgcgcagtcgaggacgtgctcgcggctcgtcccgaggacgcctcgttgtcgcggctggtcctgccggagttgctcggagacctcgccgagctggccgcggcgaacagcgccggcgatgccgatctggtctaccgcaagctgaaccggttggacacggcgctgggcgacatggccactcgcgccgcgcacttctacctctcactcggtgacctggtgcggacgacggatgtcaccccggaatcgttcctcgcgcacaaggacgctctgctctcgcatatgcgcgagttcagcctcgacctggctcgtttcggacccaagctcacggcggcgatcgagaaggtggacgccaccgggctcgaggccctgctcgatcgcgccgctgcgagcgacgagagagtgttcctgacccccgacgagcggcgcgccgactgggcggggcggtggacgggactcgttcactggttcagctcgacagacggtgatccgaccgagtcggatcgactccgcgagggcacgatgagtgccatcgcggcggtgctgtcgttgctgcgccgcgtcaccgagacccgcaagggcggggtcagtcgcgagtcccagctgcgacatctggccgggtggttcgcgtccgcacccaccgaggacgccgcccacgccctgttcggcgccgtgttcgggttggggagaccacgccacctctcgatggtccaccccgacgacgacatcgttcccgtgtcccggtcgtggtgggacgcaccgccggtggagatctcgcgcacgctggcggagaccggtcgaccgcccgcagccggtgcaccggcgcgagtgcagcgcaacgattccggtgtacgacgccttcgcgaacagcagttgagcgtgcagaggcagcgagccgacgccgcccggtccctggccgatcacggtgtgtacgaccgcgacctgaccggtgaggaaacggacgtgctgctcggcctgctcaatgctgcactgactgcccgtgttcccgtgtccggtcgcgtcggctcctccaccggctccgagggcggcgtgaccctgactctggctccgcacgagcggtccaccgtcgtccgcacggaacgtggactgctgcacctcgatcgactgtccctgaccatcggtacgcggcgatga

SEQ ID NO: 51404 - DNA, 1332 bp, Rhodococcus sp. Leaf7
atgagggcgcggacgatcccgagcctcgcgctcgactcgtaccagcgtgctgcgcgaacagtgttgtcccaccacctgatcacccgcacgtatcccgaccgcatcgccttacccctggtccgccgctgggcgacggagttgcgggaggacatgctggagatgttcgggtaccggctcgaggtcaccgagaccacggctcggctgtacccggtgctggaccgcctggacccgacccaacctgctcgcaccgcgtccgaccgggtcttcgaccgccgccggtactcgttcctcgcgttgtccctcgctgccctgggccgcgccggtgaccagatcacgttgtcggagttggcagatcacgttgccgccgaagccggccgcgtcgtcggcgtggacctggacaccgagcgtgccgccgatcgcgacgccttcgtcgatgccgtcggttggctgtccgcccgcggcgccatcaccctggccgacggagacgccggtggctgggcgagcaatcccgacgccggcgaagccctgtacgacatcgatcgatccgtcgtcgtcgcgttgttccgaccaccgcgcgccgtccagcatctgcgcagcgccgcagggcttctggccgacccgacggacgactctcgacgggccaggcgggcgttggtcgaacggcccgtggtctacctgaccgacgctgtactcgaccccacatcgatcgacgacgtgcgcctgctgaccgggctcgcggcggaacgtcgcgccgaaggagtggccctgatcgacacgtcgggccgactgtcggacaccaggttcccgtccacgggcaccgtcgcacaggtcgctctgctcctggccggcgagatcgccgaccgcgtgctcgaccccgacgtcgaggacggacgcactgtcgaggcgcctgccgaccgcaccgcggagttgatcgacgccctcgactccgccatccccgacggcagcgtcttcgattctctcgcagacgatctcgccgacgacgagtccgagcacgacgcggacgacatcgagcccggccggcattcgttcctcgccgacgagtggatcgacgacacggtcggagcgctcgtcgacgcgtacggccgtaccttcgccgcccagtggcagtccgaccgtctcggagttcgccgagcggcagtccgactcctcaccgacctgtcgctcgtcgcgccggtccgcggtggaatcgtcgccctccctgccctcgctcgctaccggggcgtcgtcgtcacggtccgcgagcacgccacgatccaacttttcccaccgtccggcatcgggcagtccgagttccaggagttcaccccgtga

SEQ ID NO: 51405 - DNA, 4143 bp, Rhodococcus sp. Leaf7
gtgacgtcgagtaccaggttcaagcccacgcgcgccggaatcgtcaacctgtgggactaccgcgatcaggagttctcgttcgccgacggtcgcctcgtgctccgcggacccaacggatcgggcaagaccaaggcgctcgaggtgctcttccccttcgtcctcgacggccgtatcgaaccccgtcgactcaacccgttcgccggcgaggagcggacgatgaagtccaacctcctgtaccggggccaggattcggcgcactcgtacgtgtggatggagttcgcccgaggtgaccgtgacgatcctgaagcggtcactgtcggtatcggcatgcgcgccaccaagtccgcggacaaggtcacgcgctggtatttcgtcgcggaggggcgcgtcggggtcgacttctccctgttcggcgccgacgaccgcccgctgaccaagaagcagctcgcagaactcatcggcaccgacgccatcgtcgaccgcccggtggactaccgggccgcgatcgacgcccgcatgttcggactgggcgcggaacgctacgaccagttgatcaccctcatcctgaccttgcgccgcccgcagctggccaagaatctggacccgaagggattgtcgcgcgcgctgtcggacggcctccgccccctcgacgaacacctcgtcctggaggcggcacggtcgttcagcgacatggaggaggtcggccgcgccctcgagggcctggtgcaggcggatctcgcgtcgaagcgtttcgtcggcgtctactccacctacctcggcgtccaggccaaaaccgacgtcgaccaggtcacgcgtcggctcgaggctgtcgaccacgccaccgtcgcgctgttcgccgcgaaggagttacgggagcggcgtcgaatcgagcgggtggaggcggagacgaggttcgaggcagccgagcgcgcactcgatctcgcggtcgccgatcagcagaccctgcaacggtcgacggcgtacgagggcaagcaacaactcgacgatctggccgacgcggtgcgcaagctcgaggtgtccaccgggcaacaacgggacaaggcgagcaaggcactcgagtcggtcgatgtccggcgtcgtgaatccgaggctgcggcagcgtcgttgcgtgaggccaccgccgccatctcccgcgccgaggacgaacttctggcagccgccgaagacgccggcatcgcctggacgccgctcccccgcgacgcccgaacggatcagatcaccgcggccgtgcgcggtcatgcggaggaacgggacggcgacgtccgcgccgtgcgtgcagcgctggcggtcgtcgaccgcgccactaccgaacgcacgcgaaccgaacgcgcagcgtcgcgtgcccacgagtcgcacgatgcgtcgtcggcggcggttcacgaggcggaggcagccgtcgagatcgcccgatcgacgtacgcggaatcgttgcgcgcgtggtggtcacagcattcggcacgactcggcgtccccggactgatcgagtcggtgaccgacgcggtcgcgaccgtcgggcaggacgacgctccgtcaccggccgaggtgctgagcgacggtgtgcgcgatcttctcgacaccgtgcgtgatcgacgatcagcagccctgcagacgcgtgacgacgccgcgagcaccatcgccgacctgacggccgaacgagcgtcgatcgcagccgaacacgacgatgctccggcgccgccggcgactcggaccggtgacaggtccgggctctcgggcgccccgttctggacgctcgtgcggttcgccgacagcgtcccggccgacgaggcagcgggcgtcgaggcggcgctcgaagcctccgggatgctcgatgcgtgggtcgccgagaccgttccggcgggctcggagtccgaacagttcctcgttccggccgatgccgtcgacggaccgtcgctggcggacgtcctgctcgtcgaaaccgacatctctgtaccgcatgatctggtgcagcgcatcctcacgtccgtatcgctgtctgcggacggcgaccgggtccgcgtcggacgcgacggaaccttccgacacggcgtcgtcctcggtcgccaccacaaaccgaccgccgaatacatcggtgcaacggctcgcgccgcacgtcgcgcggcgcgcatcgccgagatcgatgcggctctcgaggcggccgaatcgcgccgtgacgacgccgaacgcatcgccgaggacgcccgcgcgcatctcgacggaatccgcgctgcggtcggcgcagtgccccgtgcatcgaccgtcacctcggcgttgcgcaccgtcgcgtccgctgcgggcgcactgcgctcgaccgcggacgccgcgaccgcagccgaccgggaactcgatcgtgccgtggccgacctgaccgctgccgagcgtcgccttcgcagtgacgccgtggcccgtcgtgcgccgtacactcctcgcgacctcgatgcactcgccgctgcgatccggcatttcgagaacaccgggtcgtcgatactgcgctaccggggcgactccgatcggtccgccgagcgcgaccgtgaggcgtccggtcgcctcgacgaggcgcagattctcgcggaggaatacgccgaggaagcggcgatagccgagacggagtacgagcagcagttcaccaagctggagaccttgcgggatgcgctgggtgccggagccgagaagatcgacgccgaactcgacgcggtacgccgacggatcgaggcctgcaaggcggagcagcgggccgcgaccaaggcggaccgtgaatcgggagaagcgatcggcaaggcagagggagcccacgagaccgccgtcgccgggttgacgacggcgctcaccgaagccctgaccgatgcgggccggctggcaccgtacgcacaccgtgatctgctgaccgtcctcggcgcggcccgcgactgcacatggcctgcgagtgatgcggcatggtccaccgtcgagcaactcctgtaccgcatcgactcggccgcaggccccgacgatgctccggacgtgctgccggtcgaagtccgccgtctgcacctcgagctgagcaccgcaaccgagcgggtgaaggccggcgacgcgtcgcggcggtccacacgcagcgcactcacggccgcgctccaggaattcgacgcccagctcgcggcatccggtcaggacttccgcctcagctgggacgcagcggacggcgtcacggtcgtgcgagtacaggacgagcagggacatgcgaccatcgccgacttcgccgatcgcatcgatgcggcgcgacgagaccaggaaaccctgctcaccgacgccgagcgccgcatcctcgaagatgccctgctcaccggtctcgctcagcagatccacgagcgcaccgtcgatgcccgcgaactgatcgcgcgcatggggtcggagatgaagcagcggcggatgtcctcgggcaacaccatcggtgtgcactgggtcctggccgacactctcgacgacagcacccgcgcggtgtcgaagttgctcgagcgcgacgcgtcggctctgggaccggacgaactcgccgagatgcgcatgcacttcgccgcgcagatccggaccgcccgtgcacagcactctgagcgttcgtaccccgagattctctcgaccgcactggattaccggcagtggcgtgtcttcgcgttcaccctcatcggctcggacggcgccgaggaccgactgaccgtggcacgccacagcgcactgtcgggcggcgaacagtccgtctcgctgcaccttccgctgttcgcggcagcgcacgtgatgctgtcgtcggccgatccgcactccccccggctgctcgctctcgacgaggccttcgccggcgtcgacgacaacggccgcagcgaacttctcggtctcagcgtgcaattcgacctcgacctcttcatgaccggctacgacctgtggatcacctacggcgacgttcccggctgcgcgcactacgacctggcgcactccaccgccgagaacaccgtcagcgcagcccttctcgtctgggagaacggggagctgctcgccgagcacgacggcagcgacctggccgcggcactcgggtcgccgctcacccgacgcgtgacggcgccggcggtgggtggactggacttcgcggaggtgtag

SEQ ID NO: 51406 - DNA, 1512 bp, Rhodococcus sp. Leaf258
ctgaccgcctaccctgttgcagtgaccgaatccgccgactccttcgtggtggacgacaggctccggctcttctcgttcgcgacagccgagaaacgggccgactacctgcgagttctgcgcgctttcgaacatgcacgcaccggctacgtcgttctgctgcacgccggcgaggtggccgagatcctggcccgcaccgacggcggcgacactctgaccggcgtcgagatcggcccgctgctcgaacagttgcacacgtggggcgtcctcgaacgcagctacgacggcacccgcgcggccacgctcgccgagtaccgcaatcgccactacgtctaccagttcggtcaggtcggctaccaggcataccgcgccgtcgaggacgtcctggccgcccgccccgaggacgcctcgctctcgcgtctggtgctgcccgagctgctcgccgacctggaggatctcgcggcggcgaacctcgccggggacgccgacctggtgtaccgcaaactcgatcggctcgacaccgctctcaacgacatggccacccgcgccgcgcacttctacctgtcgctgggcgacctcgtccgcaccacggacgtcacacccgagtcgttcctggcacacaaggacgcattgctctcccacatgcgggagttctccctcgacctcgcccgcttcggcccgaagctcaccgccgccatagagcgggtggatgccaccggactcgactcgctgctcgaccgggtggcagccagtgacgaacgcgtcttcctcagccgcgaggagcgccgcgccgactgggcgggccggtggaccggtctcgtgcactggttcacctccacagacggcgagctcaccgagtcggatcgtctgcgggagggcaccatgagcgccatcgccgccgtgctgtcgctgctgcgccgcgtcaccgagacccgcaggggcggagtcagtcgcgagtcccagctgcgacatctcgccgggtggttcgcgtccgctccctccgaggagtccgcccacgccctgttcggtgccgtgttcggcctcggccggcctcgtcacctgtcgatggtccaccccgacgacgacatcattcccaccacgcgatcgtggtgggacgctccgcctgtcgagatctcgcgcacgctcgccgagaccggtcggccccccgccgccggtgctcctgccagggtccaccgcaacgacgccggtgtccggcgtctgcgcgaggaacagctgagcgtgcagcgtcgccgcgctcaggccgcgcgatcactcgccgaacacggggtgtacgaacgggatctgaccaacgaggagaccgacgtgctgctcgggctgctcaacgccgccctcaccgcacgcgtcccggtcagcggccgcgtgggcagctcgaccggctccgagggtggcgtcaccctgacactggcaccgcacgagcagtccaccgtggtgcgcaccgaacgcggtctactgcacctcgaacggctgtcactcaccatcggcgcgcggcgatga

SEQ ID NO: 51407 - DNA, 1338 bp, Rhodococcus sp. Leaf258
atgagagcacgcaccattccgagcctggcactcgactcgtaccagcgcgccgcccgagtcgtgttgtcccaccacctgatcacccgcacctacccggaccgcatcgccctgcccctggttcgccgatgggccacggaactgcgcgaggacatgctcgatctcttcggataccgactcgaggtcacggagaccacggcccggctctaccccgtactcgaccggttggacgcgagtcgaccggcccgcacgacctccgaccgcgtcttcgaccgtcgccgctacgcattcctggcgctcaccctggcggcactcggtcgcgcgggtgaccagatcacgttgtccgagttggcggttcaggtcgcctccgatgccggacgggtggtcggggtcgacctcgacaccgaacgcgcgaccgaccgggacgccttcgtcgacgccgtcggctggttgtccgttcgcggtgcgatcaccctggccgacggcgatgccggcgggtgggcgcacaaccccgacgcgggagaggccttgtacgacatcgaccgatccgtcgtcgtggccctgtttcgtccaccgcgcgcgctccagcatctgcgcagcacggcacacctgctgcacagcaccacggacgacccggccgatcgcgctcgccgtgcccgccgtgcgctcgtcgagcagcccgtggtccacggccccgactcggtgccggacgaccggtccgtcgaggatgtccggctgctgaccggactgtccgtcgaacgccgggcagagggcatcgcgctcatcgacacgtcgggacgcctgtcggacatcaggtttccgtccaccggcacggtcgcgcaggtcgcccttctcctcgccggtgagatcgcggagcgggtactcgatcccgatgccgatgccgacgatcggaccacgctcgaggcggacatcgaccccaccgacacgctgctcgcggccctcgacagcgcgatcccggacggcggcgtcgtggacgacctggtcgacgactcggtcgccccggacacggtggaggcgtcggacgagacgatccggcacccgttcgtcgcggactcctggctcgacgagaccgtcggcgccctcgtcgacgcctacggccgcaccttcgccgctcagtggcaggcggaccgtgccggggttcgcgcggccgctgtcgcactcctgacgaacctcactctggtggcaccggtacgcgggggcatcgtcgcgttgccggccctggcgcgctatcggggagtggtcgtcaccgtccgagaacaggcgtccgccggcctctttcccaccgatcacacgagcaccctcgaggagcacaccccgtga

SEQ ID NO: 51408 - DNA, 4143 bp, Rhodococcus sp. Leaf258
gtgacgcgcagcacccgattccggcccacgcgcgccggcatcatcaacctctgggactaccgcgatcaggagttctcgttcgccgacggtcggctggtgttgcgtggccccaacggatccggcaagaccaaggcactcgaggtgctgttcccgttcgtgttcgacggccggatcgagccgcgtcgcctcaacccgttcgcgggtgaggaacgcaccatgaagtccaatctgctctaccgcggccaggattcggcgcactcgtacgtgtggatggagttcgcacgtggcgatcgggacgagcccgaagcggtgaccgtcggcatcggcatgcgtgcgacacggtcggcggacaaggtgacgcgctggtacttcgtcgccgacggccgcgtgggcgtcgacttctcgctgctgggcaccgacgacaggccgctgacgaagaagcaactggccgagcagatcgggaccgacgccatcgtcgaccggccggtggactaccgcgccgccatcgacgcgcgactgttcggtctcggcgccgagcggtacgaccagctcatcaccctgattctcacgctgcgacgcccgcagttggcgaagaacctcgacccgaagggcttgtcccgtgcgctgtccgacggactgcgccccctcgacgagcacctcgtcctcgaggcggcgcgctccttcagcgacatggaggaggtgggccgcgccctcgagggactggtgcaggccgaccacgcgtcgaagaagttcgtcgaggtctactcgaagtacctcgccgtccaggcgcgcaccgacgtcgatcaggtcggtcgacgtctggaggccgtcgaccacgccaccgtcgccctcttcgccgccaagggcttgcgtgaacgacgacgggtcgagcgcgtcgaggcggagaagcggtacgaggcggccgagcgcgcactcgatctcgccgtcgccgaccagcagaccctgcagcggtccaccgcctacgagggcaagcagcagctcgacgatctcgcggatgcggtccgcaagctcgaggtgtccaccgcgcagcagcgcgacaaggctcgcaaggcgacggaggccgtcgacgtccggcgacgagaggcagacgaggccgcagtggcgctgcgggagtcgaccgcgtcgatcgtccgcgccgaggacgagctcctcgcggccgccgaggacgccggcatcgcctggacgccactcccccgcgacgcccgtaccgaccagatcacggcagcggtacgcggtcatgccgaggagcgggacggggacgtccgggccgtgcgtgccgcgctgtccgtcgtcgaccgtgccaccaccgagcgtgcccgtaccgaacgggccgccgaccgcgcccacacactgcacgacgccgcggtggcctccgtccgcgaggccgaggccgccgtcgagtcgtcccgtgccgcgacagcggaatcgctgcgcgcgtggtgggccacgcacgcctcggtgctggacgacggcgagatcctcgagtcgttgcacaccgcgctcgcacgcatcggtgaggacgacgcacccacgctcggcgaggtactcggcgacggagttcgcgagctgctcgacacggtgcgggaccgacggagtgctgcactgcaggaccgggacgacgcggcgcgcaccatcgccgagtcgacggccgagcgcgcgtcggtcgccgccgagcacgacgacgctcccccggcgctgcgcacccgtaccggcgaccgtgcgggtctcgacggcgcaccgttctggacactcgtccgcttcgccgacgacgtcagcgccgacgatgccgcggccctcgaggccgcgctcgacgcggccaccctgctggacgcgtgggtcgccgacacggctccgacggggctcgtctcggatcagtacctgaccgccaccacaccggtgaccgggcgatcgctggccgacgtcctcgtcgtcgaggacgacatccccgtgcagcacagcaccgtgcgggcgatcctcgactcgatcgctctggacgacgtgggcagttctgcgggtgtcggacgggacgggagcttcgcgcacggtctcgtgcgcggcgcgcaccacaaggacgccgccgagtacatcggcgcgacggcacgagctgcacggcgcacgtcccgcatcgcggagatcgacgaggccctcgaggtggccaccgcgcggcgcgacgaggccgatcgagtcgccgagcggtgtcgagaacgtctcgactcgatccgcgccgccgtctcgacggttcctcgtacgtcggaggtcaccgcggcgctccgggcggtcacgtcggccgccggcgctctccgatcgacgaccgagtcggtcgcgtccgccgaccgagaactggaccacgcgatcgccgaactgtctgccgccgaacgacgtctgcggacggacgccgtcgcgcggcgggctccgttcacgccgcgagacctcgacgcgctcgcggcggcgatccgccacttcgagaacaccggttccgccatcctgcgccaccgcggcgacgcggaccggtccgccgagcgcgaccgggaagctgccgggcgcctcgacgaggccatgattctggccgaggagtacgcggaggaagcggccatcgccgaatccgactacgagcaacagcacgccaagttggagatgctgcgggactcgctcggtgcgagcgccgagaagatcgacgccgagctcgacgcgatcaggatgcgcatcgaggcgtgcaagaccgagcagcgcgccgccacgaaggcggaccgtgaatcgggcgaggccatcggcaaggcggagggcgcgcacgagacggccgtcgccggactgacgaccgcgttgaccgaagcgctcagcgacgccgcgcgactggctccctacgcgcaccgcgatctgctggcggtgctcggtgcggcgcgcgactgctcctggccggcgagcgacgcggcctggtcgacggtcgagcaactgctctaccgaaccgacacggctgccgggcccgacgaggccccggacgtactgcccccggaagtgcaccgactgcacaccgagctcaccgaggcgacggcgcaggtcaaggtcagcgatgcgagccgccgctccacacgcagcgcgctgacggcggcgttgcaggagttcgacgctcagctggccgcgtcgggtcaggatttccggctcagttgggacgcggccgacggggtcaccgtggtgcgggtgcaggacgagcagggccactccaccatcgcggacttcgcggatcgcatcgacgcggcacgacgcgaccaggagacgctgctcaccgatgccgagcgccgcatcctcgaggacgctctgctcaccggcctggcgcagcagatccacgagcgcacggtcgacgcccgcgaactgatcgcccgtatgggatcggagatgaagcagcgccgcatgtcgtcgggcaacaccatcggcgtgcactgggtgctcgcggacaacctcgacgacagcacccgtgccgtgtcgaagctgctcgagcgggacgcctccgcgctcggacccgaggaactggccgagatgcgtgtgcacttcgcggcacagatccggacggcgcgagcgcagcatcctgagcgctcgtaccccgagatcctcagtgccgcactggactaccggcagtggcgcgtcttcgcgttcacgctcatctccggtgacggctccgaggacaggctcaccgtcgcacgccacagtgcgctctcgggcggcgagcagtcggtgtcgctgcacctcccgctcttcgcggcggcgcacgtgatgctgtcgtccgcggacccgcactcaccgcgcttgctcgcactggacgaggcgttcgcgggtgtcgacgacaacggccgcagcgaactcctcggtctcagtgtgcagttcgacctggacctcttcatgacgggctacgacctctggatcacctaccgcgacgtgcccgggtgcgcccactacgacctcgcgcactcgacggtcgagaacaccgtcagcgcagcgcttctcgtgtgggagaacggggagttgctcgcggagcacgacgggtcggacctggcggcggcactgggctcgccgttgagccgccgcgtcgacctccccgcggagggtgggctggacttcgccgaggtgtga

SEQ ID NO: 51409 - DNA, 1497 bp, Rhodococcus sp. Leaf278
ctgggtgccgtgaacgcgttcgtggaggaggaccgtctcggtctcttctccttcgccgttgccgagaagcgatccgagtacctggcggttctccgcgcattcgacaccgcacgcgccaattacgtcgtcctgctgcactccggagacgtcgccgacctcatcgcccgcagccccggtcggcacgccgcactgaccacactcgacatcgcgcccctcctcgatcagctccacgcctggggcctgctcgaacgcagctacgacggcacccgcgcggcgaccctcgccgaataccgcaaccgtcacttcgtttaccagttcggtcaggccggctacaaggcgtatcgcgcggtcgaggacgttctcggtgcccgcctggacgacgcctcgctgtcgcggttggtgttgccggagctgctggccgatatgcacgaattggccgaggcgaaccgtcaggccgacggcgatcgcatctatcgcaaactcagtcgactcgattcgacgctgtccgagatggcgacccgcgccgcacatttctacctggtcctgggtgatctggtgcgcaccaccgagatcactcccgagtcgtttctggtccacaaggacgcgctgctgacgcacatgcgcgagttcagctccgatctgacccgctacgccccgaagctcgccgaggcgatcgcgctcgtcgagaacaccggcatcgaggagctcgtcgagcgggccgcgatcagcgacgaacgagtatttctcaccgtcgacgaacggcgagccgactggaccgatcgctgggccggcctctcgcactggttcgtcgcggcggagtccgaactgagtgagtccgagcgactccgcgaaggcacgatgagcgcgatcgccgccgtgctgtcgctgctccgccgcgtcaccgagacccgtaggggcggtgtgagccgcgagagccagctgcggcacctggccgggtggttcgctgccacgcctaccgaagacagcgcgcacgccctgttccacgccgtgttcggtctcggcaggcctcggcacctgtcgatggtgcatcccgatgccgacatcatctccacgtcccgatcgtggtgggaggctccaccggtcgagatctcgcgcacgctggccgagaccggacgcaccccgacccccggcgttccgggacgggtgcagcgcaacgacggcggcatcagacggcttcgggagcagcaactcgagtcgcagcgatcacgcagtgccgcagcgcaatcgcttgcttcggccggaatccacgaccgggttctgaacgagcaggaaaccgaggtgctgctgagcctgctgaacgcagctctcacggcgcgggtacgcgtgagcggacgcacttccgactcgtcgggatcggacagcggcgtgcgcttgacgctcagcgacagtgaccgttcgacgatcgtgcggaccagccgtggccgactgcatctggaccggttgtccctcgatgtcagtgaggtcgcacgccgatga

SEQ ID NO: 51410 - DNA, 1419 bp, Rhodococcus sp. Leaf278
atgagagctcgcgaaatctccacccttgcactggattcctaccagcgggccgcccgggtcgcgctgtcgaatcacctggtgaccagcacgtatcccgataggatcgcactgcctctactgcgccggtgggccaccgagttgcgcgaggacctgctcgaactgttcggatatcgtctcgaggtcaccgagtccacggcgcgcctgtacccggtgatcgatcgactcgacgacagccaacccgcccgaacagccaccgaccgaattttcgaccggcgtcgatacgcgtatctggcgctggcactggcggcactcggccgggcgggcaaccagatcacgctttcggagcttgccgatcatgttgcggcagaagcaagtcaagtcgacggagtagagctcacgaccgaccgagcaagcgaccgagacgccttcgtcgacgcgatcggctggcttgcgacccgcggtgcgatcgcattggccgacggtgacgccaccggttgggccaacaatccgtccgcaggcgaggccctctacgacatcgaccggcctgtcgtcgtcgctctcttccggccgcctcgcgccgtccagcatctgcgatcgatccgtggattgctggccggtgccgatgccccctcggatcccgaggactccgaactcgggatccacaccgagtccgggcgcgaagcagacccgaaagagacggtgcgtgccgtacgacgagcactcgtcgaacaaccggtcgtctacctggacgacctcgatcgtgacgggcgcgccgcgctggccacgtcccgtacggtcgcagacgtcgagttgctcaccggcctgattgccgagcgccgttccgagggagtggccctcatcgacacttccggacgactctcggactatcgattccccagcaccggaaccattgcccaggtcgcgttgctgatcgcgggcgagatctcggaccgggtgatcgatccggatgcacccgcgctggcgacctacccccttcccgacgctgacgccttgatcgaacagttggacagcgccattcccgacggcgggatcttcggtgatctcgccgagttcggattcggttccgatgcaacgacattcgtcgaagcggaaaagaagaagctgtatccgctgatcgaggacagttggctgaccacggtcgtcgacgatctcgtcgaacgattcgggcggacgtttgccgcgcaatggcagagcgaccgggacggcctacgacttcgtgcactggcactactgcatcgacttcgcttggtgcactgcgtgtccggcggggtgctggtgctgccggtgatcgcgcgctaccgagacgtgatggtcagcgtgcgtgatcggaccccgcaggactcactgttcggcaacgagcaagcccccagcaccgatccatccgaagtagaggcttga

SEQ ID NO: 51411 - DNA, 4185 bp, Rhodococcus sp. Leaf278
atgaccgcacactcgacacgttttcggccgacacgagcagggatcgtcaacctgtgggactaccgcgatcaggagttctccttcgccgacggtcgcctggtgctgcgtgggcccaacggatccggcaagaccaaagccctggaagtactgtttcccttcgtcctcgacgggcgcatcgaaccgcgccgactcaatccgttcgccggtgaagagcgaaccatgaagtccaacctgctctaccgagggcaggagagcgcacactcgtacgtctggatggaattcggccgcggctcccgcgaggaccccgaatcggtgacggtcggcatcggcatgcgggcgagccgtcacaacgacaaggtgacccgctggtacttcgtggccgacggccgggtgggcgtcgacttctcgttgttgggctccgacgaccggccgctgacgaagaagcaactggccgaacaactcggcagcgatgcactgaccgatcgtccggtcgactatcgcgctgcgatcgatgcccgaatgttcgggctcggtgcccaacggtacgaccagttgatcaatctgattctgacacttcgccgtccgcagttggccaagaacctcgaccccaagggtctctcgcaggcgctgaccgacggtctgcgtccgctcgacgagcagctcgtgctcgaggcagcgcgctccttcagcgacatggaagaagtgggacgcgcactcgaaggactggcgcaggccgatcacgccgccaagaacttcgtctcggtctactccaaataccttcgggtgcaaacccgctcggatgtggagcaggtctcacgtcggctcgaggcagtgacccatgcaaccaccgcacacttcgccgcggccgcgctgaaggatcggcggctgctggaacgagcggcggcagaaacccggttcgacgaggccgaacgcgcattggatcaggccgtcgcagaccgcgagactctccagcgctcgagcgcgtacgagggcaagcagcaactggacgacctcgccgaatctgctgccaagctcgaagtgtcgacggcacagcaggccgaccgggcacggaaagcgcaagcagaactggaacagcgcaccgtcgaggccgctcgggcggactccgcactccgtgactccgttgccggcgtgacgcgcgcggaggaagagctgcagactgcagccgaggatgcgggcatcgtgtggacaccgctgccaggcacggctcgcagtgatcagatcagtaccgctcttcgcgggcacgccgaggagcgggacggtgacgtacgcgcggttcgtgaggcactggcaaccgtcgagaaggcgtcgacagaacgtgctcgcgcggagaaggctgcgacgaaggcgcgtgatcagctcgaggcagcggcggcggcggtcaccgaggccgaggcgaccgtggatctggagaaggcgcagttcgcctcgggcatgcgaacctggtggtcgaacacttcgtcggtgtacgcctccgcgggtatcacttccgctgcgttcgatgccctcgacgcagccttggcaggcatcggcgacgacgacgccccgagcctggaatcggtgctcgccgagcagaccgcagacggtatcgacgcgattcgtgcccggcaggcacaggcacgcgtcgacgtggccacgcgctcggccgaactgaacgcgctgcgcgacgaactgtccctggtacgagccgaacacgacgacgccccgccgccgttcgctgcgcggaccgacagccgtgcagatctctcgggcgcaccgctgtggcaactggttcgatttgccgacgtggtgtcccccgccgacgcggcggggatcgaatccgcattgcaggccgccaatctgctcgacggttggattcacccgaccgcggacttccccgtcgacgccgactcggagcagtttctttcggcactaccggcggccgcgaggccgtccggggcaacgttggcgtcggttctggaacccgagcccggaaccgccgtcctggaatcgcgaatcctcgatgtcctgaattcgattgcgttgcagcagaatcggtccgatcactcgggtagttccatctcgataggcgtcgacggtcggtactggcagggagtgcagcagggtcgccacacgaaaccggatgccgagtacatcggtgcaacggcgcgggctcgccggcgggaacaacgcatcaccgaactcggcggcgcgatcgatactgcaacggccgcgctcgagaccgcgacggccgacgagctggcagcccgcgagctggtgcaggctctgggcgccgccgccaaacagcttccccgtgtctcgtccatcgtgaaggctcaacgcgccgtcacggccgccgcaggagcgctgcgcacctccaaggatggttcggtagccgccgaccgcgaattcgatcaggcaatcgcggacctgtccgcgaaggagaagcaactacgcaccgtcgccgtcgctcatcgcacccctcacatcggccgtgacgtcgatgcccttgccgccgcgattcgccacttcgagcaccagggcgcggcggtcatccgcaagcgcagcgaccatacgcgcgagagcgagagagcccgcgaagcaaccaaccggctcgaagaagcaaccggtctggccgaggagctcgccgaggaagctgcgatagccgacgagaactatcgccaacagttgcaacgcctggagttgttgagcgagaagctcggtgccacggccgaacagatcgacatcgatctcgagaacgcacgcgatcgcatcgagaagtgccgcgccgagcagcgagcagcccgaaaagcggacaaggaagccggcgaagcgatcggcaaagccgagggagcctgcaacacggcgctcgaaagcctgcgcgccgccgtcaccgaaaccttgagcgatgcagtccggctggcgccgtacgcccgtaaggacctgctggccatcctcggcgtccaccagacgcacgcctggcctgccagtgactcggcgtggctgactgtcgaacagattctgtatcgagttcagcaggccgacggcccggacgacgaggttccggttctaccaccggtcgtgcacgcgctgcattcggcactcgacgaggcgacggcatcggtgaaagtgagtgactcgagccgaaagtcgacccgcacggcgctgacgagtgcgctgcaggagttcgactcgcaactggcggcatcgggtcaggactaccgtttgcagtgggatgcgccggacggtttgacggtggtacgcgtgcaggacgagcagggctattcgtcggtcggagacttcgccgaccgaatcggtgcggccagggccgaccaggaactgctgctgaccgagcaggagcggcgcattctcgaggatgccctgctgaccggtctggcgcagcagatccacgagcgcaccgtcgacgcacgcgagctgatcgcacagatgtccgccgagatgaagcaacgacggatgtcctcgggcaacactatcggcgtgcactgggtgctcgcggacaacttcgacgacggggcgcgggcggtgtccaaactgctggaccgcgacgcttcggcgttgaaccaggacgacctggccgcgatgcgcgcccacttcgcgtcggagatcaggattgcgcgtgcggcacatccggaacggtcgtaccccgaaatcctctctgcgacattggactatcgccgctggcgggtgttcgcgttcacgctcatcagcggggacggcagcgaggatcgcctgaccgtcgcccggcacagtgcgctctcaggcggtgagcaatcggtgtcgctgcatttaccactgttcgcggcagcgcatgtgatgctgtcgtccgccgatccgcactcccctcgtctgcttgcgctcgacgaggcgttcgccggtgtcgacgacaacggccgcagcgaattgctcggcttgagcgtgcaattcgacctcgacctgttcatgaccggctacgacctctggatcacatatgcggacgttcccggttgcgcgcactacgacctggcgcattcgacggccgagaacaccgtgagcgcagcgcttctggtgtgggagaacggcgaactgttcgccgagcacgacggcaccgacctagcggccgcactcggatcaccgttgacgcgccgcgtgccgacccgaaccgaaggtgggctggagtttgaccggtag

SEQ ID NO: 51412 - DNA, 1251 bp, Rhodococcus sp. Leaf278
gtgggctggagtttgaccggtagcggcgaatggcggggcagcgcggaattgtctgcgctgctcgatgctgcacgaaagaagttggagtccaactggcttcgggtcggcggcaacatcaccgtcgatctcagcgatgccccggagctgtggcgtctgtgcagtgctatctctcggtccaactccagtctgcattctcgggcgcggagcaccaagctcgacctcgagcggttcgacgtgtggctgagccatccgctcaacggtggcgccggattgatcgagactctcaccgagcaggcccagttgcaggacaagaagcgcatcgctgcggacaaggctcaggtgcgctccgacgcgctggatcgagccagggaggtactcggcggtggtaccgatcgcgagtggatcgagtactggatcgcctcgctgctcaatcaggacggcacgctcggcggccgcgtctccgtcgatgcactggcggtggcaacgcaggtcctggccctgcttccggtggacgggatgtctctcaccgagctggcggaactggccaccggtgataccaaggccctagcgggcggtggcgcagcgaagctcgtcctcgacgcactgtcgttgcgggagaacgtgcctcgacccgtcgacccggtgggcatcagggcgctgtgggaaacggccggggtgtcggtcgatgcactgtcgagtcgggtactggtcctcggttaccgcgtcgtcgagaaccacaccgtggctcgttggctcaacgacgcagcggatgaaggcgtaccctttcccgtcaccgtggacatgctcgcgcgcggcccgctcaccaacacctcgtcgacggtgttcgtctgcgagaacatcgctgtgctcgccgccgccgcccgtactctcggctcgggcagcgggagcgtgatctgcaccgacggccagccatcggcggcggtgcatcggctgctggcgtcgcgcgcccccggcaccacgatcgaatggcgtgccgacttcgactgggccggactgcacatggtgaaacgagcgatggaccgatacgacgcgtcaccgtggcggatggacgtcgattcctaccgccgcgcactggacgcgcgcaattccgaaccactgaagggacaccccacggacagtccgtgggacccggaactgagtgccgcacttcgtgattcgggtcgagcagtcatggaagaacgactgattccggatctactggcggacctacgcgtaggactcgacgactag

SEQ ID NO: 51413 - DNA, 1512 bp, Rhodococcus sp. Leaf225; identical to SEQ ID NO: 51406

SEQ ID NO: 51414 - DNA, 1338 bp, Rhodococcus sp. Leaf225; identical to SEQ ID NO: 51407

SEQ ID NO: 51415 - DNA, 4143 bp, Rhodococcus sp. Leaf225; identical to SEQ ID NO: 51408

SEQ ID NO: 51416 - DNA, 1497 bp, Rhodococcus sp. Leaf233
ctgggtgccgcgaatgcgttcgtggaggaagaccgtctcggtctcttctcgttcgccgtcgccgagaaaagatccgaatacctggcagtactgcgggcgttcgacaccgctcgcgcgaactacgtggtgttgctgcactcgggcgacgtcgccgacctcatcgctcgtagccccgggcgtcacgacgcgctgaccacactggacatcgcacccctgctcgatcaactccacgcctggggtctgctcgaacgcagctacgacggcacccgcgccgcgaccctcgccgaataccgcaaccggcacttcgtctaccagttcggtcaggccggctacaaggcctaccgcgcggtcgaggacgtgctcggtgcgcgcctggacgacgcctcgctgtcccggctggtgctccccgagctgctggccgacatgcacgagctggccgaggcgaaccgtcaggccgacggcgaccgcatctaccgcaagctcagcagactcgattcgacgttgtcggagatggcgacccgcgccgcccacttctatctggtgctgggcgacctggtgcgcaccaccgagatcacgcccgaatcgttcttggcgcacaaggatgcactgctcacgcacatgcgtgagttcagctccgatctcacccgctatgcccccaagttggcggaagcgatcgcactcgtcgagagcaccggcatcgaggaactcgtcgaccgtgccgcgatcagcgacgaacgagtctttctctccgtcgacgaacggcgagcggactggaccgaccgatgggccgggttgtcgcactggttcgtcgcggccgaatccgagctcagcgaatccgagcgcctccgcgagggcacgatgagcgcgatcgctgctgtgctgtcactgctgcggcgcgtcaccgaaactcggaagggcggtgtgagtcgcgagagccaactgcgtcacctcgccggctggttcgctgctgcccccaccgaggacagcgcacatgctctgtttcacgccgtgttcggcctcggccgaccccggcacctgtcgatggtccatcccgacgccgacatcatccccatgtcccgatcatggtgggaggcaccgccggtcgaaatctcgcgcacgctggccgagaccggacgcactccgactcccggcgttccagggcgggtacagcgcaacgacggcggcatcagacgactgcgcgagcagcaactcgagtcgcagcgatcacgcagtgccgcggcgcagtcgctcgcctcggccggaatccacgaccgcattctgaacgagcaggaaaccgaagtgttgctgagcctgctcaacgccgcgttgactgcccgggtacgcgtgagcggacgcacctcggactcgtccggatcggacagtggcgtgcgcctgacgctgagcgacagcgaccgttcgacgatcgtgcgcaccagccgtggccgattgcatctggaccgcctcgccctcgacgtcagtgaggtggcccgccggtga

SEQ ID NO: 51417 - DNA, 1416 bp, Rhodococcus sp. Leaf233
gtgagagcacgtgaaatctcctcgctcgctctggattcctaccagcgcgctgcccgagtcgcgttgtccaaccacctggtcaccgcgacgtaccccgatcgaatcgcgttaccgctgctgcgcaggtgggcaaccgaactgcgtgaggatctcctggagctgttcggctaccgcttcgaggtcaccgagacgaccgcgcgtctgttccccgtgatcgatcgtctcgacgacagtcaacccgcgcgaacgccgtccgagcgggtgttcgaccgccgcaggtacgcgtatctggcgctggcgcttgccgcgctcggtcgggccggaaaccagatcactctgtccgaactcgccgatcacgtggcgacggagtcgagtcaggtggacggcgtcgaactcacgaccgaccgcgcgagcgaccgagacgcattcgtcgacgcgatcggatggctggccacgcgtggtgcgatctcgctggccgacggcgacgccacgggctgggcgaacaatccgacggccggtgaggccctgtacgacatcgaccgatcggtggtcgtcgcgatgtttcggccgccgcgtgccgtgcagcacctgcgttcgattcgtggcctgctggccggctcggatgccccgatcgatcccgaggattccgatctcggacacatcgagtccgggcgtgaggcagacccgaaggaaacgctgcgtgcggtacgccgagcgttggtcgaacaccccgtcgtctatctcgacgatctcgacggagacgcacgcaccgccctgaccgcctcgcgcaccgtcgccgacgtcgagttgctcaccggtctcgttgccgagcgtcgcgccgagggcgtggccctcatcgacacctcgggacggttgtccgaccaccgctttcccagcaccggaacgatcgctcaggtggcgttgctcatcgcgggagaaatctccgatcgggtcgtggatcccgatgctccggcactgtccacgtatccgctgcctgcgagcgacttactcgtcgaacagctggacgacgcgatccccggcggcggaatcttcggcgacctggccgaattcggatttcccgccgatccgacgacggtcgagaactcggcggagcgcacacagtacccgctgatcgaggacagttggctggtctcggtcgtcgacgatctcgtggaccgattcggtcgcacgttcgcggcgcagtggcagaccgaccgggacggtctacgcatccgtgcgattgcgctgttgcatcgacttcgcttgatacacagcgtatccggcggcgtgttggtgctaccggtgatcgctcggtaccgagacgtgatggtcagcgtgcgtgaccgagccccgcaggactcgctcttcggcaccgaacaagcccccagtaccgatccatccgaagtagaggcctga

SEQ ID NO: 51418 - DNA, 4185 bp, Rhodococcus sp. Leaf233
atgaccgcacactcgaatcgctttaggcccacgcgcgccggaatcgtcaacctgtgggattaccgggatcaggagttctctttcgccgacggtcgattggtgctgcgtggtcccaacggatccggcaagaccaaagcgctcgaagtgctgtttcccttcgtcctcgacggccggatcgagccgcgccggctcaacccgttcgccggtgaagaacgaacgatgaagtccaacctgctctaccgagggcaggaaagcgcacattcgtacgtgtggatggagttcggccgcggctcgcgcgaggaccccgaatcggtgaccgtcggaatcggtatgcgggcgagccgccacaacgacaaggtgacccgctggtacttcgtggccgacggccgagtgggcgtcgacttctcgttgttgggctccgacgaccggccgctgacgaagaagcaattggccgaacaactcggcagcgatgcactgaccgatcgtccggtcgactaccgcgccgcgatcgatgcccggatgttcgggctcggcgcgcaacggtacgaccagttgatcaatttgattctgacacttcgccgtccgcagttggccaagaatctcgatccgaaagggttgtcccaggcgctgaccgacggtctgcgtcccctcgacgagcaactggtgctcgaggcagcacgttccttcagcgacatggaggaagtcggacgcgcgctggagggactggcccaagccgatcaggcggccaggaacttcgtgtcggtctactccaaataccttcgcgtacagacccgttcggatgtcgagcaagtctcgcgtcggctcgaagccgtgacgcacgcgaccactgcgcacttcgccgccgccgccctgaaggaccggcgtctgctggaacgggcggccgcagagacgcggttcgacgaggccgagcgtgcgctcgatcaggccgtcgcagaccgagaaaccctgcagcgctcgagcgcgtacgagggcaagcagcaactggacgatctcgccgaatccgctgcgaagctggaggtctcgacggcgcagcaggccgatcgcgcacgcaaagcgcaagcagaactggagcagcgcacggccgaggcagcccgggcggattcggcactccgggactccgttgccggagtgactcgcgcggaggacgagctgcagactgcggccgaggacgcgggcatcgtgtggacaccgctgcccggcacggcgcgcagtgatcagatcagtaccgcgcttcgtgggcacgccgaggaacgggacggcgacgtacgtgcagtgcgtgaggcgctggccaccgtcgagaaggcgtcgacggaacgcgctcgcgcggagaaggccgcaacgaaggcgcgcgagttgctcgaagcagccgcggctgccgtcaccgaggccgaggcgacggtggacctggagaaggcgcagttcgcttcgggcctgcgggcctggtggtcgagcaactcgtcgctctactcctccgcgggcatcacctccgctgtgttcgaggccctcgacgcagccctggcaggcatcggcgacgacgacgccccgagcctggaatccgtgctcgccgagcagacctcggatggtatcgacgcgattcgcgcccggcaggcacaggcacgcgtcgacgtggccgcgcgcgaggccgaggtgaaggcgctgcggggcgaactgtccgtggtacgagccgaacacgacgatgccccaccaccgttcgcagcgcgcaccgacagccgtgccgatctctcgggcgcaccgctgtggcaactggttcggtttgccgatgcggtctcccctaccgacgcggcgggcatcgaatccgcgctgcaggccgcgaacctgctcgacgggtggattcatccgaccgcagactcccccgtcgacgcgacgtcggagcaatatctgtcgccgctaccggtggccgcgaggccgaccggttcgacgctcgcgtccgtgctggaacccgagcccggtactgccgtccaggaatcgcgaattctcgatgtactgaattcgattgcattgcagcaggatcgaaacgacccctcggacagttctgtctcgataggcgtcgacggtcggtactggcagggagtgcagcagggtcgccacgcaaaaccggatgccgagtacatcggcgcgacggcgcgggcgcgtcggcgagagcagcgcatcgccgagctcggtgctgcgatcgattccgcgacagccgaactcgcgaccgcgaccgccgccgagctggcggcgcgcgagctggtgcaggcgttgaacgcggccgccaggcagctcccccgagtctcggccatcgtgaaagcgcaacgtgccgtcacggcagccgcaggcgcgctgcgcacctcgaaagatgcgtctgcagcggcagatcgagaattcgaccaggcgatcgccgacctgtccgcgaaagagaaacaactgcgctccgtcgccgtggcccatcgcaccccgcacctgggccgcgatgtcgatgccctcgccgcagcgattcgccatttcgagcatcagggcgcagcggtcatccgtaaacgcaacgaccatgcacgcgagaccgagcgggcgcgcgaggccaccaaccgcctcgaggaggccaccggactggccgaggaactcgccgaggaagccgcgatagccgacgagagctatcggcaacagctgcagcgtctggaattgctgagcgagaaactcggtgccacggccgaacagatcaacaccgatctcgacaacgcgcgcgatcgcatcgagaagtgccgagccgagcagcgagcagcccgaaaggcggacaaggaagccggcgaggcgaccggcaaggccgagggtgcatgcaacacggcgctcgaaagcctgcgcgctgccgtgaccgagaccctgggtgatgccgtccgactggcaccgtacgcccgcaaggatctgctgcacatcctcggcgtgcacgagacgtacacgtggccggccagcgactcggcgtggctgacggtcgaacagatcctgtatcgggttcagcaggccgccggccccgacgacgacgtcccggtacttccaccggtggtgctcgcgctgcattcggcactcgacacggcgacggcgtcggtgaaagtgaccgactcgagccggaagtcgacacgaacggcgctgacgagcgcactgcaggagttcgactcgcaactggccgcttccggtcaggactaccgcctgcagtgggacgcaccggacgggttgacggtggtacgcgtgcaggacgagcagggttattcctcggtcggagacttcgccgaccgcatcggtgcggcccgggccgaccaggaactgctcttgaccgagcaggaacgccgaattctcgaagacgcgctgctgaccgggttggcgcagcagattcacgagcgcaccgtcgacgcgcgtgagctgatcgcgcagatgtccgccgagatgaagcaacgccgtatgtcctcgggcaatacgatcggcgtgcactgggtgctcgcggacaacctcgacgacggggcgcgggcagtgtccaagctgctcgaccgcgatgcctcggcgctgagccaggacgatctggccgcgatgcgcgcacacttcgcgtcggagatcaggatcgctcgtgcggcgcatccggaacggtcgtatcccgagatcctgtccgcgacactggactatcgtcgctggcgggtgttcgcgttcacgctcatcagcggcgacggcaacgaggatcgtctgaccgtcgctcgtcacagtgcactctcgggcggtgagcaatcggtgtcgctgcatttgccgctgttcgccgcggcgcacgtgatgctctcgtccgccgatccgcattcaccgcggctgctggcgctggacgaggcgttcgccggtgtcgacgacaacggtcgtagcgaattgctcggactgagtgtgcaattcgacctggatctgttcatgaccggttacgacctgtggatcacctacgcggacgtccccggttgcgcacactacgatttggcgcactcgaccgccgagaacaccgtcagcgcagcacttctggtgtgggagaacggtgaattgttcgccgaacacgacggcaccgacctcgcagccgccctcggatcaccgttgacccgccgggtgccgacccgaaccgaaggtgggctggagtttggccggtaa

SEQ ID NO: 51419 - DNA, 1251 bp, Rhodococcus sp. Leaf233
gtgggctggagtttggccggtaacagtgagtggcgaggcagcgtcgaattggcggcgctgttggacgctgcgcgaaagaagttggagtccaactggcttcgggtcggcggtaacatcaccgtcgacctgagtgatgcgccggaactgtggcgtctgtgcagtgccatctcgaagtccaactccagcctgcactctcgggcacggagcacccggctcgatctcgagcggttcgacgcatggctgagccatccgctcaacggcggtatcggtctgatcgacaccctcgccggtcaggccccgttgcaggacaagaagcgcattgcggccgacaaggctcaggtacgcgccgatgcgctcgaccgggcgcgtgcggcgctcggcggtggtaccgatcgcgagtggatcgagcactggatcgcgtcgttgctcaatcaggacggcaccctcggcggccgcgtcgccgtcgacgcactcggggtcgcaacgcaagtactggcgctgcttccggtggacgggatgtcgctcaccgagctggcggaactggccaccggtgataccaaggccctcacgggcggcggtgccgcgaaactcgtcctcgatgcattgtcgttgcgcgagaacgtgcctcgacccgtcgatccagtggggatcagagcgctgtgggaaacggccggagtgtcggtcgacgccgtgtcgagccgggtactggttctcggctaccgcgtcgcagagacccacacggtggctcgctggctcaacgaagcagccgacgagggcatgccctttcccgtcaccgtggacatgctcgcgcgcggccctctcaccaacagctcgtcgaccgtgttcgtgtgcgagaacgtcgctgtgctcgcggccgcagcccgctctctcggctcgaactgtgccagcttgatctgcaccgacggtcagccctcggccgcagtgcatcggctgctggctgcgcgcgcccccggcaccacgatcgaatggcgtgccgacttcgactgggccggaatgcacatggtgacccgcgcactcgcccggtacgacgcggtgccgtggcgaatggacgtcgactcgtaccgccgcgcactggacgcgcgcaactcggaaccactgaaggggcatcccacggacactccgtgggacccggatctggctgctgcactgcgtgatacgggacgagcggtcatggaagaacgcctgatcccggatctgctgacggatctacgcctggggcccgcggactaa

SEQ ID NO: 51420 - DNA, 1512 bp, Rhodococcus sp. Leaf247; identical to SEQ ID NO: 51403

SEQ ID NO: 51421 - DNA, 1332 bp, Rhodococcus sp. Leaf247; identical to SEQ ID NO: 51404

SEQ ID NO: 51422 - DNA, 4143 bp, Rhodococcus sp. Leaf247; identical to SEQ ID NO: 51405

SEQ ID NO: 51423 - DNA, 1506 bp, Nocardia sp. Root136
ctgcggttgttctcgttcgcgaccgccgagaagcgcgccgactacctgcgggtgctgcgcgccttcgacagcgctcgtgccgcctacgtggtgttgttgcacgccgacgacgtcgcggagtggatttcccgggtcgaggcgggcggccgggtcgaggcggccgcgggtgtcccactgcccgcggtcgagatcggccccctgctcgagcagttgcatcgctggggtgtgctcgaacgcagctacgacggcacccgggcggcgacgctggccgagtaccgcaaccggcactacgtctaccagttcgcgcaggccggtttccaggcctaccgagcggtggccggggtgctcgcggcccgcatggaggacgcgtcgctgtcgcggctcgtgctccccgagttgctcgccgacctgcgcacgctcgccgcagccaaccgcgacggcgatgccgagcgggtctacaccaccctgcgcaggctcgacgccgcgctcaccgacatggccgcgcgggccgcgcatttctatctgtcgctgggcgatctggtgcgcacgaccgagatcaccccggaatcctttctcgcgcacaaggacgcgttgctggcgcacatgcgggagttcagcatggatctggcccggttcgcgccgcgcctggccgcggcgatcggcgaggtcgaggagaccggagtcgagcagttgatcggtcgcgcggccgggtgtgacgagcgggtgttgctgagcctggccgagcgcgaagcggattggcgttcgcggtgggacgggttgcgcacctggttcgtcgccgcgggcaccgagtcgtcggaaacgtgtgaggccgaccggctgcgcgaggcgacgatgagcgcgatcgcagcggtgctgtcgctgttgcgccgggtcaccgagacccgccgtggcggcatcagtcgggagtcggcgttgcggcacctggccgaatggttcgtcgccactcccaccgcgggcggtgcgcacgcgctctacgacgcggtgttcgggctcggcaagccgcgccatctgtcactggaacatcccgatgcggagctgatcccgaccagccgttcctggtgggaagcaccgccgttggagatctcgcgaaccctcgccgagaccgggcgcgcacccactgcgggcgcccccgcccggatcgcgcgcaacgacgcgggcgtgcggcggttgcgcgaggcccaactggcggcgcagcgggaccgggccgcggccgccgcctcgctgtcgaagggcaatgtgcacgagcgggtgctcgatcagcgcgagacggaggtgctgttgcgcctgctcgacgcggcctccaccgcctgggtgccggtgagcggaaacgtcgacggcacaacaggttccgacaacggtgtgacgttgacggtgcggccgtgcgacgggtcgacggtgatccgcaccgcggtggggctgctgcatctgaacaatcgccgcctcgaggtgcgcagcggttcggcgcgacggggggtcgcgcgatga

SEQ ID NO: 51424 - DNA, 1380 bp, Nocardia sp. Root136
atgaagcggcaacggatcgacgcgctggcactggacagctatcagcgggcggcgcgggtgatgctggccaatcacctggtcacccgcgtctaccccgatcggatcgcgttgccgttgatccgtcgctgggcgaccgagctccgcgaggacctggccgaattgttcggctaccgactggaagtcaccgagaccacggcccggctctacccggtccacgatcgactcgacgacgcccggcccgcccgcagcgtcaacgatcgtgtcttcgaccgtcgccgctacgcctacctgtcgttggcgctggccgccctcggccgggcgggcgaccagatcaccctctcggaattggccgagcacgtcgccgattacgcgagccggatcgagggcctcgacctgtcgaccgagcgggccgccgatcgcgatgccttcgtcgacgccgtcggctggctcggcgcgcgtggcgcgctgaccttggccgacggcgacgcggggggctgggccagcgacccggaggcgggcgaggcgctctacgacatcgaccgaccggtggtgttcgccctgttccggccgccgcgagcactccaacacctgcacagcgtgcgcggtttgctggccgatgatgccgaccaggcatcgcccgatcaggcccgccgggttcgccgggcactggtcgagcgcccgatcgtctatctcgacgaactgtcggacgccgagcgggcgctactgggccaggaccggctgatcggcgaggtcgaatactgcaccggcctgcgggccgaacgccgggccgagggtgtggcgttgatcgacacctcgggtcgactgtccgatacccgcttccccggcaccggcaccctggcacaggtggcgctgctactgatcggtgagatcgccgacgcggttctcgacatcgacaacccggtcgcccgtcgtcccggagcgctcacccctgacaacacgttgctcgagcaactcgatgcgtccattcccactgcgggcgtgttcgctccgctcgccgacgacatcgaaataaatactgccgcaacagatttcgatgacgatgagaccgattctcccgaaccggtcacctatccgttcctggacgacgcctgggtacgcgccacggtcatcgcgctcaccgaccgctacggcgcgaccttcgccgcgcaatggcaggccgatgtcggagggctcaccaccgaggtgctcgcgctgctcgccaagctgcggctgatccggccggtcgacgacgggctgctggtgttgcccgcactggccagatatcggggcgcggtggtcaccgtgcgagtgcgcaaggccgaggaattgttcgtcaccgccgccgataccgacggcagcaccggagaggcaggggtctga

SEQ ID NO: 51425 - DNA, 4353 bp, Nocardia sp. Root136
atgtcactcattcacggcggagtgcggttcgtcccgacccgggcgggcatcgtcaacctgtgggactaccgcgaccaggagttcagtttcgccgacggccgtctggtgctgcgcggacccaacggttccggtaagaccaaggcgctcgaggtgctgttcccgttcgtgctggacgggcggatcgaaccgcgcaggctgaacccgttcgccggtgaagaacgcaccatgaagtcgaatctgctgtaccgcaagcaggagtcggcctactcgtatgtgtggatggagttcgcgcgcggcagctgggacgatcccgaaaccgtcaccgtcggcatcggcatgcgcgccacccgctcctcggacaaggtgacccgctggtacttcgtcgccgacggccgcgccggggtggacttctccctcatcggccccgacgaccgtccgctcacccgtaagcaactggccgagcagatcggcagcgacgccatcgtcgaccgtcccgtcgagtaccgcgcggcgatcgacgcgcgcatgttcgggctcggcgtgcagcgctacgaccagctgatcaacctgatcctcaccctgcgaaggccccagctcgccaagaacctcgacccccgtgggctctcccaggccctcaccgacggccttcgccccctcgacgagcagttgatcctcgacgccgctcgctcgttcagcgatatggaagaggtcggccggaccctcgacggcctcgtccaggccgacaccgccacccgccgtttcgtcgacgtgtaccgcaaatacctcgcggtacaggcgaaaaccgatgtcgaccagctccgtacccgtctcgatgccgtcaccaacgcctccaccgcgctcttcgccgcgacggccctgcgcacccgtcgcgacaccgaccgcaccgaagccgagaccagagccgaaaacgccgatcacgcctacgaacaggccatcgccgaccgcgagaacctccaacgctccagcgcctacgagggcaaacagcaactcgacgacctggccgacgccgtccgccgcctcgaaacctccgccgcggcccaccgcgacaagtccgccgaagccgcacataccctgcaacgccgcgccgaagaagcctcccgggccaccgaagcggtgcgcaccgcggcagccgccctcgtccgcggcgaagacgcggtccgcgccgccgccgaagaagcaggcatcgaatggactccgcccagcgccgaaggccgcggcgaccagttcaccgtggttgtccgcggccacgccgaagagcgcgacgccgatgtccgcgccgttcgaaaggcactgggcaagtgggaaaccgccgccgcggaccgcacccgttccgaacgcctcgccgaacgcgcgatcgaactgcgtgactccgccgccgcggaagtggcccacgccgaagcggcggttgccctggcccgcagcgaatccgcggcggccctgcgtacctggtggcacaccaacaccgaggttttcgcaccggtcaccgaactcgaaggtgttcccgaggaagacgcccgtagcgggtcggccgacgccacggccgaccgaggtgccgcaggcttgttcgaggcgctcgacaccgccttggccggcgcgggagtggccgacattccctcggcatcagaggttctggccgagcgctgcgagccgctgcaggaacagattcgcacccgccgccaggaggctcggtcccgcacgagcgctgctgccgcccgcctcgacgcactggctgccgaacgaacacagatcgccgcccagcgcgacgacgctcccccaccgcaccccaccagaaccgttgtccgagaaggacttccgggtgctccactctggcagctggtgcgcttcgccgactcggtgtccccgcaggatgcggctggtatcgaagcggcgctgcagtccggcggtctgctcgacagctggatttgcggcccgaccttgcccgtcgacatcgactccgaccacttcctgctcccgctaccggtcgaccagcgtccactcggccgtacgctcgccgatgtccttgtcgtcgaagaggattccgccgcgctcacggttcccaccgagactgtcgccgccgtgctggcctctatcgccgtccacgacgccgacccggacccgacgacgcgcgccacggcgacccccggcgcagcgtgcaccggggccacgctcaccgcgctgaccacggccgacaccccgcaggtcgtggtcggcctcgccggatctttccgacagggcgttctcgtcggccaccaccacaagccagaggccgagttcatagggacgaccgcgcgagcccgcaggcgtgagtcccggctcgccgagatcgaggcggcgatcgaggccgccgctgccgagcacgacgccgcgcgagccgaagacgcttcggccactgcgcaattggccgcgttgtcggcagccgcgaaggctctgccgcgcccgtcggcggtgacctccgctttgcgtgccgtagccgagacggccggtctgatgcgttcacgtgtggaggccgcgacgcaggccgagcgcgaactcgaccaggccgtcgccgaagtcgcggccctggacaagaaggttcgcgccgccgccgcggcacaccgaaccccccgcgaggcgcgcgaactcgacgcgctggccgccgctatccggcatttcgagaacaccggcaccggactgctccgcctgcgcgccgagcacgagcgggaacgtgaacgcgaacgtgagggcgccgaccggcacgacgaagcgcgggcactggccgaggcgttcgccgaagaggccgaggcggcccggctcggctataccgaacagcaacgcaaactcgaaacgctgcgagaggcgttgggcgccggcgccgccgacatcgaccgtgacctcgagctggcccgtggcgccatcgaggccgccaaggccgaacagcgggccgcgcgcaaggccgccaatgccgccatcgaggcggtcggcgacgccgaggccgcctatcgcaccgccaacgaagcgctcgccaccgcgctcaccgaggtgctcggcgaggtgcgttcgctggccccctacgcccggcccgacctgctgagcctgctcggcgcctcggtcgaacaccgttggcccagcagcgatgccgcgtggtccaccccggaacagctgcagtaccgcatcgtcgccgcgggcccggaaaccgacccgatggtgctgcccgacgaggtggcggccctgttcgccgacctcgacaccgccaccagccaggtgcgcgccaccgaggccggtcgcaagtccacgcggtccgcggtgaccagcgcactccaggaattcgacgccgcgctcaccgcatccggtcgcgactaccgcctgaactgggacgccgccgacgggctcaccgtcgtcgccgtccacgacgagaacggtcaggccgcactcgccgacttcgccgcccgcatcgacgccgcccgccgtgaccaggaactactgctcaccgacgccgaacgccgcatcctcgaagacgcgctgctcacgggcctggcccagcagatccacgaacgcaccaccgacgctcgcgaactcatctcccgcatgggcgcggagatgaagcagcggcggatgtcgtcgggcaacaccatcggcgtgcactggatcctcgccgacggactgtcggagtcagctcgctcgatgtgcaaactcctcgaccgcgacaccaccgccctcagttcggaagacctcggctcggtccgcgcccatttcgcggccgagatccgcgccgcccgcaccgcgcacccggaacgctcgtaccccgaaatcctcgccgccaccctcgattaccgcacctggcgagtcttctccttcaccctcatctccggcgacggcaccgaggacaaactcaccgtcgcccgccacagcgccctctccggcggtgaacagtcggtctcgctgcaccttcccctcttcgccgccgcccacgtgatgctcgactcggccgatccgcaggctccccgcctgctggccctcgacgaagccttcgccggtgtcgacgacaacggtcgcagcgaattgctcagcctcagcgtgcaattcgacctcgacctgttcatgaccggttacgacctgtggatcacctacgcccacgtccccggctgcgcgcattacgacctggctcattccaccgccgagaatactgtcagcgcgacacttctcgtctgggacagcggtgagctcctcgccgagcacgacggcggcgacctcaccacggcactgggctcccccaaccgccgtcgcgttcccaacaccatcgagggcgggttgacactggagggcatgcccggcgaaccggcatcggtgggctga

SEQ ID NO: 51426 - DNA, 1560 bp, Terrabacter sp. Root85
gtgacctccggtgcactcgatcctcgcgagcgtcaaacgctcggtgcgctgcgctatgccgtcaacgaagaggcagcgagctacctcgccatcatgcggctcttcacctcaggcatgagcggcttcctctcggatcaatcggctgccgacatcgcagagcgcctcgccgcagacggcatcgaactcgaccaggacaccgtcgagcagcgcctctcgtacctcgtcgagcacggcaacctggcgcgcagcccacgagagaccgaagcccggagcattcgggaatacctcaccaaccgagcgcgctatcaactcacacagcgaggcgaactcgtccaccgccaggtcgaggagcttctgcagcactcggagtcagcgcgcgaggtgtccagcgaagtcctccccgtcatcctcaccggcatcgaagacttcgtgaacaacgcgcgacgcggattcgacgacaccgacccgcgtgagctcgccggacggatcaccacgctgtttgcccagttcgaggtactggtcaactccacgcggcagttctactcctatctcacccaagtgctcacccgattcgacctcggtcgggacgagttcgaactgttcaaaaccgcgctcctggactacctctctcggttcatcgacgagatctcccggcacatgccccaagtgggcgaccggctccaagaactccgtccgaacctcgcggaactctgcgagcgtgccaacacgggagagcggctcgtcggcatcgacggcaccgcagcacgtcgggctaccggcctcgaaccgggcgactgggaaagcctccacgcgtggttcgttggttcgcccggccgacgttccgatgccgacaacgtccgggcacttgccaccgacgcaatgcgatccctcctcgtgaacctcaggcggatcgccgccggagcagaccgtcagcagagccgatacggcgatctcacccgactagccgcatggttcgacaccagctcggacgaggacgcccatgcactgtgggcagcagtcttcggtctctatcccacgcgccaccttgccttcaaggccgagtcggacgacgaaccaattccagccacccagagctggtggaccgctccggccgccgaagtgcccgtcggacttcggatccacggcgaccgcaccgcgcgcggacgggcaggagcacgcgtcgacttcaccgcggccaagaacgcccggctcgcggagcgcgccaggcaacagcggcgccgcgaggcagccttgcgcgaactcgccacccatgcaggcaccctgcgagaagcccgcgtcagcgatgacgcacgcgaggtcttcctcgacctctactccacggcactcacgggctacgggcgccccctcgcggcaggtgcgactgccgaaacgacaacgcccatcggcccacatcggctgacactcgccgtcgagcgtgccccggggtcgactgtcgccatcgccagccccgcggggaaactcgttctccgcgacatcgaaatcagggtcagtatcgccgccgagtccgatggtcaaaggcagatgggatccggcgcatga

SEQ ID NO: 51427 - DNA, 864 bp, Terrabacter sp. Root85
atgatcgacgaacttgtcgcgggcgtccggtccgcggcagtcgacgccggagtagatgttgacctcgacgcactgtcggagcgacgcgtacttcacgccgcgctgatcgcgctgatccatatcggcgtggtgagcgagcgcgacggcgacctggagcactgggccgagcgacgcaccgactcattgctcgacgttcaccgcgaccgactggccgtcctcgtcgcagcgcccctaagccgatgcgcgacacccgaagaagtcttcgaggacgcgtcgctcccgtcctcggccgggggctcccgcgtcccgatccgccgacgcctcgtcgagcaccccatcctgtccgtcgacggcctcaccgacgaacaacgtggctggtggcgccggaacaggcaccgcgaggtcgagtggttcagcagtactctaggtctcgacctggagctgcgcgcagaaggtgcaatcgccatcgacccgagcggagagctgaccgaccgcgcatttcctggcactggatccgcagcccacttcgcactcctgctcctcgccgagttggtcgaagaggtgcgctccgacaaccagactgacccaacttcaggcccgtgggcacgcctggcaacctcaaccgcgcgaacggccggcgacaaagtgttccaggcatggaaacgcggactccgcaaggaacatcgcgagaacccagacgccgtcttcgacgaagcgatcgagatccttgccgacgtaggactcgtccaacgagacgcagacgggcttcgcgtccacgccgccgcagcccgctacgcacccaaagcgcagctcatcgaggcacagcaggctgccccgacccttttcgacgaggaccactcatga

SEQ ID NO: 51428 - DNA, 4065 bp, Terrabacter sp. Root85
atgaccacaaccttcgtccgttccgcggtacgggagacagccgacaccgacaggcggtttcggctcagccgcgccggcatcctcaacgtctggcagtacgacgaccaggtcttcgacttcgccgacggccgcttgctgctcagaggagccaacggcgccggaaagtccaagacactcgagatgctgcttccgttcgccctcgacggcgacaaggccagaatcacagcctccgccaagcaccacaccagcctcctctggctcatgacggacggcttcgagggcaacgcacgggtcggctacatctgggtggagttcctccgcaccgacgacgccggacagccggaggcattcacctgcggcatcggaatccgagcatcggaatcccaacggaccgccactgcctggcacttcgccacccaccgccgcgtcggacacgaccttgccctcgaagacgcgggcggaccgctttcgcgaggtcgtctggaggacgcaatcggagctgacggccaagtcttcgagaaggccgccgcgtttaaggaacacgtcggtcgcacgctcttcgggctcgacccgagccagtacgacgaggtgctccggcttctctactggctccgacagcctcaggtcggggaagacatcgaccccggcaagctggcccagtacctctcccaggccctcccacagatcgacgaactggccatccgcaaggcaggggacaccttcgacgaactggttgccttcggcgagcagatcgaacgtcgcgcctcggcagcggaagctctctccgtcctcgctgacgcatacgccgactacgcccgagcagccgttgcgcaacgcgccgccaagctcgcagagatcctcacgaccgagcggaacctgcggcggcaactgagcaaggcagaagcgacgctccaacgcgtcacaaccgaacgcaaggaagccgaggactcgctcaagcaatcaaccgccgatgctgaggctgccggaacgcggctgcgtgctctgcaggagagtccagaagcacgggatcagcgcagattgagcgacttggccgaacgcgccgaacgggaggctgccgagtcgaagcgagcaggcgaacgggtccaacgacgccgcgaggagcacgggcgcaaggccgaggcacttgccattgccgcccaacagttgcgcgagatgacccgggcctttaccgacgaactggccgacacagttcgccgacatcaggagtctgtgcccgattcagtcatggtctcgcccgtgtcgttggtggccatcgacctcaccaaccatgccgacgtcgcagccctcggttccgggttagacgatgcacgcttgacgatcacgaaggccgacggttcggtcggagttcgggccgcggcagtcacagcggtagttgaggcaacggcacgatacaaggacgcccggcgcattgaggaagaggcgcagcggcgggccgacgaggccgagtcccgctgggaggacgcccgacagcgacgctcggcttcggagggtgcggcgatccaaagcgagatcgactttcgcgcatcactgaccaactgggcgggacttcccgaagcagtgcacgtggacctgccgacggagttcgacgcagagacgctcgacgccttccccgaactcgttcgaaccgccgtgtccggcccgctggccactcttcgcgctgagcttcagagcgagtccacgaagcgcgacaacgcggacgtgcaggtccgagccttggagcagaagcgaagcgaagtcgaggccgaacgcgatcctgcgccgccgcaaccatcgctccgtcgaactccgcggccagacggccactccttgtggcaggtcatcgacttcacgaccggactcgacgagcccgttcgcgccgccattgaagcggcactccagtccgcgggcctcctcgacgcctggctccgacctggcggccgacttctcgaccccggactgcacgacacattgctcgtaggtcacacgccggcaagcggaccgacgttgtccgatgtgctccacgtagacctgccggccggctccgatgtctcggtcgaggatgtgcgtgctgtgctcgacgcagtccacctcggtgacgaccctgacgcagaggctgccatcggcgccgacggtacgtggcgcctcgggccggcacacggacgagccgcaaaggaggcgccgcagtacatcggagcaacggctcgggcacacgagcgagcacgccgcctcgccgagatcgaccaagaactccaacgccaacgagacacccgagacatcgcgaaggagtctgccgaacgggcgggaggcacgatcgcggcgctcgactcctgggtgctcggccgccccaccgacagcgggctgcgcgaagcatggactcgcctaacggaacagatcgaagcggagctgcgcgaggagttggccaatcgcgacgctcagcgcgaggcccacgggcggcgtgacgagacagcccaagcacactcctcactcactcgacttgcccaagagcacgaccttcccgtggacagttcctcactggcagctctcaaagaacggctggatcacctccgcgccgatctggacgctctggggaagctaataccgcacctgcgccgcaacctcgaccgatggtcatcagatgcggtgtccgtcgatgaggcgctccgcgagttggaatccgagaaggaagagcacgccgcggccgtcgatcgcgctggccaaacccaggccgagctcgacgccctccgtgaggcggttggtgcctcggtgcaggagttggagcgcaagatcgctctcgcaagggagtcgaaggcatctcacgaggcagccaagaagacggccgacacgcgagtacgcgagctagcggaagcgttgggcgaagcacgtagcggtttgacgaccgcacaggagcgcctcgcatcccacgccccggcaagagccgaagcactcgcatggtttgcgcaacttgcccaagcaccaggactccttgccgccgccgaggtggcttcggctgaaccattcctccaggcagagaacatcgttggcgacgcacccatcccagactccatcacgcaaatagttcgcgaactcgccgacccatcgactggggacatcacacgggctaccgaccgtgtgtgggccgctcaccgcgacgctgagagcggccctgcggccgaccaccagctcgcgatggcacgatacggcgacctccttgccgtcacgggacgagacgacgcgggtgaggcccccgtggtggtaatcgcagccagagttaccgccgcggtcgagcacgaccggacactcttgaccgaacgcgagaagaagcagttcgagcaacacatcctcggcgaactcggagacgctctgcgagcctgcaggcgcgacgcagacgaactggtcaccgccatgaacgacctcctcggtgaggtgcgcacctctcaaggcatccgactccgtctgaagtgggacctccgcgacgacatacccgctgaagcgcgcgcggccgtcgatctgcttgcgcagccagtcggcgccctcgttccggaagagcgagcttcgctgcgcgatgccctgcacggactgatcgagacttcgcgaacgttgaatcccgaactctcctacagcgagcatctcgggtcggcgctggactatcggacctggtcggagttctcgatccggtacacgaggccggagaagtcgggcacttgggaacgcctccaccggcgttcagccctctcccagggcgagcagaaggtgctctgctacctgccgctatttgccgccgctgcagcccacttcacgtcccttgccggtgcagctccacacgctcctcgccttgtacttctcgacgatgcgttcccgaagattgacgtcaggacccacccactcctcttcggcttgctcgtccagctcgacctcgacttcgtcatcaccagcgaacggctatggggatgccacgacactgttccgtctctcgccatctatgaagcgttgcgtaaccccactcagcgcggcattgcgcagtacgaatcccgttgggacggccgaaccctccattcgatcggatga

SEQ ID NO: 51429 - DNA, 1029 bp, Terrabacter sp. Root85
gtggatctcgccgacctggatcagcggctgcgcgaccgctctggaatgggcgggttgctggaggtcctgaccgccatccacggcgaagctcccaaggatcgacctgccgccagggcgacaaggaatgctgcacgtcagaggcccttggacagagcggccgagttggtcgacgctccctgggccgatacctggatcgaaggtctgcggcgcaccggccttctgacggccagagaggacgcgctccgcatcgtcgaggatgcggccaaagtcctcaacgagctcgtcgctccttcggttcgcccgcagtcccgcgtcgagctcgctgcccggttgttgggcaacgcccacgcattggatgccgatcgcgtgctgcaccgcgttgtcattcgcggattggccgccgctgccggcgtgggtgtgcctgaagcaaccccgggtgtcgtcggcctgtggtcgaggttcgggatcgagccagatcttctctcgcgcacatgcctggtccttgggcttggcgcgccgggcgtagccggggaaagactggggctcgcggctgagtcgggggacccggtccacatcaccgagtgggacctgcgtcgattgggcgccttcgatgtcggggaccgctacgtgctggtctgcgagaacccgcgggttctagaagcgatcgccgagaccggcgacttgggtcacgttgttgtctgtacgtccggtgagcccaatctggtcgttacggagatcctgggacgcctccacgagggaggcgagcacctgcgctaccacggcgacttcgactggcccggaatcgggatcgccaatcgcgtcagagagaacttcggcgcggaaccatggctcatggcggctgacgactatgttgctgccgtgcgccgggagaaccttccgctcggaccgcacgtcatcgagccgacgtgggacgccgaactcggagcggcgatgcgtctccacggtcgggcagtccacgaggagtcgatgctcgctcagatacttgggcacctcgccacgtcgacctga

SEQ ID NO: 51430 - DNA, 1617 bp, Kitasatospora sp. Root187; identical to SEQ ID NO: 51400

SEQ ID NO: 51431 - DNA, 1329 bp, Kitasatospora sp. Root187; identical to SEQ ID NO: 51401

SEQ ID NO: 51432 - DNA, 4215 bp, Kitasatospora sp. Root187
gtgagccgtgaactcgggaccgctggagcaccgcacggctccggccggtaccggctgcaccgggccggcatccgcaacgtctggcagtacgacgaacaggagttcgcgttcggcgacgggcggttgctgctgcgcggcaagaacggcgccggcaagtcgaaggccctggaactgctgctgccctacctcctggacggcgacgcccgagcactcgacgccaccgggaccggccggaccacgctcacctggctgatgctcgacgggttcgagcagaacaaccgactgggctacctgtgggtggagttccgccgcatcgacggcgagggcgaacggttcctgaccctcggcgccgcgatccgcgcttcgaagtccgccaacaccgccaagccgtacttcttcaccaccaccctgcggatcggccacgacctgcaactggcggaaggcggacagccgctgccgctggaccggctgcgggcgattgtcggcgccgaccaggtgcaggaccgagccgccgaccaccgggtgcgggtggcccgggagttgttcggcatcaccgacagctcccggtaccgcaacctgacccagctgctgcaccggctccgccgccccaccatcggcgaccggatcgagtcgggtggcctggtcgcggtgctgggagagaccctgcccgggctggacgaagaggtggtcgacaaggtcgcacgcaacctggacgacctcgacaacgtccgggacgacctcggccgactggagaagaccgacgccgcactcggccagttcctcggcggctaccggggttacctgcacggcgtgttgcgccgcaggaccgcccgggtcggggacgagctggggcggctgggcgagcggcgcaaggcggcgggtgacgccgcgaagctggtcggcgagctgacggagggtgaggcggtcgcggcggagcagtgcgaccggctgcaccaggagtacgaggatgccaaggcggagctggaggcgctgcgcctgagcgccggctaccgcagcctgcaggagctgggcgagcgccggagtacggtggcggcgctgcggacagcggcccactccgccttcgccgcctggcagctcgctcatgacgctgcggaggctgccggcggcacggtgtcgctcggagccgaccgggtcggcagtgcgctgcgccgactcggcgctcagcacaaggagttgggcgaatccgccgaccgcgccgggatcggccgggcccacctgggtgaggcggcggcagccccggacaccgtgctggcgggcgccgccgagacggaggtcaccgatccggacggcggtggtctgctgctccgtcgggagcgggtccgggccttcgagccgacagccgtggtcgaggccctccgcagctggggcggccaactggccgcagcagaacccgtggtgaggacccgtcggcgggcggtcggtgaactcggcgggctgctggtccgatcccgggaggccgccgaggcagcgcgcgaggcggatcgcgagcgggagcgcctcgaaggccaggccgaggatgccgctgtcgagaccgagcggcagcgccggctggtcctgaccgaaggtgacttgtacgtcgccgaggtgtccgcctggacggaccgcctggagagcctggccggggttgcactggcggccgttcgcgcagtggtggcccgggacggggcggcggagaccgtgttcgccgaacgggctctcccggccgagatcccggaggaggtggagaccgcagccgaccaggccctcaccgtcgcggtcgagcagctgtcggaggagcgcgacagcgcgcgactccaggtccacgacctctccgcagccatcgcctccctggcacgggagaagggcgagtgggagcggcgcgcggaccctgagccgccccgctcccgcttccgggatgccgagcggactccggccaccggcgcaccgctgtaccggctggtcgacttcgcggacggcataccggccgccgaccaggcgggcctcgaagcggcgctcgaagccgccggcctgctcgacgcctgggtgaccgccgaaggatcggccgtcgacccgctgacccacgacaccgtgctggcccccggcggggcagcggtcttcggccccacgctcgccaccgtgctgcgtcccgtcactgcacctggcggtccggtgacggaccgccaggtggcggaactgctccgatcgatcgccctggctccgccgggcacaccgttcgacccggccgggtcgagtgcggtgagcccggacggtcggtggcggctcggtgcggcccagggtgcgtacgccaaatcgcaggccgagtacgtcggcaccgaggtccgggccgagacccggcggcggcggatcgccgaactcgccgaacaggtccgggccgagcaggatcggctcagccgggccgagacccggctgcgagaactgacggaccgtctcggcaagctgaccgcagccctccggggccggcccagagcccagggcctgaccaacgcctgggcccacctgaccgccgccgagcgagcgcaatccgctctcggccgggccacggcggacgcggcgggtgcggcgaaccaggccagggcggtgagttcggaggcccgcaggcaggccgaggcagtggccaccgcccacgccctgccggccgacccggaggccctagacgccgtccgcgacgtcctgcgtgacctggccacgggcctgacccggctccgtgaggacgtccgctccgccgaggatacggccgtcgcccacggggaggagcgccgaggctacgagcgggccggggcgcgcctgctcgatgcgcagggcgggtatcagcggcagcgcggcgagctgacctccgcccggcgggcgctccgcaccctggaggaggccgtcggcacctcggagcagcagctcctcgaacaggaggagcggatcagccgtcacctcgccgctgtctccgccgaactgccggaatccgagcgggagttggcgcagctccacgaccggcgggtacgcgccgaacagggtgcggaggtcagccgttcagcgctcggcacccaggaggccgaagtgatcgactccggccgcgccctgcggaccgcgctcgccactcccgaggtgctacggggcgcgggcctggccgaccgggccgccgaactggccgccgccgacccggcgcacgaggacgtacgggctcggctcagggccctgcaggcgctgacggaggtctgccgagccgccctcgacgccgaacgccgggacgtctccggcaccaccctgctgaaccgtttcaacgagctgcgcgaccagctggccggcggctacgacgcagccctggaagaactcgacggcatcatggtctgccgcctggtggacgacaccggccagcacgacgtcgccctggtcggcgagcggatcgccggtcaggccgccgaagcccgttcccgtctcaccgaacgcgaacgcgatgtcttccagcgcttcctcaccggcgaactcggcgacaacctgtcccgtcaagtcctcgccgcaggcgccctggtggcggcgctcaacgagaccctgcgctccgtacgcacctcgcacggcctcggcgtcgaactcgactggcggctcgccgacaccgcggacgccgatgtccgggccgccgtggaactcctgcgcagcccgtccggcctgcgcacccgcgagcagtccgaacagctcagggaggtcctgcaacggcggatcgaggacgcccgcagggccgaacccggggccggctacacggcccacctgcggaccgcgctcgactaccgcacctggttcacctttcagccctgggtcatcgacgaagccgcagccgtacggcgccgcaagttctccggccgtaccggcctgagccagggggagcagcgcgtgctctcctacctggtgctcttcgccgccgctgccgcccacttcaccacccttgcggagtcggccccgcaggtgcccagactgatcctgctcgacgacgccttcgccaaggtcgacgaaccgacccacgccaggctcggccggatcctggtcgacctcgacctggacttcgtcctcaccagcgagcggctgatggggaactggcccgacgtcccgtcactccacatctacgagtgcctgcgcgacccgaaccaccggggcgtcgcaacactccactacacctggaacggccgcaaccgccgcctggtgagcggatga

SEQ ID NO: 51433 - DNA, 1266 bp, Kitasatospora sp. Root187; identical to SEQ ID NO: 51402

SEQ ID NO: 51434 - DNA, 1479 bp, Lactobacillus nantensis DSM 16982
atgagtgatttcgaaaaagtaagacaattcacatatttaaatgctgataatgtagaccgttatcgtcgaattatgagattcttttatcttcaaaatcaacgaatgaataatttgttgtacaaggaagatattttgaagggtgtccatatgtctggtctaagtgaatatacaactaatcaactggacaatgatctttcaggattggttgagtggggaaatttgcaggttcagcaagagatgagtcaaccaaaaaccattgaagaatatcgtaataaacattttcgttatcagatcacaacggtggggattgaaatagaggaatttattcaagcacttccagaagaagatgataatacaagtgaccttgattcacatatgttcaaacgttttctagagtctttaaaaatcattaattcactatcaaatcaagatttacttgatggttgggatgatctacaaactagatttgataagatacgtaagaatgcaacaggttatattgcatatttgactagcagtagagtggaagatttaatgcagacaactgaatttctagtttacaaactaaaatttgtgaaatatttgcgggaatttattagaagtatgcagcaaacgagtataaaaataagcttggcactgaattctgtttctcaggatacaattactaatatcgtcaaactacaagaaatacacgagagcaataaattaagcttgggacagcagaatatcgaaggtgtagagaaacgtgttcgtgatacatggaaatttatgtgttattggtttatggatactgacagtcgtgaaagtgaatatactaatttaattagccaaactaatgaagccatgagtcgagtgactaacattattcaggccattactgaaagcaatttgcaatatcatagtcgatctaaggactacttgaaaattgcagaatggtttcaagtgttggttgatagtgatgaatctgaagaaaaaagttttttcaaagcaaataaattatcggcaacactgtttggagcaagcaaaacgaggcatatacaatcatgtaacatggatgttaccagccagttggatgacatttggaagatgacagtacctaccacatcgttaacttctaagagtcgtaagaaccgccctcgagtggctaacaaatcatttataatcaattcggaaagacaagaagtagttagaaagagaaaactagaagaacgcaataaaaaccaacagctttggaatagttatttaaaaaacggtgaactagttttgtcagataataaccatttaccaaaacaaattaggcgtgagctgataagatatttttctattgcaataatgacaaccaatcatcgtgtttctacacaattaggttggatttttgaaatcgagattaaccctgaaaagaaagttactattgaatttgatgatggatatctaacgcttccagatgctaaattcaaaattgtggagggaatagcataa

SEQ ID NO: 51435 - DNA, 1101 bp, Lactobacillus nantensis DSM 16982
atgaaagatgatgaagatgtaaaaatttgtcttgatagattgttagaattccacgtgattttagaaaaagacaatcaagaaatttttcggttaataaaaaaatattcgaaagatattcaaaaaatttgtaacaacgatttgaatatggctttagttttaaatgcacactttgcaaagatagaaaaaaagccattccatacagaggcattcatgggtattgaaggatttaatgagacaagcgattatgtgatgtttgcgtgtgcaatggcatttgttgaagaaagtgggccggaatctccattcatactgccagacttgactagctatttaaaacggaccatgcctaatgatttagattggacacagtatcatattcgaaaaaggcttgttcgtattttacaacagatgattgctttaaaaataattattgtcttagatggaaaattcgatgattttgataggaatgaggaacaggtggcattgtttaactcgactaattattctaggtactttttaaatatgttttcgaaaaatatacagtcattaactgattctagtgagttagttcctataagtgaaactaagaatattagtatgcaggtgattcaaagattattcttgtcggttggaatttgtcgaaccaatgaaacagaatccttatttaggtatatgcgcagtgaacaagaacgtttgaccaagtttttcgaaattaattcattttatgaatttgaactttcaaaaaatcttggaatattagtgagtgaaaatcgacgaattggaattaagtatattcctgataatggaagtagtggggatctattaatgctaataggatcaaaaattagaaatcgaagttttgtaccagatgaatttggtcaacttcacttaaatcttacacaatggcaaagtattgtttctgaagttgtacagaaaaaccgagaattattgtcaaaagcttaccgagaaaaatcatttgaatcaatagcaaaagagttgttgatgcaaacggtcaatgatggtttgatactccaaagtgatggtttattgttagtcacaccaatattttatcgtctcaatggggagtttacactaagtgagtag

SEQ ID NO: 51436 - DNA, 4086 bp, Lactobacillus nantensis DSM 16982
atggaaaataaatttgttttgaatcgattgggcctaattaatttttggtattatcaaaatcaggtttttgaattgagtgatggtcatctattattccgaggtagaaatggggccggtaagtctatcactatgcagagtttgatgccgattcttttagacggtaatgttgagcctagtagattagactcctttggtagccgtgataaaaaaatgattgattattttttaggtgatgaggatgtaaatgggaaggataaagaaggagttgggtatttatgggctgaatataaaattggagagcaatatattacaaccggtatcgggatgcgtggtggaaggaaatccactaatcttaatcgttggtacttcgtaataaatgatggtcgtagaataggttcggatttttctttaatgattaatgaaactacgaattctgctatcacattgagtaaaaaacagttgagaaacaggttagagggtagtgggcaagtctttaactctcagaaagaatatgcaaattatattagtgaaaatatttttggatttaaaaatattgatgatttagaaaacactatcaaattgctgattcaattaagaaatccaaaattaaataatgatttgaagccggctaaacttgaaggtattttatctgattctctgccaagtctgaccgaagataatgttcaggacagtgcgagaacattggaccaaatcgatcagtcaaatgcaaatattgatcacaatgaatatcagaaaaaagaactacagccattactaaaagcctatacaaattataggcggcatcaactagtcgccttagctcatgttacggaaaatcatctgcagcaagctgaaaagttaacacggaaattttctcaattgaattcgaaacgtagagaaatcgaaaataagcgaaattcaattaatgaatccaatatagaactagatagagaacttgattcaaatatccaattaaaagaaaagttagcaggtaatgaaggttttaacttagtggaagaagctaaaaagctaagacaaaaactctcacagatgaatcaaaatgagaataataagaatgacaggattttgatttacgaaggtgatataaaaaaacttcaagataaaatatctgatttaaagaaaaaagaaacgaattatgaagaaaatcttactcaaatatctaagactcttgaatatttagcggttaagtctggtttttataaacagcataagcaagtctttttggttgctagtgattacccaagcgtcgatattgtacaatggaaaaaagaatctattgaaaatttggattgcttagaaaagatagtcaataaatatcaagaatgcgagtggattcagaaaaacgttgatcaattggatagacaattggaagatgaaaataaaaaattaaatgactataaaatgaaacaaagaaatttggaatcaaaatatagtgaggagttatttgatttaaaacaaatgtttcagaaatatagtgatagtttaaaatttgaaattgacaaggatgttgttggaataatccaaactaatttagataagatatataccattgatatgccaagattatcgaaagtgattgaaccattgatagacgtatttaatgagaaaaaaggaatcatacaaaatgcaattcaagaaattaattacaatattgataatgttaatgtagagatagaagaacttcaaacagaacaagatgaaattagagcacagaaatatcctgtaccggaacggttgcactatcgcaaaaaaattagacagaaccaaaagttgattcccttttatcaacttttgaaatttaaagaaaatgttgatacttcaactataaatcaaatagaaggtgccttactagagagtggcattttggatggattggtttcacaagacggagtaattacaattggcgacacgaccttgaaagctaatccaaaaatgtttatgcctactttgatggattatttaaaacctgatattgatgttacaacagcaattcctgaatcgctaatatatgacctattgagtagcatagctgttaacaaagatagtactgatgttgatgttgttattacgccagatggtgagtttcaagtgggaatcttagttggaaaagcgaaggacaactatgaagcacaatttattggtgctacggcacaagaacgttttcgtaaagctagaatagacaacttacaaaaaagaattgatgataaattaattcaattgaaaaaattagagaattctttaaccgaaaaagggaatcaaatagatactttggaaaaggatatagttagaattcccaaagacgataatttatctttattaaaatttcaattggaggatgtcaatagaaacattgaatctcaaacgaaaacaactatagattttagtgaaagattagagcacaaaaaggaagaattgcaatattattttttagaaatcaaacaattaagtaagaattatcagactatttcaaaaagtaagtcagcatttgaatcggctaagaatggaatgcagcaatatgttaattcaatcaatgattggaacaaagaactaagtcatattagtaatctaatcgaacgaattaaggatttagaagaatcattgattagaatgaataaggaattagctgtaagacaaaaagaattatctcaattgattagtgatattaaagatattcaatttgagattaaggtaaatgaagatcgccaacggattgctggtaatctagacacaattaacagacggcttgtcgaaataggagaaagaattgatcaaatcaaatatgtacaaaaggagaatagcgttaaacttcaagatttagctgggcgatcagaaaaaactaaaataaatatcgtaaatcttcaaaaaaagttagactttgaatgtcctttttcaaaattattggtagagactttgaatcaggaattatacttagaagtaggatccaatcaagatttacaaaaggaatttaaggataatttgatttcagatgaggcaatagattctgaaactttaaatcatgatattgaaattatgaatagtaaattcagtgctcagagtaatagtttgttgaatttcaggccaaggcaaaaagcgagagatactttagatgtcccggattggattaaaaatttccctaagaataggggggacattgatttctggaaattgtacttgaatcatcatcaagaagtattggttgaattatcaggtattgatgagttaataactaagttagatcaccagcttaaagaacagatgcaagttaaccttgaggcaatgacagaagctgaagagaaattattcagggaaattatttttgatagtctgggtgaagttattaggcaaaacataaataaggcccaggactggatcgtagatatgaatcagatattaagccagcaggaaaataattctaacttgaagcttagtattaagtgggaaattaaaccttcagatgaattgagtaataatgagaatcaagaaggtgttgctcttttgaaaaaagatccgaaggttttgaaccatcaagatttatctaaaattaaaacttttttgaatagcaaaattaatgaaaaaaggattgcctatgaagatcatggtcaagaaattcaaatgacgaaaatattgagggatgcattggattatcgcaattggtttcaatttagaatattctatacacaaaatggtaaaaacaaacgtcaattgactaaggtcgtttttaacaaactttctggtggtgagaaagcaattacgatgtatacaccattatttgttgctatgtcagctcgttataacaatgcacgtaagaatgctcctcgaatcattacattggacgaagcttttgccggaattgatgagagtaacattagccagctttttaaaactattgatcaattaggatttaattatattatgacttctcaacaattacaggcagagtacgatactgtacctagtcttaatacatatgaattgctgagagataaaggtaaagatggtgatttggtaactgctattcaattacattgggatggtaaggagagggtagaaaataatggacaataa

SEQ ID NO: 51437 - DNA, 1212 bp, Lactobacillus nantensis DSM 16982
atggacaataaaatacatgaagctattttctattttgagagtgatcctgagcttttgcacgttattaaggaaattgcaaaaaaatattactattatggtgaattcaaaggttctataaataaatcagatctgaagaatgttgaggcacttttgttatttctcggaataagccaatcaaaatggagaaaaacagaacggtttcaggtaaccgaatttatttctgcttataatgacagtaaatttggagaaatcaatataaaaacagttattgaatttattattggaaaaaaattacttaccaaaagagatatcgatgcaggaatagagattcgatggcaacaatatctttctaaagtgtcagaaatagcaccgacggtatataagcttttggcagtatcgataattaaacggaattttaacaaggagttaagtattgatagttttcaaaaggttgaattagcattaaaaaatttgccaacaaaattaactcgcctgccagtttttgcttatcaattgtttgaaaatcctcatagtttggataaaggaagattgttaggaaatttattttatgattgtatagtgtcaatgggtgtgaaaaatcgagataatattgacgtatatctagctgtcaatattgtaaaagatgatattttgaattttgtgactgttaagaatttgaagggagattcgcccatttttaaagctgcagcagataatcacttaatttggaatgttccacttatgcagttaatgaagatgaaaataattgaacccattataggtaataaagtctttttaattgagaactctagtgtttatgcagtaattgcggataaatttaagatggtaccactgattatgactagcggccagtttaaatatgcaacatggaaattactagatttattaccaaataatattgaaatttattattcaagtgatcttgatccagctggattggttatgtcccaaaaaatacttgaaaaatatcccaagagggtccatctttttggtatgtcggatcaattgtttgtttgtgaatatacaaccagcctgaaaaaattaagtatcaaaactgatgttttgaatggtataaaaaatgaaagattattatctctcaaattattaatgaaagaaaagcaatgtgttgtttttcaagaagctataatttctgaattaattaaaagtatcgagaaacacttgaaatgttaa

SEQ ID NO: 51438 - DNA, 1548 bp, Pseudomonas libanensis
atcactcatgacacatactggccggaggcgtcagcagacctgtttcgccacgccactgcagaaaaggcgtccatctatcgtgccattatggaggtgttcgccgccgccaagcgccagtaccgtctgcaattacgacctgacgaggtactatccgaggcaaactggggccaccggacaccaccgtctcatgaggaagtcgccgccgcactgagccaactggctatgtggggtaacctcgaatcacaaccggacatgacgcgtgtttccaccctcaacgattactaccgggcacgttttctctatcgactctcgcacggcggcgaggctgtagagacgggcctgctcgcattcgcgcacagcctgcgccatcgtgcggaactgcagacagtagcattagaggacatcgacagccgcctgcgagccttgcagcaattggtagctgaggcgcagtcgtctggcaacctggatactgccaaggcgcatgagatcctgcgcgacctagtgcgagtatttgagggactcaccgaaaatgcccaggcattcatggccggagtgacacgtagcctggaactgcagcaagccgacgcaaccactttggttgcctataagcgacggctaatcgactatctcgagcgattcatgggcgatctgatccgtcgctccgatgccatcgcccgcatactgcatgaattgtccgtctccatcgaccctatcttgcttcaggtggctgcgcgtgaggcacgagacgcagcgcccaacggtactggcgaacaggtcgaggaaacacagcgtcgccgggagatctggcgcgaacgctggaaaggattgcgcggctggtttttgccgaccggtaacgaaccgcctcaggcagaactactgcgtgcgcgtgcgcgctcagcgattccacaacttttgaacgccattgcgacgattaatgagcgacgcagcgggcgcagcgaccggtcagccgacttccgggttctggcgcagtggttcgccgcctgcgacagcgacgacgatgcccaccgcctcgctcgtgcggcattcgccctgcagccggctcgtcacttctcgctcgaggttgctgacgccgaagacgtgccggcgagcacttcctggttggatgctccgccgctgatcattaatcctcgcctgcgcgagtatggcgaagccgcgccgcgaggcgcattggctaaggtgcgggatcgcagccgggatcgcgccctgatggctcagcaactggcacaggagtcgcgtcaggtcgaggctgcgcgtcggcgactggcgaccggtcgcacaacgcgtttgtcggagctgggagagctcgatgcgcctgccttcagcctcttcctgggactgcttggcgaggcactggccgagcagcacgacccgagtagttctgtcgagcgacagacgggcgacggtctgttgcacattcgcctggagcctctggctgaagacagtcgtgcccgcatatgcacggcagccggggtgttctccggccgtgatcatctattaacgatccggctcaccgaggaaaggtcatga

SEQ ID NO: 51439 - DNA, 1269 bp, Pseudomonas libanensis
atgactattgcctcatcccgccgcgacaccaggcatgtcggagaaacgcagaaggcgcaacagcaggacgaatttcgccgggcattgcgcagcctgctgatgtgtccgctcatgccgccagggcacgccgactttcccgccgtacggcgtcaggccgaccgccttcatgagtggttcgcccgcgaggccggctggccactacatgtggaccgcgagggtgcgcggctgctcaagcgtccagccgatttgtccgacccgacccgcggcctgccggaccacgaccggcgttgctacgtactgctgtgtctcgctgcagcagtactggaacgagcggatccacaaattaccctgcgacaaattggcggacgaatcgtacaacaagccgccgaccctgcgctggaagccttgggattcaccttcaccctgaacggtgctaacgaaagacgcgaactggtcatggtctgccgcacgctcctgggtcagggcatcctggaacgtgtcgccggcgaggaggaaagcttcgtgcaggacggcagcggaccacagtccgacgcgctttacgatattcatcgtcgcctgctggccggcctgctggcggcggtgcgcgggccctcgacctggaacgcagaggataccccgggcaacacccaggcgcggttaaatgcgctggtgaccggctttacggtagatagcgaacaaggccgacgcgatgccatacgccattacctggcgcgccgcctgctggacgatccggtgctgtacaccgacactctggacgaagaggcgcgcagctatttcgtcaatcagcgcggtgttctcgccagtcgtttgtgcgaagccaccggattggttgccgagcaacgtgccgaaggtctggcgctgatcgacgagagcgggcagctcactgatgtgtccatgccggcggaaggcaccgaggctcatgtaaccctgctggtggctgagcacttggctcggcgcctgcgggaagagcgcgcgccgttgcgagtggccgaaagcgacattgctctgttcctgcgccaggccacggagcgttatggccgttattggcgcaagtcggcacgcgcgcctggcgccgaacacgagctaacgcagatcgccatcacgcgcctatgccgtctgggtctgatgctgcgcgatgggcatgatgtgtgtccattgcccgccattgctcgtttttcactcgggcagaccgaggtgcgcaatgcccgtagcaccgaatccttgtttctacccgagcccaatgcatga

SEQ ID NO: 51440 - DNA, 4146 bp, Pseudomonas libanensis
atgagcagcgatctcttcatcacttcctcccgccccaggctacccgaacctttacgcgagcgctggcagccactacgcctgggccttgtcgaactgttccactacgacagcgaggagttctggttccatgacggccatttactgctacgcggcaataacggcaccggcaagtcaaaggtgttgtcattgactctaccactgttgctggacgcacaattgcgctcctcacgcgtcgaacctgacggtgacagcggtaagaagatggcctggaacctcctggtcggcacctatccccgccgcatcggttatagctggatcgagttcggccggcgcgagcacgatggccgcccccgctacctgactctgggggttggcatgtctgcagtcgatggtcggtcccaggtggacagctggtttttcatcatcgaaggcgacggtacgacagcggacccacgtatcggcgaagatttgtggctgacgactgcggagcgccaggttctcacgcgcgaacgcctgcgcgatgcactgggaggacgaggccaactgttcgaaaaccaccaactctatcgtcgcgctgtggatgagcgcctgttccagctgggcacacgacgttttgatgctctgatggatacactaatccagctacgtcagccgcagctgtcgaagaaacccgacgagactggcctctccaacgcgctgagcgagtcattgcctccgctggcacctgaactgttgagcgatgtggccgaggcgctcaaccagttggaagaggatcgcattcaattggaagatgcgcgccgattggaacaaaccgtcactcaatttgaacagcgctaccgcgtctacgccggtatgttagcgagacgccaggcgcgtgaactgcgccaggcccagaccgcctttgataatgccagcgaggcgcgtaaccgagcgcaagatgagctcgccggcgcagaagacgagcaagatgccgccaaagccgcatacgaggctgcaaagctggcatattcggccgcccgggagcaagtcgagacactccagagcgaccctgccaaccaggacgccaaccgtctcgtccaggaacaaaacaatgccgccgaacgacaacgtgcagcgcttgcggcggcccgacaacgcaatgaagcccgcaccagactcatcagcgaaatagacctgaaccagcaacggatcgtccaggccacccaggcccgcgatgaactggaaaaggcacgcacctgtacgcaagatgcagccgaagcgattgccattgcagccaacgtcgcgaccaatccgctactcagtctcgaagccgaagtactcgcagaactaccgctcgggcacagggcagccgaagaggccttgcgtgagcaggttagggagcgacgccgggacatcgcgcatctacgccgacgccacgcagaggtcaaccagcaccaaaccacacgggcgaacgcccaagagaacgtccgcaccgttcgtactgagctggacactgcattggaacaacgcgagcaggccgaccaacaggccgaacagcaggcaggcgcactgcttgatgcctggtccgagctctgcaaaaaccttgtacagttgcggttcgaggctgaacccaccttgcagcaattggccgaatgggtggcccgcccggaaggtgacaacccggtacaagcggcaatggatacggcctggcgccagacgctgcaacgacacgccgaccgacaggcggcgttggacagcagccttgcagatctggacaaacagcgcgccgatatcgaggacgagcgcacccgcctggccgccggcgaggatgcactcccccccgagccgcctacccgtgccagaggtgtgcgcctgcaacgtcacggcgcgccactttggcgtctggtggacttccacccgagcctggatacgacagaacgtgccggattggaggccgccctgcaagctagcggcctgctcgacgcctggctgtcgccggatggagtattgaacgatgacaacggcaagccgcttctggataacagttggcgccagcgcacctcggtgaacggtaccgacctgaactctgcgctgattcctgcggtgctcgaagcctgtccaatcgaacaggcaaccctgactggcctgctggcgtgtgttgcatatggcaccgaagagcctggcgatgtcgaagcctggctctctcccgatggacgctatcgcctggggccgttgacaggctcctggcaaaaaaccgaggcagactacatcggccgcagcgcacgagaactggcccggcaacgtcgattggaggccctcgcgacgctcctcgctgaattggacattgcgcaagcacaactggcgcggcgatccgaaaccctggccgcagaacgcacccaagccgatctggaaaggcaagcctcaccgcctgagcgtcctctgcacgatgcaatcgctgctacgttgcaggccgctcgcgtggtggatcaaacccggcagcggctggcaatggcgacggcacgttgccaggaggtcgaagacgcctggcaatcggcacgcgagcagttggagcacgacgcgaccgacctgcgtctcccctccgaacccgagcggatagccgcaaccgaagaggctttggaatacttcgatgtcgtccaggcacttctagtgcaggcagtacgcgaatggcagcgcgcattgcccgatcagcgccaccagcagcaacgcgaagatgaggcgcgcaggatcctggaacagaccgacgaaagtctggtgatcgccgaggagcaggccgagcaggcacgggtacgcttcgagaccctacaacagtccgtaggccagcaagtggaaaaactactgaccaaactgagcgccgcgcgagcaatacaaacccaggccgaacaggacacagaggcgtgccgtgaggtgctaggcaaaacggacacacggctggccgtggccgcaacgcttgtcggccaaagcgagcagaccttgcgcgagcgcagcgacgaccgagcggcggccgtcgaacgtcttcaccacttctgcgccagtggcttgctggcggccgcattgcgtgacctggagctgcccgagcattggagcatcgaccccgcgctgaatttggcacgccgcatcgagcaggcgctgacccggattgccgatgacgacgcgacctggactcgagtacagaatcagattgccgaagacctgagcgaactccaacgtggcctaagcgccttgaatcaccaggctatctcggtacccaatgactggggtatcaccgtcaccatccagtaccagaatcgtgccgaacgccccgatacgctcgcactgcggctggccgaggatatcgcccagcgcaacgaattgttatctgcgcgcgaacgtgaagtattggaaaaccacctccaggcggaaatcgccgccgaactgcagcgcctgatgcgatccgcggacgaccgcgtcaaggcaataaaccacgaactgcacaagcgcccaaccaccacaggcgtacgctaccgccttctatgggagccactatctaccgaggacggcgccccggctggcctggaagctgcccgccagagcctgctcaataccagcgcagacctttgggcggtcgaagatcggcgggcggtaggcgtcatgctgcaacagcagatcgccgccgagcgcgctctggccgacgccgacagcgccggcagaagcctgctcgatcaactcgcacacgcgctggactatcgctactggcaccgtttccgtatccagcgccagcaggatggccagtggcgcaagctgtccggccccgcctccagcggcgaacgcgcacttggcctgaccgtaccgctgtttgccgccatcgcaagcttctacggccacggcggcagtccattggcgccacgcttgatactgcttgatgaggctttcgccggtatcgacgacaccgcgcgggctcactgcatgggactggtgcgggagttcgacctggacttcgtcatgaccagcgagcgggagtgggcctgctacgcggaactgcctggagtatcgatctgccaattgcagcgtcgtgaaggtatcgatgcggtgtttgtctcacgctggacctgggatggcagggctaaacggctcgaagaagatcctgaccgcaggttcccatcagtatga

SEQ ID NO: 51441 - DNA, 1290 bp, Pseudomonas libanensis
atgaaaaccaccgtcgacccgcgcctacagcgtctgctaggtgaaccagcactggccgccctacgtcaacgcctgcgccgtcgttttgaactcgccgatgcggaacattcgccatcctcgattcagctgaacaaccttgattcagcggagtactcggctctttgtcaactgaccggccgcccttcacgtatagcgcgctcaatgacattggatatcgccgaccttgacgcgcggttgcgagccgccgggttggctgattcactacaaaatgcactggagcatctggatggccctatcgttgccaaagctagtctgcgcaaagagctatcggcgcaatgggcggcgctgacaagatccgcgtcggccgcaagcggtcctctcttaagtagctggctgcaagataccgctacatccttacctttactcaagcgtctgggacgcgatcccacgcacgccggccagttgctgacagcagctgaccgcgtgctctgccgattaccggcggagggactgcctcgctcacaactggccgccgaaaccctgggcgatgcccacgcactggacgccggtcgtccagtagcaagcctggtactgtcggcatggcgactacgtgagcgcacgaaagctgcactggacgacaaagcgacaggccagagcaatgacggtaacgaagagcgtctacgcgaagtctggtcaagagcgggagttctcattaacgaactggcccgccctgctctcttcctcaacctgcccgtggaaccggatgccccccgcacctggctgccaggcgaacccggctacctttctctgcgacaactggttcgccagccatattcctggcaagtagatgggcgcaatgtttacgtgtgtgaaaatccaaacatcgtggccatcgccgccgaccgcctcggtgccgacagtgctccgctagtatgtacagacggcatgcccgccgccgcgcagcgaatcctgctcgaccaactgtcctctgccggcgcacaactgtactaccacggcgactacgactggcctgggatcggcatcggtaaccatgtcatgcgcacctggcaggcaatcccttggcgattcgggtgcaatgactacctggaggcaatgagggtagcgccaacacgaccgcgcgatctggataccttcgggatcgaggctttatgggacaaagagctccgtgcagctatggacaaccaagggatcgcaattccagaggaagcggttgccggcaaacttctgggcgatctgagccatggaaaaaagcctttcgatcatcaatga

SEQ ID NO: 51442 - DNA, 1509 bp, Bradyrhizobium valentinum
atgcgagccgtcagcgattcagccgagctgttcaggcatgtgagtgccgagaaatctgaattttaccgccgcatcatggacgtctttgcagcagccaaacggcaataccgtctgcaattaagacctgacgaagtactgagcgaagcccgatggttagatgcaccaccgcgaattgaggacgtcaacaccgcgctcgcccagcttgccgcctggggcaatcttgaatcgcatcctgacacggcgcgggtttccagcctcagcgatttctaccgtgcacgttttctgtatcgtctctcgcagggcggggaggctgtcgaagcggcgctggcgcttttcgtgcaaacactgcaacggcgcgccgaactgcaaacggtggcgcttgaagacattgcaaaccggttgcaggcgcttcaaacgctggcggacgaggcggaagccgacgtcgcgaagatccacgaaacactgcgggatttggtgcgcgttttcgagggccttgctgaaaatgcgcaggctttcatggccggcgtcgcacgcagcattgagttgcaacaggccgaggcgattgcggtagcgaattacaagcgccagctaatcgactatttggagcggttcatgggcgatctggtgcgccgctccgacaccatcgccagacatatcctcgctctggaaccgagcattgacgcattgctacagcaggtcgccacgcgcgatgcacgcgatgcagcccccggcgatgcggaggatcgggccgacgcgcggacccttcacttgaatgcctggcgcgaacgctggagaggtctgcgcggctggttcttccgtaccggccacgaaccctcacaagccgaactgttgcgggcgagggcacggtcggcaattccgcaattgctaggagcgatcgccgcgctcaacgagcgccgcagcgggcgcagcgaccgttccgcggatttccgcatgctcgcctgctggttttctgcctgcagcaacgatggcgaggcgcaccggttggcgcgcgcagccttcgcgctcaacccggcacgacatttctcgctgaatcccaacgccgacgccgatctgccggcctcgacacgctgggccgacgcgccaccactgacgattcacccgcggctacgcgaatacggtgaggccgcgccgcgcggcgtgatgccccgggtgcgtgatcgcggtgaggcccgcgcacatctggcgcgcgaactcgccgaggagtcgctgcaggtcgaggcggcgcgcaagcacctcgccaccggtcagcccacacgcctttcagatctcgccgagctggacattcatgccttcggtctgttcctgggattgctcggtgaggtgctgaccgaacaggccggtccgaacaccagcgcggaacggcgaaccggcgacggattattgcatatcaacctcacgccactcgcagtcgatagccgcgctgtgatcaatacgccgcgcggcgtatttgccgggcgcgaccatttaatcacgatcacgccgacatga

SEQ ID NO: 51443 - DNA, 1302 bp, Bradyrhizobium valentinum
atggccgccagcgttggtagagacagccgcagcatcggccagcaacagcgtcggttccagaacgaggaatttcgcagtgccgtgcgcgccttgctgatgacgccgctgatgagtccggaccacgacgattttccggcgatccggcgtcaggccgacgcactgcgcgactggtttgggcgagaaaccggctgggcgctgcgcgtagaacaagagggtgctcgactttataagcgaccggccgacctcgccagcacgatgcgcggtttgccgttttatgatcgccgccgttacgtgctgttgtgcctggcttgcgcggtgctcgaacgcgctgacccgcagatcacgttgcgactgctgggtgagcggctgctgcaattcgccgccgagccgacgctggtggcttccggcttcatcttcacgctcggcgctccccacgagcggcgtgaactggtggcggtatgccgcaccttgctcgacttgggcgtgctgcagcgtgtcgccggcgacgaagacgcctttgtccataccggcgatcaggcagatgccctctacgacgtgcagcgccgcgcgctcgccggcatgctggccgccgtgcgcgggccgtcgactttccggccggaagatgcgccggtcacgctcgaccagcgactgcatgccttggccgacgagcatgtggctgacagcgatgagggccgacgcaccgttctgcgccgccaactggcacgccggctgctcgacgatccggtagtctataccgacacactggacgccgagtctcgggcctattttgtcaaccagcgtggcgccatggcggcccgcctgtctgacgcaaccgggctggtcgcggagcaacgcgccgaaggtctggcgctggtcgacgaggctggctcgctgacagatgtggcgatgcccgcagaaggcaccgacgcccatgtcacgctgctggtcgcggagttcctggccaccgtttacaggcagcggcagacggatgccgccggcgcgacccaaccattctctggtatgatcagggaacaagacgtcgtcgattacctgcgcgagagcaagccccgctatggcaaatattggcgcaaatctgcgcgtgaacccggcgccgaacgcgagcttgcggagatcgcccttgatcgactggaaaagcttcaactgattgtgcgagatgccgagacggtctatccgcgcccggcgctcgcccggtttgcgctcggtgaggccgaggtccgcaactttcgtgaaacacgcggcgtacagaccgcggctgccgatgccctggtcggtccgacatga

SEQ ID NO: 51444 - DNA, 4179 bp, Bradyrhizobium valentinum
atgaacgaccggccggcttcatttgctgctctctccgagagacccgcgctgccaatcccgacgcggcaacgctggcagcctttgcggcttggactggtggagctgtttcactacgacagcgaggagttctggttccgcgacggtcatctgctgctgcggggcaacaacggcaccggcaaatccaaggtgctgtcgctgacgctgcccttcctgctcgatgcacagctcaagtcctcgcgcatcgaacccgacggcgacagcggcaagaagatgtcctggaacctgttgatgggtagctatgaccggcgcatcggctacgcctggatcgaattcggccgcctcgccgatgacggcacgccgcattacctcacactcggcgccgggcttgcggcggtcgcggcgcgtccccaggtggacagctggttcttcgtgttggaggattccattggcgctccgcgcatcaatcaggatatctggctgacgagtgatcagcgcgtggtcctgactcgggaacgcctgcgtgacgcgctgcacggccgcgggcaggtgttcgataccgccgtcagctaccggcgcgcggtcgatgagcgattgttccacctcggcaccaggcgctacgacgccttgatggatacgctgattcagttgcgtcagccgcaactgtcgaaaaagcctgacgaaaccgcgctctcggacgcactgaccgaggccttgccaccgctcgcacccgaactgcttggggacgtcgccgaggctctgggccagttggaggaggatcgccgccaactcgaggaataccaggcgctggcaagagccgtcgagcgcttcgaccagcgctaccggatctacgctggcacccagagccggcggcaggcccgcgcgctgcgccaggcccagaccgagttcgacagtgcaagccgggcgcgcggcgacgcgcaggcgcggctcgagagggccgagaccgcggaagcgctcgcccggataattcacgacgacgcggaacttgcgctcaagcgcgagcaggctcggcttgatatcctgcgtgccgacccgaccatgcaggacgcgaaccgtctcgaatccgccgagcgggacgctctggctcggcagcgtgcgctgcaagtcgccaccgctgcggtcgacgaggtgcgacggcgattaaagcgcagcactgaggagaccgggcacggcgtccagcgcatgacgcaagccgaacgtgtgatgacgacgctacgtcagaacaacgcgacgcatgccgaggccgcaggtatcgtcggcctgcacgccggtagcccgctcgcaacgctcgccgccgccgatctggtcgcattgacgccacaagccttcgacaatgcatgcgccgaccttcgcaacttgatcgttgatcgacgcgaacagatcgcattgttgcggcgacgccatactgaggtgacggaggccgaagccctgcatacacaacgccagaacacccgcgacgaaagacagggcacggtagaggccacggcaaaacgacgcgagcaagccgatagggaggtcgatcacgagggccacaacctgattcaggcctgggagcgctacttcgccagcctgaagcaactgcgggtcagctccgacgacggccgcgcagcgctcacggccctcgccgactgggttgttgggctggatggcgacaatccggcgcgacattacctgcaaacggagcagcagcacgccagcctgcgtctggcgcagcgtcgcgtggcgctcgacggccaacgccagacgctggagacggagctcaacaccctcgaagacgaacgcaaccgtctcgaagccggggtcgatgcgacgccgcccaacccgcatacgcgcggcgccgatgccagagatgcgcgcgagggtgcgccgctctggcaattggtggattttcgcgaagaggtcacggctgctcagcgcgccggcctcgaggccgcgcttgaagccgccggcctgctcgacgcatgggtctcgcccgatggccacctgcaggccggcgacggagtagagctgttgcacgacacccaggtgctgcagcgacagccgcacgcgctctcgctcgctggttggctgcacgctgacacgcccaccgatatcgcggtaccggccgcactcgtcgaacgcctgctgtccggcatcgcctgcaccgacgacgatcccgcggacagcgaagcttgggtcgcccccgacggtcgctttcggctcgccgcgctggtcggcgcctgggccaaaccggcggcggtctatatcggccatgcggcccgcgccgcggcccgcaagcagcgactggccgacgtggccagccgcctaacacaaatcgccgatgaactcgtcgcggtccaggcgatggacgcgcaactcacgcgcgatcaggaccaagccgccgatgaatggcgtctggctccctccgaagaggagttgcgcaacgcccatcttgcggcggccgccagtgcgcgcgaggctcagaccgcccgccagcaattgagcgaggctgatcttcaatacctggaggccgcacaagcgctgcagacggtgcggcaacgactcgccgccgatgccaccgatctgcgccttcctgcattatcagccgagttaccggcggtcgagatggcgttgaaccactatcacgatgcccaactccgcctcgcccaggctgttcacgaggtacgtctggcgctccccgagctgcagcggcaacgcaaccgcgagaacgaaacccgcgacgatctgaagaagcaggatgaacaatttgcggctgcccgcattgaggcggaagaagccgccgtccggttcgaggtgttgcgcggatccgtcggcgccagggtcgaagagctgcaacggcggctggccgatgccagcaccgccgtcaaggccagcaattccgcactaacgatcgcgcgcgacgtcctgagcaaatccggcgaggcgcgcgcggtcgcgcacgaacaggcggcgactgcgagcactctgttcggacaacgcagcaacgcgcgcgccgaagcaatcgcgaagttccaacacttcgcagccaccggcctgctcgcggctgcgctaccgcaagccaacctgcctgacctgggcggcccgtggacgatcgaccccgcgcttactctggctcgccgcgcggaacaagccttattcgaactcaaggacgacgacgacgcctggacacgcctacaacggcagatcggcgaagacctgacggagctacaacgcgccctcagcgcactcggccaccaggcgcacgcagaacagagcgattgggggcttatcgtccgcgtcgtctaccagaaccgaccagaaccgccggatcgccttgccgcgcgcctcgccgaagagatcgcccagcgcagtgaactgctgacggcgaacgagcgcgctgtgctggagaaccatctgcaggccgaaatcgcttccgaagtgcagcgcctgctgcaagcggccgaaactcagcgcgatgcgatcaacaaagaattgcaccatcgcccgacctccaccggggtacgctatcgtctgctgtggcagcccctggcggaagaagaaggcgctccggtcggcctcgaagcagcgcgcaaacgcctgctcaataccagcgcagacctttggtcctctgacgaccggagagtggtcggcgcgatgttgcagcagcgcatcgccgccgagcgcgagcgggccgattcgggcgccggaaaggatgtgggcagcagcctgatcgagcaactcgcccgcgcgctggattatcgccgttggcaccgctttcgcgtcgagcgctggcaggacgggcactggcgcaaactctccggtccggcctccagcggagagcgcgcgctcggcctcaccgtgccgctgttcgccgcggtcgccagtttctacagtcagggcagctacgcgctggcgccgcgcctgatgttgctcgatgaagcgttcgccggcatcgatgataccgcgcgcgcccattgcatggggctgatccgcgagttcgatctcgacttcgtcatcaccagcgagcgtgaatgggcctgctatgccgaactgcccggcgtcgccatttgccagttgcagcggcgtgaaggcatcgacgcggtgttcgtatcgcgttggagctgggacggtcgcgccaagacacgccaagacgatccagatcgcagatttgcgccgacatga

SEQ ID NO: 51445 - DNA, 1281 bp, Bradyrhizobium valentinum
atgatttcctcgaccgacccacgcctgcaacgcctacttggcggcgaccgttacgccttgctgcgcaagcgcctgcgtcagcgtttcgaacgggcatcgctcggctccacggttgaaaactttcgcatcggcaagctcaccgcggaggaacatgctgcattggcttcgctgcttggtcgtccgctccgttacaccaattccttacaagtcgacgttcgcctcgtcgacaccgctttccagaatgccggcatcgccgcttcgctgcgcgacgcacttgaaaaactcgatggcccgatttcgaatctcgccacgacgcgccttgcgctgcaaacaatgtggtcggatgtgctgggcggctgcactcaccgcgaactgatcggactgctgcaggctccggccggcatcgggcttctcaagcgccttgcacgacagagcccaccggcggcgctccaactctgtcgccgtgtcgaagcggtattgcaacgcctgcccgcgagcggcatcacacgttcgcaattggccgccgacgtgctgggcgacgcccacgcgctcgacatcggacagcccacggcaaccctggcactgacggtctggcgtcaggtaatcgctcgaaccgattacaacaatgatgacgtcgatagcgagccaacgggagacggcgagctggagccgggcggtggtgcggagcgcgaccgcgacgtgtgggccaaggccggcgtgctggtcaatgaattggctcgcccggtgctgttcctgaacctgcccatgcgcgatgcaggaaattacagtcagtcgcagggagagcctgtttacgcttcgctgcggtcgctgttgcggtctccaccgtcgtgggacgtggcggatcgcaaggtctatgtctgtgagaatcccaacctggtcgcaatcgccgcggatcactggggctccgattgcgcgccgctagtctgcactgacggcatgcccgccgcagcacagcgatgcctgctgtcgcagctggctaaagcgcgggcgcagcttttctatcatggtgatttcgattggccgggagtgcggatcggcaaccacgtcatgcgcgagcacggcgcccaaccctggcgttttggggcgagcgactacgagtccgccgtcgaacagacctcatgtcttggacaggctctcacgggaaaggctgcgcccgcgttatgggacgaaaggttaatgacggccatgcagcaacatcggctctccattgctgaagaagcgttagccgcttcattgttggaggatctcagggccacataa

SEQ ID NO: 51446 - DNA, 1509 bp, Bradyrhizobium valentinum
atgcgagccgtcagcgattcagccgagctgttcaggcatgtgagtgccgagaaatctgaattttaccgccgcatcatggacgtctttgcagcagccaaacggcaataccgtctgcaattaagacctgacgaagtactgagcgaagcccgatggttagatgcaccaccgcgaattgaggacgtcaacaccgcgctcgcccagcttgccgcctggggcaatcttgaatcgcatcctgacacggcgcgggtttccagcctcagcgatttctaccgtgcacgttttctgtatcgtctctcgcagggcggggaggctgtcgaagcggcgctggcgcttttcgtgcaaacactgcaacggcgcgccgaactgcaaacggtggcgcttgaagacatcgcaaaccggttgcaggcgcttcaaacgctggcggacgaggcggaagccgacgtcgcgaagatccacgaaacactgcgggatttggtgcgcgttttcgagggccttgctgaaaatgcgcaggctttcatggccggcgtcgcacgcagcattgagttgcaacaggccgaggcgattgcggtagcgaattacaagcgccagctaatcgactatttggagcggttcatgggcgatctggtgcgccgctccgacaccatcgccagacatatcctcgctctggaaccgagcattgacgcattgctacagcaggtcgccacgcgcgatgcacgcgatgcagcccccggcgatgcggaggatcgggccgacgcgcggacccttcacttgaatgcctggcgcgaacgctggagaggtctgcgcggctggttcttccgtaccggccacgaaccctcacaagccgaactgttgcgggcgagggcacggtcggcaattccgcaattgctaggagcgatcgccgcgctcaacgagcgccgcagcgggcgcagcgaccgttccgcggatttccgcatgctcgcctgctggttttctgcctgcagcaacgatggcgaggcgcaccggttggcgcgcgcagccttcgcgctcaacccggcacgacatttctcgctgaatcccaacgccgacgccgatctgccggcctcgacacgctgggccgacgcgccaccactgacgattcacccgcggctacgcgaatacggtgaggccgcgccgcgcggcgtgatgccccgggtgcgtgatcgcggtgaggcccgcgcacatctggcgcgcgaactcgccgaggagtcgctgcaggtcgaggcggcgcgcaagcacctcgccaccggtcagcccacacgcctttcagatctcgccgagctggacattcatgccttcggtctgttcctgggattgctcggtgaggtgctgaccgaacaggccggtccgaacaccagcgcggaacggcgaaccggcgacggattattgcatatcaacctcacgccactcgcagtcgatagccgcgctgtgatcaatacgccgcgcggcgtatttgccgggcgcgaccatttaatcacgatcacgccgacatga

SEQ ID NO: 51447 - DNA, 1305 bp, Bradyrhizobium valentinum
atggccgccagcgttggtagagacagccgcagcatcggccagcaacagcgtcggttccagaacgaggaatttcgcagtgccgtgcgcgccttgctgatgacgccgctgatgagtccggaccacgacgattttccggcgatccggcgtcaggccgacgcactgcgcgactggtttgggcgagaaaccggctgggcgctgcgcgtcgaacaagagggtgctcgactttataagcgaccggccgacctcgccagcacgatgcgcggtttgccgttttatgatcgccgccgttacgtgctgttgtgcctggcttgcgcggtgctcgaacgcgctgacccgcagatcacgttgcgactgctgggtgagcggctgctgcaattcgccgccgagccgacgctggtggcttccggcttcatcttcacgctcggcgctccccacgagcggcgtgaactggtggcggtatgccgcaccttgctcgacttgggcgtgctgcagcgtgtcgccggcgacgaagacgcctttgtccataccgggggcgatcaggcagatgccctctacgacgtgcagcgccgcgcgctcgccggcatgctggccgccgtgcgcgggccgtcgactttccggccggaagatgcgccggtcacgctcgaccagcgactgcatgccttggccgacgagcatgtggctgacagcgatgagggccgacgcaccgttctgcgccgccaactggcacgccggctgctcgacgatccggtagtctataccgacacactggacgccgagtctcgggcctattttgtcaaccagcgtggcgccatggcggcccgcctgtctgacgcaaccgggctggtcgcggagcaacgcgccgaaggtctggcgctggtcgacgaggctggctcgctgacagatgtggcgatgcccgcagaaggcaccgacgcccatgtcacgctgctggtcgcggagttcctggccaccgtttacaggcagcggcagacggatgccgccggcgcgacccaaccattctctggtatgatcagggaacaagacgtcgtcgattacctgcgcgagagcaagccccgctatggcaaatattggcgcaaatctgcgcgtgaacccggcgccgaacgcgagcttgcggagatcgcccttgatcggctggaaaagcttcaactgattgtgcgagatgccgagacggtctatccgcgcccggcgctcgcccggtttgcgctcggtgaggccgaggtccgcaacgttcgtgaaacacgcggcgtacagaccgcggctgccgatgccctggtcggtccgacatga

SEQ ID NO: 51448 - DNA, 4179 bp, Bradyrhizobium valentinum
atgaacgaccggccggcttcatttgctgctctctccgagaggcccgcgctgccaatcccggcgcggcaacgctggcagcctttgcggcttggactggtggagctgtttcactacgacagcgaggagttctggttccgcgacggtcatctgctgctgcggggcaacaacggcaccggcaaatccaaggtgctgtcgctgacgctgcccttcctgctcgatgcacagctcaagtcctcgcgcatcgaacccgacggcgacagcggcaagaagatgtcctggaacctgttgatgggtagctatgaccggcgcatcggctacgcctggatcgaattcggccgcctcgccgatgacggcacgccgcattacctcacactcggcgccgggcttgcggcggtcgctgcgcgtccccaggtggacagctggttcttcgtgttggaggattccattggcgctccgcgcatcaatcaggatatctggctgacgagtgatcagcgcgtggtcctgactcgggaacgcctgcgtgacgcgctgcacggccgcggccaggtgttcgataccgccgccagctaccggcgcgcggtcgatgagcgattgttccacctcggcaccaggcgctacgacgccttgatggatacgctgattcagttgcgtcagccgcaactgtcgaaaaagcctgacgaaaccgcgctctcggacgcactgaccgaggccttgccaccgctcgcacccgaactgcttggggacgtcgccgaggctctgggccagttggaggaggatcgccgccaactcgaggaataccaggcgctggcaagagccgtcgagcgcttcgaccaacgctaccggatctacgctggcacccagagccggcggcaggcccgcgcgctgcgccaggcccagaccgagttcgacagtgcaagccgggcgcgcggcgacgcgcaggcgcggctcgagagggccgagaccgcggaagcgctcgcccggataattcacgacgacgcggaacttgcgctcaagcgcgagcaggctcggcttgatatcctgcgtgccgacccgaccatgcaggacgcgaaccgtctcgaatccgccgagcgggacgctctggctcggcagcgtgcgctgcaagtcgccaccgcggcggtcgacgaggtgcgacggcgattaaagcgcagcactgaggagaccgggcacggcgtccagcgcatgacgcaagccgaacgtgtgatgacgaagctacgtcagaacagcgcgacgcatgccgaggccgcaggtatcgtcggcctgcacgccggtagcccgctcgcaacgctcgccgccgccgatctggtcgcattgacgccacaagccttcgacaatgcatgcgccgaccttcgcaccttgatcgttgatcgacgcgaacagatcgcattgttgcggcgacgccatactgaggtgacggaggccgaagccctgcatacacaacgccagaacacccgcgacgaaagacagggcacggtagaggccacggcaaaacgacgcgagcaagccgatacggaggtcgatcacgagggccacaacctgattcaggcctgggagcgctacttcgccagcctgaagcaactgcgggtcagctccgacgacggccgcgcagcgctcacggccctcgccgactgggttgttgggctggatggcgacaatccggcgcgacattgcctgcaaacggagcagcagcacgccagcctgcgtctggcgcagcgtcgcgtggcgctcgacggccaacgccagacgctggagacggagctcaacaacctcgaagacgaacgcaaccgtctcgaagccggggttgatgcgacgccgcccaacccgcatacgcgcggcgccgatgccagagatgcgcgcgagggtgcgccgctctggcaattggtggattttcgcgaagaggtcacggctgctcagcgcgccggcctcgaggccgcgcttgaagccgccggcctgctcgacgcatgggtctcgcccgatggccacctgcaggccggcgacggagtagagctgttgcacgacacccaggtgctgcagcgacagccgcacgcgctctcgctcgctggttggctgcacgctgacacgcccaccgatatcgcggtaccggccgcactcgtcgaacgcctgctgtccggcatcgcctgcaccgatgacgatcccgcggacatcgaagcctgggtcgcccccgacggtcgctttcggctcgccgcgctggtcggcgcctgggccaaacccgcggcagtctatatcggccatgcggcccgcgccgcagcccgcaagcagcgactggccgacgtagtcggccgcctgacactaatcgccgatgagctcattgcggtccaggcgatggacgcgcaactcacgcgcgatcaggatcgagccgccgatgaatggcgtctggctccctccgaagaggaattgcgcaacgcccatcttgcggcggccgccagtgcgcgcgaggctcagacggcccgccagcaattgagcgaggctgatcttcaatacctggaggccgcacaagcgctgcagacggtgcggcaacgactcgccgccgatgccaccgatctgcgccttcctgcattatcagccgagttaccggcggtcgagatggcgttgaaccactatcacgatgcccaactccgcctcgcccaggctgttcacgaggtacgtctggcgctccccgagctgcagcggcaacgcaaccgcgagaacgaaacccgcgacgatctgaagaagcaggatgaacaatttgcggctgcccgcattgaggcggaagaagccgccgtccggttcgaggtgttgcgcggatccgtcggcgccagggtcgaggagctgcaacggcggctggccgatgccagcaccgccgtcaaggccagcaattccgcactaacgatcgcgcgcgacgtcctgagcaaatccggcgaggcgcgcgcggtcgcgcacgaacaggcggcgactgcgagcactctgttcggacaacgcagcaacgcgcgcgccgaagcaatcgcgaagttccaacacttcgcagccaccggcctgctcgcggctgcgctaccgcaagccaacctgccggacctgggcggcccgtggacgatcgaccccgcgcttactctggctcgccgcgcggaacaagccttattcgaactcaaggacgacgacgacgcctggacacgcctgcaacggcagatcggcgaagacctgacggagctacaacgcgccctcagcgctctcggccaccaggcgcacgcagaacagagcgattgggggcttatcgtccgcgtcgtctaccagaaccgacccgaaccgccggatcgccttgccgcgcgcctcgccgaagagatcgcccagcgcagtgaactgctgacggcgaacgagcgcgctgtgctggagaaccatctgcaggccgaaatcgcttccgaagtgcagcgcctgctgcaagcggccgaaactcagcgcgatgcgatcaacaaagaattgcaccatcgcccgacctccaccggggtacgctatcgtctgctgtggcagcccctggcggaagaagaaggcgctccggtcggcctcgaagcagcgcgcaaacgcctgctcaataccagcgcagacctttggtcctctgacgaccggagagtggtcggcgcgatgttgcagcagcgcatcgccgccgagcgcgagcgggccgattcgggcgccggaaaggatgtgggcagcagcctgatcgagcaactcgcccgcgcgctggattatcgccgttggcaccgctttcgcgtcgagcgctggcaggacgggcactggcgcaaactctccggtccggcctccagcggagagcgcgcgctcggcctcaccgtgccgctgttcgccgcggtcgccagtttctacagtcagggcagctacgcgctggcgccgcgcctgatgttgctcgatgaagcgttcgccggcatcgatgataccgcgcgcgcccattgcatggggctgatccgcgagttcgatctcgacttcgtcatcaccagcgagcgtgaatgggcctgctatgccgaactgcccggcgtcgccatttgccagttgcagcggcgtgaaggcatcgacgcggtgttcgtgtcgcgttggagctgggacggtcgcgccaagacacgccgagacgatccagatcgcagatttgcgccgacatga

SEQ ID NO: 51449 - DNA, 1281 bp, Bradyrhizobium valentinum
atgatttcctcgaccgacccacgcctgcaacgcctacttggcggcgaccgttacgccttgctgcgcaagcgcctgcgtcagcgtttcgaacgggcatcgctcggctccacggttgaaaactttcgcatcggcaagctcaccgcggaggaacatgctgcattggcttcgctgcttggtcgtccgctccgttacaccaaatccttacaagtcgacgttcgcctcgtcgacaccgctttccagaatgccggcatcgccgcttcgctgcgcgacgcacttgaaaaactcgatggcccgatttcgaatctcgccacgacgcgccttgcgctgcaaacaatgtggtcggatgtgctgggcggctgcactcaccgcgaactgatcggactgctgcaggctccggccggcatcgggcttctcaagcgccttgcacgacagagcccaccggcggcgctccaactctgtcgccgtgtcgaagcggtattgcaacgcctgcccgcgagcggcatcacacgttcgcaattggccgccgacgtgctgggcgacgcccacgcgctcgacatcggacagcccacggcaaccctggcactgacggtctggcgtcaggtaatcgctcgaaccgattacaacaatgatgacgtcgatagcgagccaacgggagacggcgagctggagccgggcggtggtgcggagcgcgaccgcgacgtgtgggccaaggccggcgtgctggtcaatgaattggctcgcccggtgctgttcctgaacctgcccatgcgcgatgcaggaaattacagtcagtcgcagggagagcctgtttacgcttcgctgcggtcgctgttgcggtctccaccgtcgtgggacgtggcggatcgcaaggtctatgtctgtgagaatcccaacctggtcgcaatcgccgcggatcactggggctccgattgcgcgccgctagtctgcactgacggcatgcccgccgcagcacagcgatgcctgctgtcgcagctggctaaagcgcgggcgcagcttttctatcatggcgatttcgattggccgggagtgcggatcggcaaccacgtcatgcgcgagcacggcgcccaaccctggcgttttggggcgagcgactacgagtccgccgtcgaacagacctcatgtcttggacaggctctcacgggaaaggctgcgcccgcgttatgggacgaaaggttaatgacggccatgcagcaacatcggctctccattgctgaagaagcgttagccgcttcattgttggaggatctcagggccacataa

SEQ ID NO: 51450 - DNA, 1437 bp, Bradyrhizobium lablabi
ctggacgtgtgcgcggcagccgaacgtcaactgctgctttacgtccggccttccgagattctcgcccaagcaaagtggctgagcgagccgccgaccgcgtccgaactggacgccatcctcgacaaactgaccgagtggggaaatctcgactgccaggccgacaactcgcgcgtcacctcgttgagcgggttctatcgccgccgcatgctctaccggctttcgaagggcggcgtctccgtcgaaatggcgctcagcgccttcgccaaggagatgcagcgccgcggcgaactgcagacggtcgcgcttgaagacatcggcaagggcctcctcacgctgatccacctcggccgaagcaacgatcctgacgtcgccaagatctacgagaccctcaatggtctgatgacggtgttcaacaacatggccgagaccgcgcgggccttcatggctggcgtcctccgcggtgtcgatttgcaggacggcgacgtggacgccgtgttgaactacaagcagcgtctcatcgagtacatccgccaattcgtcggtgacttggttagccgaagcggtgcgatttcggaagacatcaatgcccttcaattgcgtatcgacgcgatgctccagtctgtcgcccgccgtcaggcacgcaacgcacctccaggcgaagagcaggcggcctacgaagccgaattgaagatgtgggacgagcggtggcagggcctgcgaatgtggttcgtcggcgggtcgaacggcgagcggtcccagagcgaacagctcagaagtcgcgcccgcgccgcgatcccgcaactgcttgcagcgatcatcgcgatcaacgaacgccgaagcggccgcagcgaccgctcggcggacttcaaaagccttgctcactggttcctcgactgcgacggcgacgaagatgcccaccgacttgcacgagccgcgtttgcgctcaacccggcgcgtcactacgccgaaaacaccgcagctgctgacgttatcggtgtcattccgtggcataaggcgccgtccatcgtcgttccgctgcggctccgtgagaccggctacagcatgccccgcggacggctcccgcacgttcatgatcgaagcgccgggcgcaagaagctcgaagcgcaggttggtgaagagcatgcgcagatcgaggcagccagacaaaaattcgcaaccggatgccccttgcttctctcggagctctggcgtctaaactcgcacgagttccgatttttcctcgatctcttgggcgaagccatcgcgaccaaggccgccggcgacgatggcgtcaccgagatccaatccaacgacggcctctatctcatccggcttgaaccgctcgacgcggacacggaagccgaaatcgtcaccgaagacggcctgttttgcggtcgcgaccaccgcatcaccatcaccccgacggatgccgcatga

SEQ ID NO: 51451 - DNA, 1242 bp, Bradyrhizobium lablabi
atcctgcgccagcaggagacgcaggaacacgccgagcgcagggaggccgttcgcgcgctcctgatgcgcccgttactgacgcccacaaccgccgaagcaagagaggctctccgtctggtgcgacgtcactccgcatacctcagggagtggttcgcccgcgaggcgggatggccgctgcgcgtggagcgcgactacgctaggctgtggaaacgcccgagcgacacaagcgatcctacgcgaggatgggcaagtttcaaccgcaggcgctacgcgattttctgccttgtgtgcgcggtgctcgcgcggagcgacccgcagatcaccctttcagccctgggtgaccaaatcctgtcccttgcaaaggataccgatctcctcagccgcggcttcattctcgacatggcggacatccacgaccgacgcaaccttgcatcggcctgcgtcgcgctcggcgaactcggcgtactcaatgccattgatggagacgccgagtcgttcgtcaagtccggacagtcggaagatcggtcccgcgacgtcctctacgacgtcaatcgcgggccgcttgcgagcattcttgcatgcgtgcgggggccatccacgtggtccgagaacgatgcaccgaagacaatcatcgatcggatctcggccattacggcagacattcagccggagaccgacgagggccgccgcgatgtcagccggcgccgcatctcaaggcgccttctcgacgatcccgttgtgtacgacgacacagtcgacgaggccgacatgcaatacttcatcaatcagcgcggcgcgatggcgaaccgcctcgcgctcggcaccggcctcgtcgtcgaactccgttccgagggccttgcactttgcgatccggacggcaattgtagcgacgtcgcgatgccggcggacggcaccgatgcccacgtcacgctccttgtggccgaccacttggcacatgccgaaagcggcgttcccgatcgcctgcaaatcgaaaggttcgtggctcagtcggccaagcggtatggtcgatattggcggcgcagcgcccagggcgaagccggcgcgcgggagctgacggcgattgccatctaccgtctcagtcaactcaagctcatcagcatcgaaggcgacagcatcgaggttctgccggcgctttctcgctacaaactgggcgaaccggacatcaagcatcgcgatgacgacgatcggctgcccgacgtttccgaggaggccgacgaatga

SEQ ID NO: 51452 - DNA, 4122 bp, Bradyrhizobium lablabi
atgaactccgttcttcctttcaacccacaaagcgccggccccgtcctaccccttcccggcaaaaagcgctggcagcctttgcggaccggcgtcgtggagatatttttctatgacgtcgaggaattctggttcatcgacggacacatcgtgtatcggggcaacaacggcgccggcaagtccaaactcttagcactcacgctaccattcctcttcgatgcaaatctgagcccgttccgcgtcgagccggatggcgatcgaaccaagaagatggcgtggaatctcctcatggggaggcacaagcgccgcgtcggatatgtctgggtcgagttcgggcgcgtcgacgaggaaggcaacaaccagttctcgtgtggactggaagcggtcgaagaccgcgcgaacgtggaaagctggttcttcatcatcgatggaagccgtgtcggtcaagattgctcgttcatcacgcctgaaagagcggtgcttcgccgaacgcagctgaaagatgagctcgctgacaaaggcggacacttctttgaccgtgccgacgattatcgccgtgccgtggatcaaagacttttccaactcggagaggaacgttaccgcatcctggtcgacaccctcattcagcttcgccatccgcagcttacaaagacccccgacgagacgcgtctttccaacgccctgactgccgccctacctccggtcgcggccgaaatgatcgacaccattgcggaagccatgagccgccttgaagaggatcgcagccagcttaaatcctatgaattggcccacgccgccatcggaaaattcgagcgaacctaccgccgctacgcaggcgctcggattcgtacgtttgcgcgcgaggtccgggccgcaagaaccaagttcgaagaggcaagcgcgcaggtaaacaaggccgccgcgcaattggcctctgcgcttcatgaatcgacatcggctgaaaccgccaacatcaatgcgaaacgcgaagccgaagcggcggatgcggcatacaagggcatccttcaacatcccgacggcctcaaggcggcagatcttgcgaccaaacggatcctggcggaagaggctgaggggcggctgactgtatccgagaaacgctccgcaacggcggcttcagatctggagacagagtccgaacgccagcaagcggcaagggccgaccttgaccgtgcgatggaaacccttgccgtcaatcgaagaaaggcgctcgatctcgccagatccgtcggcatggtcgcccagtttgagcatgcgaagtcgtactccgcgtggccaagcgagcttgtgcgcgatgggcagaccactctccaatccgagcgtggtagtctgctgaccgcgatcaggggccgcagaagcagcatcgatgcggttatcgagctgcttcgcgaagtcgacaacaagatttcaatgctggcgaacgcggagcgcgacgagaatgcgggccgtagcctccgtgacgaagccggcaagactctcgctgccgccgagaatgcgctgaacgatgagatcgaagctctcagcgcggcgtggcgccgccatcttgggggctgcggacatctcatggtaatagcgaccgaggacgtcgtgggtgccctcgtcgaatgggctcactcgctcgaaggcgaaaacccggccgctcgcgagctcatcgccaagtgtcgacttgcatacaagcggctcaccgaggcgctggccgagctaaaacatcaggaggctgcggtacgcgccgaactggacgccgtggcaaagcagattgcggatctgcagaccggctcattcgagcgtcctgccatcccacacacacgcaaagctgatcgcgacggccgcccgggccaagccttgtggcaggccgtcgactttgtatcggaggccgacgacgacgttcgggccggcctcgaagccgcacttgaggcatccggacttctcgacgcgtggattctccccgacggccggatgttcattggcgagactgagcatgacgtgtcacttgtttcgaggcccttggttaccggcaggaccctcgccgactggcttgttcactgtggcgaatcgtcggtccaggatgccgtcgagacttttctgtgcgcagtctcctgtaccgacaccgacgacggcgccgagatgtgggtatcaccggccggccaattccgcctcggcgcactctcgggcacatgggagaaatcccgcgccacgtacgttggtcattcggctcgagagagagccagactgaaaaggatcgaagagctcgaagccacagcggcagggctcggcgagcaacttgccggtctcgaaaccgcgattacgagcaatgccgccacgaccgaggccatcgaacagatggagaggacctgcccgccggacaccaatcttcgcaagtcgcacgacaccgtgcgctcggcaaccaacgatctgcaccgggcaactgaaaacgtcgcaacaagggcaaacgataccgcggtcgcacgacaagctctgaacgcgtgcagaaagtccgccgagcaagcggcgctcgacaccgctcttccatgcgacaagcgggctctcgaacaagcccgcatcacttgcgatatcctcagcgaggcccatctcgtcgtcgtcgaacattgctcgaattccattcgcgccgagcaaagccttcaagacaccaacgagcgtgtggaaaccgcccggagccgccatcacgccgcaacagaggacgtcaacgtcgcggcgatatcggcgacatccgcgcgcgccatatacgacgcacttaaggaaagcgtgggagcgacttccgaacagtgggaacgccgccttattgacggacaaaaacgtctcgaggatgccaaggccgacgtagacagtacggacgatcgccggctctcggcggtggccgtgcatacccaagccgtcggtgcacacgaaaccgcgacccaggccctggcgatgcgcgtagaggaacggcagcgagcggcaagcaatttgcaaacgctcgcagcaacaggtctgatggccgccggcgcccccaacgtaccgttccccgacactagccggacatggacggtcgacgagacgcgggggcttgccgcagatctgaatcaagcgctcagcgacatccgcgacaacgagtgggatggcctgcagtccaagatctacggcgaatacgtcgatctccagaatgcactcgctcaactaggatacgtccccgacagtaagaatgtcgacggattcggtctagtggtcactatcgcagtccagaacaagagcggactgtcacctgccgaggtccttgcccaggtcgacaccgagatcacgcagcgccggacccttctcaccgaaagcgagacgaagattctggaggatcacctccagtcggagatgtccgtccaaatccgcaatctcattcaggacgccgaacagtatgtcgaaagggtcaacgcagaaatcgagaaacgtccgacctcaacgggcacctatttccgcctgaggtggatcccgcttactgaagcgcaaggtgctcctgccgatctggaggacgcccgcaaacggctcctcaagacgaacgcggatctttggaccgaaaatgacaggcaagccatcggggccatgctgcagcgacgcatcgaagaagagcggctgaaggccgaagagtctggcggcagcagtctccgcgagcagctttccgccgccctcgactatcgccagtggcaccgcttcgtcgtcgagcgcaacgcaatgggcaggtggatttccatttctcagcctgcctccggcggcgaacgtgcgttgggtctcaccattcccatgttcgcagccgtcgcaagcttctacggcgacgagcacagcacccggccgcgccttgtcctgctggatgaagcgtacgccggcatcgacgacggcgttcgggcgcactgcatgggccttatccacgagttcgatctggacttcgttatcacgagcgaacgcgaatgggcctgctacaagacgctgccgggtgtcgcgatctgccaactccagagacacgacaagttcgacgccattcacgtctcccgctggcgatggaacggaaagacgcgttcaaggatggaagaaccggcgcggctgatgttgaaccgtagcgcatga

SEQ ID NO: 51453 - DNA, 1233 bp, Bradyrhizobium lablabi
atgacgtcggccatagacgaacgcctggtccggctcctcggcggcgccgagctttccgatctgcgcgcgcggctgcgcaggcgctacgagctcggaccggccgacggcaagctcccatcgatccaggtgggcaagctgaatgaagcggaacgcgccgcactcgcgtccctagtcggccgcaaaggcggcgtggcggcttcaatctccatcgacgtcagcgcagtcgaccgagcgctctccgatgccggtatcgcaccgtcccttcgaactgcgctcgaacttcttgacggtccgatcatccatcgcgaaactgaattgaataggattcgcgacaattgggcggccgttctggccggctgctcgcacgtcgatctgatcgcctatttggcctcgccgctcaactttggtgtcctgaagcgcttatcaggcaatcaaccggattccgcgtcccttatctgcagacaaaccgaagacatcctcagacggcttcccgctgcgggagtaccgcgcgctcaaatcgcggcggagcatctcggagacgctcacggattggacagcgcccgcccggtcgccactctcacgctcgccgtccttcgaagccgctcatcgaccgacacaggcgatgaccgcgatacatgggccgcggtcggcatcctggtgaacgaactcgccaggcctgccctgttcttgaatgtgccgtgcagcggattgccagtctcgcccggagaaccacaatacgcatcactgcggcttctcgctcggcggccgccggaatggacggtggcgagcaaatccattttggtgtgcgagaatccgaatctcgtcgggatcctcgccgaccaactcgggaccgcctgccctccggtcgtttgcgtcgacggccatctcggtgcggctcagcggaccattctcaaacagctcaaggaatcgggggcagacctgcgatatcatggcgactacgattggccaggaattacgatcgccaactacgtgattgcgaaatacggcgccgtaccgtggcatttctccgcggtagattacgtcgccgccgcaaaaagtgctcctcagctcagaataccgctcagcggaaggcctgccattgcttcatgggatgcagaccttaccgcggccatgataaagaccggaatcaagatcgaggaagaggccatcgccgagcggatcatcgaccttttaggcgaagagtggctacgctggaataagcgagcttactaa

SEQ ID NO: 51454 - DNA, 1482 bp, Caloramator mitchellensis
gtggagattacgaataagctgctaaagcagattgatgaagttagatatttaacggccgagaatgcctcaagatacagggcgattatgcgttatttttacctgcaatatcaaaagatgaagcagtggatatataaagaagaaatctatgaggagctcacaaaccacagcgaattttcaaactacacaatggagcagctaaaacaggaccttgacacacttgttcaatggaaaaatctaatacccatacaggacacatccaaggtttcaacgctggaggagtataaaaacaagcaattcagataccagatttcccagtattccgtcgaaatagagagactaactataacattagaaaatcttcacgtagaaaccgcatcgcttgagccatcgctactcgaaaaaataaaaatagagcttcaaaaattcaaaacaatgataaatcaagacgaaaagtcagcagacgcatggtggcaggatttaaacaactattttaaaaggctcactcaaaactcaactgactacataaacaccttcaacaccctgcgtgctgaagaaatgatgaagacgcgcgaatttctaatctacaaagataagttcatcgactacctcagggactttataaagggcctgcagcaaaacgccattgccatagaatcaatcctgcaatcaatcgactcaactactgaaaaaatggtgcttgacaagataatacaatacgaaagttcaatcccaaggtttgaatttgatactagctcagagcaaatcaaagacaatgtatacggcaaatggcagaatctaaaaaactggttcctcgactacgaaaaccacgaaagcgaggctgcaaagcttttcgatacaacaaacgacataataagaaaaataacgcgttacgcatcgcaaatttcagagagcagaaacagcgctgctaaccgcaaagaagaatacaaaaaacttgccaagatgtttttagaatgcaaggatataaacgaagcccacaaactatcatccctatgctttggaatttttaacacaaagcacataaaaataaccacaccaagaaaaaccgagagcattaactccagcatatacgacgaagaaccaagcataataacccttaaaccaagaatcaaaaactacaaagaaaaatcactaaaatccccaataaaaaacaatagccagagaaaaataattatgcttgaaaagataatgaaaatacgcgaagaagaacaaaaaataatcaacagctatatagccgatggcaaaatagaatttgctaacctcccaacaatttcccctcacgtcagaggaatacttctgcgctggctatcaaagggtataaattccaatgaaaaaatatcaaaaaccgaaaccggcagaaaatacagaatacttgaaccacaaaataaaaatcatctatgcacagttaattgtgaagatggaacatttacaatgccaccctatgtcattctatttgaggattaa

SEQ ID NO: 51455 - DNA, 1167 bp, Caloramator mitchellensis
atgaaggaactcgaacttctacttgaaaactattggataagcaaagatgaagacaaagagctctactataaaataaaagaccacatccatgaatttaaatcctttataacagaaaaacttggctatcaaataataataaacccctaccttataaaacttgagaaacttccaggaaaagctgaagaatggatgggcataagcaccttccattccccaatagaatacgcatttttatgccttctacttatgttccttgaggacaagggcaaggatgaacaattcgtcctatcagaaataaccgacttcattcaagggaactttgaaggcgacgaaaaggtggactggactttatacaggcaccgccgcagccttataaaggttatgcgttttgctaccgacatcggcatgataaaggtagatgacggggacgagcagagctttgcacaggatgcaacatcggaagtgctctacgagagcaccggtctttcaagatactttgtaagaaattttacaacaaatatactaaattataaatcctacaaagaccttgaaaatgaagagcagctagaccttgacagagacagaggtataataaggcgccacagggtttacagaaggctcataatgtccccaatagtatacaacgaaggaacggacgacccagattacgactacatcaagaaacaaaaaagctccttagaaaacgaccttgaaaaatacctcggctgggagctgcatgttcacagaaacggcgctatggctgttttatcacaaaatcaaaattacaaagatgtattcccagaaaacaaatctataagcgacatagttttgcaattgaacaaggttataaaaagcatgatttcagcaaaccagctaaagccagacaaaaacgacacgtgccaagtttcattaccatattttcaatcgcttatacaaaaactaaaattgcaaaactcagtaggttggagcaaagaatatagagaaatgcaaatagataaattaaccgacgagataataaactacatgtccggctttaatatgattgaaattttaccagacaaaaaagaaatcaaaatattgccgctgtgcggaaaaatagttggagtatatcctgacgatttctacacagatatccagaaggaggttgcaatggatgaatcagaatag

SEQ ID NO: 51456 - DNA, 4071 bp, Caloramator mitchellensis
atgaatcagaatagatggataattgaaagagcaggtcttgctaacttctggtattatgatgaagaggaatttaccttttcagatggaaggttgctcctaagaggttcaaatggttcgggaaaatcagttacaatgcaaagtttcatcccccttctacttgacgggaataaaagccccgaaaggcttgacccatttggttcaaaggcaagaaggcttgaaaattacctcttaggagatgacgaagacggagatgacgaaagaaccggatacctttacatggaatttaaaaagaaggacacgggaaactatctaacaataggcatgggatttaaggctcaaagaggaaaaccaatccaatcctggggcttttctataaccgacggcagaagaattggccataatttttatctatacaaaaacataggcgaaaagataccattaactaaaaaggaacttgaaaaccgtatctctacaggcggcaaagtggttgaaacccagggcgattatatgaaaatggtcaacgacctgttattcggatttagcgacatagacgaatacgacgagcttataaagcttcttgtgcagctcaggtccccgaagctttcaaaggactttagaccaacggttatatatgaaataatggaaaattcactgcaacccctttcagaggatgatctgcgcccaatgtctgaggctattgaaaatatggacaacataaagagcagactggatgagctaaaggagagcaaaaaagcagccgacaggattaaggacgcctatgataaatacaataaatttatattaattgacaaggcaaaatcgtttatactgagcaacaacgaattagaaaaactcataaaagacaaaaaagaactcgagcaaaaaagagactatgcaaaacaagaattccaagcagccgagaagaaaatagaagaatacagcatgctaataaaatcagctgaggataaaaaaaggcagctagaagttcacgacagcctcaaaataaaagaaaaaatacactcaatagaagatttgatttcaaactataaaaaagaaaagcatcttaagcaaaaccaactcgacctaaaaaaatcgcgtgaaagaaaactttactctgaaattaaagagcttagcgataaacacgacattttaatcaaaaagctcgatgcaatagtcgaagagatggacgaatacgccgttgattttgcatttgatgagcaggagtttttaaaggatgagattaaagcaaacgcagacaaaaactatgattttaattttgttaacgataaattcaaaaagcattatgaaaatatagaaaatgcaagagaactactaaaagaattagatagaataaacaaggaatacgacaaaattttaaaggagcttgaatctaaaaagcaggaaagaataacaaaggaaaagagagttgaagattcaaagcttttattaattgaaacaaaggaagagctaaacgaaagaatatatgcctggaaaaactcaaataaagaattcatcccaagccaagatgtccttataagctgcacaagaactgtaaaccagtttaaccaaaaaagcagctttgacgatattattaaaataatcagggaagaatacaaccattttgaaggagagcttattaaagaaagagctaatttgcaatttgaaaagcaacaggaagaaaataaactaaacgaaataaaatctgaaattgccgagtggaggaacaaaaaagatccggaacctgaaagggatgaaagggttataagaaacagacaaaggcttgaaaaggaaggaattcctttcataccgctgtataaatcagttgattttaaggacatacctcaagaaataatgggaagggtggaggaagcactcaatgatatggggcttttggatgcattaatcgttccttctaaattcaaagataaaatattccagatggataaagatatggcagataaatacattttcccaacgccacaaattttgatgcatgatatttctgaatttttaaagcccgacaaaatagacgtaaacggcataaccgaaaaggatataaccgacgtgatacaaagcattttaattgacgaaaataattcaacatatataaacgaaaagggagagtatcagatcggcatattaaagggtaaaacaagcagcagctgcagcccaaaattcatcggttcatcagctagaaaaagataccgtgaagaaaagattaatgaattagaaacaataaagcgcaatattgaggaaaaaataatagaaaaagaagaacaaatacaaaaaataaaccaaaggatagccacattaaaaagtgagctcaataaattccctaaaggcgatgatttattaacagccataaaacaactacaggaagcagaatacgaactcgaaagaataataaaagacgtagaattaaaggaaaaagaagaaagaacaatttatgaaaaactaaagcatgttcagcaatctgtttatgaactaacccataaaataaatttaaaggcagacatagagatatacgaagaggctattgcgtctgctaaaaagtatagagatttacttcacagccttgaaaaacttcatattgatataatgcacaataacgaacaggcaaattctaaaatatacgagagggaagagattgaacaggatgtccaaaacttaatagacgacatcacctccctcgatagaaaattaagggaaaacgaaataaaccttagcaatttatttgagcagctgaaactttcaaatatagatgaaatagaaaaggaaatagacgagtgcctaaacatattaaaaacatatcctgtagaaaaggaaaaagaaatagacaaaagagcaagaaaccatgatttatacacaagggcaatcgaagaattaggtagcattaataagaaaatcaatgaaaaaggaaaaatagtagatatatttaaacagtcctttattgaagaatataaacttgggtttatagaagaagctaaagaggatgagccaatcaaaattgcccatagattggtaagagaaattaaaatagatgaaaaacaaaaggacgattatataagcaatctatatcagaagttccaggaaaacaatcagcaccttagagaatatatcgtgaagattgattctctctttgaccgggaaattgaagcagatgacgaggaaataaaggcagcctttgcaagggcaaaaaggcattatttaaccggaaaggtaaggggcaaggacgtagatttttatgctctaatcgattttatcaaagagggaatagaggaaaacgaaaagcttctaaaggaaagcgacaggcagcttttcgaggacatacttgttaataatataagcaaaaaaataagagccaagatttaccacagtgagcaatgggttaaaaagatgaatgagctaatggagaaaatggatacttcaagcggactttcctttagtctaaggtggaccagcaaaaaggcagagggcgaaaatcagcttgatacaaaggagcttgttgatttactaaagcaggaaggaagcataatgaaggagagcgaccttaacaaattatcagaacacttccgctccaaaatagctgatgcaagaagaatacaggaggattcaggcaaaagcgtaacattccacagcataatgaaggagatactcgactatagaaaatggtttgagtttaagctatacttccaaaggatggggcagaataaaaaggagctgacaaacaacgcattttaccagttcagcggtggggaaaaggcgatggcaatgtatgttccgctcttctcagcggtttatgcaagatatttaggtgccagaggagactgcccaaggataatatcgcttgatgaggcttttgctggagttgatgaaaagaatataagggacatgtttaggcttttaagggatttaaaccttgattttgttattaattcccaaatattatggggagattacgatacagttccctcccttgcaatttgcgaacttttaaggcctgaaaacgcagattttgttacagtaataagataccactggaacggaaagactaaggaactggtttcataa

SEQ ID NO: 51457 - DNA, 1308 bp, Caloramator mitchellensis
gtggataaaacaaaggaatgtgttaattatttcaaatccaccaaagcgtataaaagaatgttcgaggctataagagaaaaatacaggtcgcttggcaatttaggtggaacaattgaattaaaaaatttaagccctgacgaacaggaggctctgtcagggctccttaaaagggattattacagcaaaaaatcggcaagcgttaagattgaaaaaataattaatgctctagagaacacaaaatttgcaggaattgattttgaaaaagtattaatgggatattttggagaggatttgatttctaagaaagaagaaaaaagaatatccgatgaaatgcgtgaaaaattttttggcgagatactaaaaaaatatgaagcaagcaaagcatacaattggcttgagagcagtttgaaaaacaaggataactcatataaatttataattcaaaaatacgagaaaaataaagctgaattagaaagcatgcttcaacttacaatgaatgctataaacagtcttagctttgatgttaataatattgagcgactggcaattttttcttcaagaattagtaaaaacccacacacatttgatactgacagcgaatgtggcaaactgcttttatacgcaatctcttttttattagggatagattttcctaagaatgcagaagaacgcgccgaagccctatatagagcaggaataattgacgatgaagtttctaattttactatgattagcggcttgttaggctacaagaatggacaagttcacccgggttgggaaggtttcagcaaattaaaggaaccggttcaaatttcgctttggaacctttcaagagtagatagtgtaagcgcaaataacaacatagtatatgtatttgaaaaccctacggtattcagcgaagtgctttataaaacttcggaatacaacccctctttaatttgcacctatggccaaataaggctggcatcctttgtattacttgacaaactatgcgatagcgtagaagtaatatactattctggcgactttgaccccgaaggccttttgattgcagacaagctaatcgaaagatacggtgaaaaaatcaaactctggcactttgaatcatctgactacctaaaaattatatccaacaaaaaaatagacgacactcgcctcaaaaaacttgaaaaaattaaaaatcccaaacttaaacagcttggcgatttgctaaaacaaaatgcttttgcagcttatcaggagcttttaattgacgaatacgtagctgacatcatcaaatatcatggggacagttcatttgaaatatga

SEQ ID NO: 51458 - DNA, 1536 bp, Lysobacter enzymogenes
gtgcaggaggcattgatcgccgggtcggccgacctgttccgccacgtgacggcggacaaagccgagttctaccgcgcgatcatggctgtgttcgccgcagccaagcgccagtaccgcctgcaactgcgtcctgaggaagttctggcggaggcggattggcccggtgctccaccggcgcgcgaggaagtggcggcagccctggtccgcctgagcgagtggggcaatctcgaatctcagccggacatggcgcgcaagcagaccttggccgacttctatcgcgcccacagcatctaccgtctctcgcgtggcggcgaggcggcggaggctggcctggaaacgttcgccagcagcctgcgccatcgggctgaactgcagaccgtggcgttggaggacatcaatagccgcctgcaggccttgcgtcagctgctcgattcagcgccttcctccgaacagatcgatgtgcccaaggcgcaccagatcctgcgcgatctggtgcgggtgttcgaggacatgaccagcaatgcgcaggcgttcatggccaaagtggcgcgcggcctcgaactgcgtcaggccgatgccaccgacctggtcgcctacaagcgcgagctgatcgactatctcgagcgcttcatgtccgatctcatccgtcgatccgacaccatcgccgcgctgctgcacggtttatcggcgcgaatcgacgaggtactgcatccggtggctcagcgcgaggcgcgcgacgcggcgcccggcgatgccgaaggaagagccggcgaggccgggcggcgcctggatgcgtggcgtgaacgttggaaggggttgtgcggttggttcctgaacagcggcaacgagctgccccaggccgagttgttgcgcgctcgcgcgcgcgcggcgattccgcagctgctgggcgcgatcgccgccgtcaacgaacggcgcagcggccgcagcgatcgttccgccgattttcgcgtgctggcgcaatggtttgcggcttgcggcagcgacgacgacgctcatcggcttgcgcgcgtggcgttcgcattacacccagcacggcatttctcgctggatctggccgaggacgacgtgccggccaacacctcgtggctggatgcgccggcgctgaccatcaacccacgcttgcgcgagtacggcgaggccgccccgcgcggccccctggcgcggatacgcgaccgcagccgggatcgtgagctaatggccaggcaacttgccgaggagtcgcggcaggtcgaggccgcgcggcagcgcctggcgaccggccggccgacccgcctgtcggaactgggcgaactcgatccgcatgcattcggcttgttcttggcgttgctcggcgaagcgctggctgcgcaggacgatccggagcaaccggtagaacgccaaaccggcgatgggctgctgtccgttcgaatggagccgctggcggcggacagccgtgctcgaatccggacgcgggccggcgtgttctccggccgcgaccacttgctgacgattcggccgacgcggggggcggcatga

SEQ ID NO: 51459 - DNA, 1269 bp, Lysobacter enzymogenes
atgagtccgcgtccaccccaccgccgtagccgttcggtcggcgaatggcagcagacgcagcaacaagatgaattccgtcgcgccctgcgcgcgctgctgatgtggccgctgatggcgtcggcccaccccgaattctcggccgtgcggcgccaggccgagcgcctgcgcgaatggttcgcgcgcgaagccggatggccgctgcaagtcgatcgcgaaggtgcgcgcctgtacaaacgcccggccaacgtttccgatccgagccgtggtctgcctggctacgaccgccgccgctatgtccttctgtgcttggcttgcgcggtgctggagcgcgccgaccctcagatcaccttgcgcctgatcggcgaacgcgtggtgcaacaggccggcgaccacgcgctggcggagcagggttttgcgttcacgctgggtaccccgggcgagcgccgcgaactggtcgcggtatgccgaaccctgctcgatcacggcgtgctggagcgcgtcgccggcgaagaagagaacttcgtccgcgaaggcgtcgggcaacaggccgatgcgttgtacgacgtacaccggcggctcctggccggcttgcttgcggccgtgcgcggcccatccacctggagcgccgaggacgcgccgattggacttgaggcacggctgcatgcgctgctggccggattcgaggtggacagcgagcaggggcgtcgcgacgcgatgcgtcatcgcctgacgcggcggctgctcgacgatccggtgctctacctggacagtctggacgaagagacgtacggctacttcgtcaaccagcggggcgtgcttgccgcgcgcctgtgcgacgcgaccgggctggtggccgaacagcgagccgaaggcctggctctggtcgacgagagcggccagctcaccgacgtggcgatgcctgcggaaggcacggaggcgcatgtgactttgctggtggcggagtacctggcgactcgcctgcgtcgagcgcgggtaccgatacatgtggccgaagccgagatcgcctccttcctgcgcgaagccgctgcgcgctatggcaagttctggcgaaaatcggcgcgtgcccccggtgccgagcgtgaactgaccgatattgccgtggagcggttgtgccggctgggcttgctgacgcgcgtcgacggcgccgtcctcccgttgcctgcgatcgcccgtttcgccctgggccggaccgaagtgcgagatgcggccggtaccgcctccttgcttccgcttgccgccgatccatga

SEQ ID NO: 51460 - DNA, 4146 bp, Lysobacter enzymogenes
atgaccgaccatctgcagtttttggaatcctcccgccccgcgttgcccgagccgcgtcgcgaacgttggcagccgctgcgcctgggcctgatcgaactgttccactacgacagcgaggagttctggttccacgacgggcacctgctgctgcggggcaacaacggctccggcaaatccaaggtgctgtcgctgaccctgccgttgctgttcgacgcgcacctgcgaccgtcgcgggtcgaacccgacggcgacgccggtaagaaaatggcctggaatctgctgatgggcggccgtcacgatcgccgcatcggctacagctggatcgagttcgggcggcgcgagccggacggacgcgtccgctatctgacgttgggcgttggcttgttggcggtcgcgggacgcgcgcaggtggagagctggttcttcctgcttgagggcggcgacgactcgccggatccgcgtataggccaggatttctggctgaccacggccgatcaccacgtgcttacccgcgagcgcctgcgcgaggcgctggcagggcgcggtctgatgttcgagcacaacgttccgggctatcgtcgcgccgtggacgagcgcttgttccacctcggcacgcaccgttacgcggcgctgatgaatacgttgatccaactgcgccaaccgcagctgtcgaagaagcccgacgagaaaggattgtccaacgccctgagcgaatccttgccgccgctgccggccgacctgctcggcgacatcgccgaagcgctcaatcaattggaagaggatcgaacgcaactggaagacatacgcaggttggagcaggccgtgacccgcttcgagcagcgttaccgcatctacgcgggcatgctggcgcggcgccaggcccgcgaactgcgccaggcgcaaaccggtttcgataacgccagcgaggcgcgcaaccgcgcgcagggcgagtgcgaagccacgcggtccaaacacgaggcggcccaggccgatgccgaggcggctcggcaggcttggctggctgcacgcgaacgcttggagacgctgcaaagcgatccggccaaccaggacgccaatcgtctcgcacgcgccgagacggatgccgaccaacgcaagggcgaagcggctgccgcgggcaagcgcggtgtcgatgcgcgggcgtcgttgctgcgcgaaagtcagcaaagccagcagcgcgccgattccgccgcgcgaacgcgccgcgagttggaagctcgtcgtgcctgggctttcgacatggccgtggcggtcggcctggatggcgaattcgtcgggcacgcgctgttcgctgcacaggtcgacgccttggcgaccgatccatcggtgtccaatgctggcttggaggcggcgatccagcgtcgccgcggcgagatcgcgtcgttgcggcgacgccatgccgaggtcgagcgacgacatgcggtcttgctggaacggcaaaatgcaacgcaggaggcgcgcaacaccgtggcggacgtggtggcgcgccgtgagcaggccgacctcgaagctgagctggctggcgagtccttggtccaggcctggaccgcgtattgcgacgacctgcgtcacctgcgattcgatgccgacgcaccgttgcaagcgttagccgagtgggtcgcacgtccagagggcgagaatccggcgagatccgcgctggatggcgcacgcaggatggctacgcggctccaggccgggcgcgaggcggatctgaacgcgcaatgccaggcgcaacgcctgcggcgcagcgcactggacgccgagcgcgagcgcctgctggctggagaaatcgccagtccgccggcaccgcagacacgcgccgccgacgtgcgcgcagaccgtcgcggcgcgccgctgtggcaagcggtggattttcaggcgcagctcggggcagaagagcgggccgggctggaagcggccttggaggcttgcggcctgctcgatgcttgggtgtcgccgcggggcgagctgatcggcagcgacggcgaagtgttgctcgacagccattggcagcgccgtgccgctgtcgccggcggcaatctggccgaggccttgtcgccgacgccgtcggacgatagcggacttgcgccggaggccgtcgccggactgctggccggcatcgcctatggaccactggatcgttccgatgccgagggctgggtatcgcctgatggacggttccgcctcggcgcgttggccggcgcatggcgcaagcccgcggccacctatatcggccacgccgcccgcgagcgagcccggcgcgagcggatcgaggagattgcggccgaactcgcggaactggacgtcgccgacgcggcatcggcacggcagctccaggcgctggaggacgaacgcgacgaagccgagcgcgaatggcgcgaggcgccttccggtcagccgttgcaagaggccatcgctgccgcgatgctggccgccggcgaagccgagcgcgcctatgcgcgattgcaacgggccgagaatcacagccgggaagccgaagcgctgtggctaacctcgcgcgaggaactgcaccgcaccgctacagacctgcgcctgccggccgagtcggagcgcctgacggagctggaacaggcgctgcacgattgcgagcgggcgctgaacgcgttggttcaggcggcgcgcgattggaggagcgcgtggcccgagcatctgctgcagcagcggcgtgaggtggatgctcggcaagcggtcgaacaggccgagcaggcgctgatcgaggccgaggagcaggccactcaggcgagtgcccatcttcaagcgctgcgcgactcgatcggacaaaaagtggaggaactgcgtgcccaattgtcggccgcacgcgaagaagcccagcgcggcgaagaggcatgggatcggcgccgcaacgacgctagcgctgccgacaaggagcatgccgtcgccagcgcccacgccgaacaggccgcgcaggtactcgccgaacgcagcgccgccagaacggcggcggtggagcgcctgcatgggttcgctgtcagcgggctgctggtctcggccctgccggaccaggagctgcctgcgcaatggagcatcgacccggcgctgagcctggcccgacgtatcgaacaggccctgtcccggatcgacgataacgacagcgcctggggcagggtgcaaaagggcatttccgaagacctgggcgaactgcagcgcggcttgggcgcgctcggccaccaggccatttccgaacccagcgatttcggcctcacggtctccattcagtaccacaatcgcgccgagcgcccggaaaccctggcgcgcttgctggccgaagacatcgcgcagcgcagcgagctgctttctgccaaggaacgggaggtgctggaaaaccatctgcaggcggagatcgcggcgcagatccaacgcctgatgcgcgatgccggcgagcgcgtcaatgccatcaacgccgaattgcacaagcgtccgacgactaccggcgtgcgctaccgcctgcaatgggagccgctgtcggtggaggagggcgctccggtcgggttggaacgagctcgccagcggctcctcaataccagtgccgacctgtggtcgcccgaggaaaggcgcacggtcggcgaaatgctgcagcagcagatcgacgccgagcgggctcgtgccgaggccgatgccatcggcggcagtctgctcgaccagctcgcgcgtgctctcgattatcggcactggcaccgcttccgcatccaacgcctgcaggacggacagtggcgcaagctatccgggccggcctccagcggcgaacgcgcgctcggccttaccgtgccgctgttcgcggccatcgccagcttctacgaacacggcggcagccagttggccccgcggctgatgctgttggacgaggccttcgccggcatcgacgacagcgcccgcgcgcactgtatgggcctggtgcgcgagttcgacctggacttcgtcatcaccagcgaacgcgagtgggcttgctacgcggagctgcctggggtggcgatttgccaattgcagcggcgagagggcgtcgatgcggtgttcgtctcgcgctggttctgggacgggaacgcgcggcgtatcgaagatgatccggaccgcaggtttccgccgacatga

SEQ ID NO: 51461 - DNA, 1302 bp, Lysobacter enzymogenes
atgagcacgccggatgcacgtttgcggcgcctgttgggcggccccgaactggccgtcgttcggcagagattgcgtcgccagtttgagcgcatcgaatcggacacgccactggtctctgtgcgtctggatcagctcgatccggatgcgcaccgcgcgctgtgtcagttgagcggaaagccgtcgcgcctgtcgcgctcgatgaccttgaatatccccgacctggacgcgcgcctgcgcagcgcgggcttggccgattcgctgcgtgacgcactggagcacctggatggccccatcgtttcgctggccggatcgcgcagggaactccaatcccgctgggccgcggtggctaaagcgcctgggctgggtccacggttgcgggcttggttggatgagtcgccggcagcgacggggctgttgaagcgactggggcgcgatcccgagcgcgcagaagctctgttggtcgcggccgatgccgtgctcgaacgcctgccggctacgggtatgccgcgctcgcaactggccgccgagactctgggcgatgctcatgcgttggattcggggaaatccgtcgccgcgctcgtacaggctggatggcgctggcatgagggcgcagccgcagggcagaccagggctgagtccgagcaagcatgggttggacggacagcgggcgaggacgccgatgccgacgccgtcatcgagcgcccgcgtgacgtatgggcgcgggctggggtggcggtcagcgaactggcgcgtccggtcttgttcctgaatctaccggtcccgtatggcggtcgttgcgcctggattgcaggagagcccggctatctgtcgttgcggcaactgttgcgagatcggccggcctggccggtcgccggtagatccatccacgtctgcgagaacccggatatcgttgccgttgccgccgaccgtttgggagcgacctgcgcgccgctcgtgtgtaccgacggcatgccggccgctgcgcaacgtatcctgctgggccagttggtctctgccggagcgcggctttggtaccacggcgactacgattggcccggcattggcatcggcaacttcgttatccgtacctggcgggcagcgccgtggcgcttcagcgcggtggactatcgggtcgcggtcgcgcaagccccgtcacgggcacgaaatttggttgggggcatggtcgaggcgcagtgggatgccgaactgacagccgcgatgagcgagcggggtttagccattgccgaggaagccgtcgtgggtcagttactcgacgacttgcgcctggatatagatcggtga

SEQ ID NO: 51462 - DNA, 1563 bp, Streptomyces venezuelae
atgccacatctcgccacctttggtgatcccggcgctgacgactggatcgtcgacgagtgggccagaacgggccccgaggcacaggatccgacccgggcgctggggtacaccgtgagcagggtccgccaggagcacgcagccatcatgagcgtgctggaccaggccgtcgatcacctgactcctgcggagatcacgatggagctcgcagcccggggcgtcactcttcatccaggggtcgtagctcagcggctgaaggctctgcaggagacgttcctggcggtgtcggggcagccggacaacgagatcgaacgctggcaggagctgaacggtgcgcggtggcggtacaccgctacggcgtgcgggcggcaggtgcagcggctgtggaccgtgctgtcggcggaggggatggtgcagcgggaggttgcgctggacggactggcccggatccgtgaggcgctgacggccctgcaaggggaggatgtggcgccccaggaggtggcgaagtgggcggggcaggttttcgtggagcacgaccagctggatgcgtcgctggtggggcagacggacatgctggcccggctcgcggaccggttcgacctgggcgcggagggcacgggcgagctcaagcagctgatcgtggagtacgcgacccatgtggtggttcacctcgaccgggaggtggcggccgtacacgggctgctgatgaggctgcggccccggttcactcttctggcggcgggatgcggggcgcagtcccgggcaggggccttggtcgcgcgcggggtgctggctccttcacgcgggacgcagagcggggactgggagcagttgctgagctggttcgcgccggcgtcgggcagggcgtggcggttcgggcagcagctggtgcgggcgattccgatgatgcacgccaatctgcagcggcagcagagtgtggtggggccggggacgctgcgggccaaggcactgtccctggctgcggcgtgccgcgatggggagcggggggaggcggtgttccgggcgtcggtggcggaccggccgtgggcgaagctgcatacctgcgcggagggcgagggcagcgaggtcgtctcctggcatgaggggccgcgggtgcccgctctggcgatgctgcgcgccagtggtcagagcagtccgcgggggccggtcacgccgcggcgtgaacgtggggaggcggccagggaggtggcgcgcgagcgggagcgggtcgaagcggagaggagggcggcggcggccgaggtcctggccggggtgtttccgctgacggaccgtgcgtgccggttggcgttgagagcggtgatggccgccgcccggggtgcggaggcgggcggggcgcgtgtggggcattgggagggtgtgagctgcacgctgacggcggcgcagggggtggtggggcgcgtcgagggggtggcgtggtccgtgctggtcccgggaagacaagtggccttccatcctcaggcggccggcgggccgggggatggaacggacgccgctgtgcgtggcgggcaggcgcaggcgccggtgcgtgtggaggtggcggcgtga

SEQ ID NO: 51463 - DNA, 978 bp, Streptomyces venezuelae
gtgtggttctggctgacggtcggtgtgctggagtcgctgcccggccgggttcggctggggcaggtgaccgcggcggcgcggacggcggcggccgagatcgaactgccggtgacgcagtcgcgcacggaactgtcggcgctcgccgccgggctgcggcagctgtgtgactacggggtgctggaggagttggagggccgggtcgaggccttgatggacggtggggaggatccgccggtgctgctgaaggtccatcacacccggcttctgcacgtgctgcccaggggggtgcaggtcgacgagtgggggcagtgggccgtcgatcctggcgaggacccggcggggtggctggccgggctcgcgcggccggctgacgcgggggtgcgggtgtgcgcgatgctcgccgaccaggcggtggtgcatgcctgtgatctggacgaggacgagctgcggtggctcagcgaccagggccccaccgacggtgcggccctggcccggtctttcgggctggccctggagcaccgggtggagggagcggcgtgggtgatgccgcaggagacctatgacgagcgggtggcggggcggttccgtttcccggggcgcagccgcagccatgccggaacggttccgcatgccgcactgctcctcatcgacagcttcttctttgagggtgagcggggcggggcgggggcgcctgggcccggctggtgcggcatgccgaagagcagggttgtgggccggctgggcgagttggcgaagcgacatgcctggtggagtaaggatctgcgcggcgatctgccgcgtctggctcaggatgtgcgcggggtgctggagcccgaagcggacctgctgcgcgtgacgggcggattcgaggagtggtggtggctgtcgcccgccgcggcgcggtggacggtcctttccgaacaagccccggtcgtccccgcccagtgcggtgaggttgggaagggtgtggagcggtga

SEQ ID NO: 51464 - DNA, 4194 bp, Streptomyces venezuelae
gtgagcgcggtggccgagatcgagcggtggtggcggcgctggcatctgatcggcgccggtgtggacaacgtctggtactacacccgtgagtggctgccctgcccgtcggggcggtggctggcccgcggcccgaacggcaccggaaagacgaccctgctggagggcctgtgtcccttccttctcaaccccgttcacatgcacctgagttctgcctcggggcgggcgacgagtctggtgtcgctgatgaagggcggcagcagcgggaagcggcgcttcgggtgcatgtggctcagcttcgggccgcccggtgatccggccagcggggacgcggacgccggggagcagcactatgggctgcgtctggagtacgcggcgagcagcaacagcgtggagacggtgcccttcaggctgccggtggttcccggccacgacggccaggacctgtccatcatgaagcaggacgacttctgtgcgtgggtagcggcgcagggcggtgaggtcttcgcgtccaccgacgcctatgtcgccgatctcgcccagcggatcttcggctgcggcccgggcacgctcaagcggatcgcccggcggatcaagaaggtccgcaaccccgggctgctggccgggctttctcctgcagacgccgccgccgagctgcgcatggcgctgcctaccgtcagcgcggacaccgtgcggttgacccaggaggcgctcgccgctgccgaggcgacccgccggcgctacgagcgggacgcgaagaccgcgcaggtcctcgaggacctgtccgccgcatggtcctacgccgccgcccggaccggtacccaggctgtcgatgccgctctggcctgtgccggcgtgctggccaggaaccgggctgaagcgctgcaggctcacacggacgccgaggcgcgcgggttggaactggatgatctgcgggtgctgatccgggagagggctgccgcagaactccgggccggtcagcacgccggagcgctggcccgggatgccgcctccagcgatgtggcccacgcccacacgaaggtcgggcaggctcgaaaggggcacgagaaggactgcgaactcctcaccgcacacaccagggcggcctcgcggtgcgctggtgatgtgcaggatgcggcagatgcggtgacgggcctgatggagaaggtggcgctttcctgccggacggcgcaggtaccggtgccggtggccgtcactgccgcggtgagcgtacggcgcagcgagccgtcgccgctgcggatcggcgagcgggacttcgaccaggcccctggcgtggacgcggtcgtcgatgaggaggcggtcgggcaggcggcggagcagctggagcaggcgcgtgcccgtctcgagcggcgaggggaggcagccggcatgaccgtggtggcataccagagggtcgccaccgcgcaggaagagagcgtccaggcccggagcctggccgacgcagcggctgagacggcgcgggaggccgtcgctcgtcatcagcagaccctggaacatgcccaagcgtgcgtggcggatctggcagggggtgtgcaggcgtggacgcagacggtccgcgagcagttccgcaccccgctcatggacctcgggggcgtcgccgcgcagacccgcgagtggtgtgagggccaggagtgctcacaggtgatccacgacgccgggaaactggcgcggaaggtgaccaggtcggccgcacggagcggtgagagggcccggtcgcgtgccgatcaccacaccggccgggccgagcaggcacggcagtgggccgcggaggcggcacagcgggcacggcgcctggagtcgggagaactgctgccgctgccgggccccgcatggcacagggaagtcgatgagaagcgggcgttcgcctgtgctgtggagtgggcgttgccgcagacgggtgccagtgcggtgggtgatgtggccgaagcggtcatggccgccgccggcctgctgtcggccgaggtcaccgagcacggggccaacgggcacggccgctggctcgtgcacccccacggcccggcgctgcccgagggacagtctctggccgccgtcctgcgcgcgatgcccggacaccccctgcaggaagtgacgacccgcatcctgcaacggatcgcctacctgcccagcgccgtcgggcccgaagcggaccacgtgggggctgggctcgtcgtgggcgcggacggcaccttccgcaccggggtgacgaccgggcgcctgccggcgagcgccggacaggtgccccgtgcttctcacatcggcaccgctgttaggcgggcagccgctctgcgggccgccgccgcggcccaggccgattgcgaccgctggcagcagacggccctggggcacgcgcagacggcacaccggctgcaccggttcaccgacaccctgcaggaactcgccgccctgtttccccacgacaaggtggccgcggcggaccgggcggagaccacccgggccgaggcgtcacgcgccgcgcacacggccgccgtccacgcatccgagcaagaccgcgccgctcagcacaaggagagttcccaccgtgcggctctgggacagtggcgcgcctccgccgtggcgctggggctgcccgacaccatcgccgcggtcaagcaggaagccgaggacgccggggcacgcgccgcagccgtgagcacggcggccggcctggtagaggacgccagagacctcctgatgaaggtcacgcaggcggccgggcaagcagccgagtccggcgcgcaggctcagcaggccgcggcggcagcccaggcaagccatgctgccctccttgccgcccacgctgatctggaggcctgccggcagcgcagcgggatggacgaaatcgcgctggcccaagccgccgaggacgcctcggccgcccaccagacagcccaggagcagctggaggacgcccggtcccggatggaaggcgtatccggcagggcggcggatgccgcgcgtgccgcacaagaagccgaccggagcctggagcaggcggggcccgccgcacgcgaaagccttgcgcgcgtgatcggcctgctcgccttcgacgcactgcacgaactcctgggccgccccccgcaggacccgggcgacgaagacgccggtgcgtggctggccgacctcaacaagcggctggcggctgttcccgccgcgagcgtgccgttggaggagtgcgccatggctgtacggctgcacctggccggcgaggacgacgactggcagctcacccacggccaggcccccggcgaactgcccgtgcaccagctgacgctgaccgggtacaaggcgatgtcgccgcccaccgccgcccgagaggcaacggcccgcctccatgcagcccagagcgcctacaacgccgccgaagaccaggccctgcagaccttcgtcctcggccggatccccaccgccatcagcaacgcgtgggtcgacctccacgactgggtcgacgacatcaacggccagatgaagctcgcccgcgcctcctccggcctcctggtgcagctcagggtccgcctcgcccccgacctcacccccgcgcgcgcccgcatccaccacctcacctgcgagatcggcgacgccaaccgcacatccgaacagcagcacagcgtcggccaggaactgctagccgtgatgcgccacggcgaagagggcggcagcaccgatcgcgcgacacgcctggccgaggccatcgacatccgcaactgggtcaccgtggaatacgtcgtcgtccgcggcgacggcggggcggaggaagtctgggggaggcagaagaccacggtctccggcggggagagccggctggtcgtgctcgccccgatgctcgccgcgctggccgcggagtaccgcgacctgcccgcccacgccctgcggctgtgcgcgctagacgaagtccccggtgagatcgaccaggagggacgcgacggcatcgccgcctacaccgccagcctcgacctggacctgatgtgcaccagccaccactgggacggctcccccggtgcctgggacggcatcgacatccacgacctggccaagtcctccaccggcatcatcatcgccgaacccatgcacctctacacccaccagatgctcgccgccaccagccgcctccccgcccagaacgccggaccggaacccgaatcggccgggccggaagcggcccacgaggcgacccagtga

SEQ ID NO: 51465 - DNA, 891 bp, Streptomyces venezuelae
gtgagcaccgcgggacccgactgcccccaaaagtggtgtaccggcggggcctgcgacggcgcccggctcgactccctgctcaccgaggaggcacgctggctgtgggagcagctcgccgccagggcggacaggagcggtgagccgtccatgacgggcggcaccgccgtgatcaccgcccccgccgccagcacgcagcgtgcagccgtcctcgggctgctcggatcccggcccctcgcgcccggagaacggcgcaggatccggctcgaggagctgacgctccgtctgcgccagcacggggaacgcctcaccccgggtgcggtcgccgcacacgcggccggccgcgctctcggctccacggccgccgaacgggcccgccagatcgcccgcaccaccgggctgcgcaaactgcgggcgcgcctggcgggcgccctgcccaagaatgcgcggctgaggccctcggaggaggcatggcaggagctgcaccgcaccggccgcgtcgcccgggtcctgcagcaccctcagcccgaacaactcctcaagaccgcggccgaggtactgcggctgctgcccccgcaaggacgcgtcgaccgccggttgctggccttcaaagcggcaggcgacccgcacggcctggacgcgggcaccgacctggccgggctcgtcctggcagaagccgcagccgccgggctcaccacctccggcatgccgccccgcacggcgtggggcgccctcggcgtcgacctcgaccgcctgggcggaggactgctcagcctcggcgtccaccccgacggctggcttgtgcccgcccggtttcccctccccctgccccctgccaccctcgccgacgtcagctggcccgccccaccccatgaggctcctgggtgttcgtga

SEQ ID NO: 51466 - DNA, 1563 bp, Streptomyces venezuelae; identical to SEQ ID NO: 51462

SEQ ID NO: 51467 - DNA, 978 bp, Streptomyces venezuelae; identical to SEQ ID NO: 51463

SEQ ID NO: 51468 - DNA, 4194 bp, Streptomyces venezuelae; identical to SEQ ID NO: 51464

SEQ ID NO: 51469 - DNA, 1305 bp, Streptomyces venezuelae; identical to SEQ ID NO: 51367

SEQ ID NO: 51470 - DNA, 1548 bp, Streptomyces hygroscopicus subsp. limoneus
gtgagtgacgtgttcgacgcctcggagcccccggcctcggagcccattgacgagggcgcgttcggcatcgacgcgttctccgtcgacgaccggctgcggctgttccacttcgccgccgccgagaagcgccacgagtacctgtggttgctgcgggccttcgaccgcgggcgtgccaactaccaggtgctgctgcacgcttcggacgtggtggggctgctggagcggctcgccgtcgaccatcccgacgcgggcgttgtcggtggtgcggccggtgtgcagccgctgctcgacgcgctcgcggagtggcaggtcctggaccggtcgtacgacgggacgcgcgccgcgaacctcgccgagtaccgcaaccgccactacgtgtaccagttctcccaggccggataccgggcgtaccgggccgtggaggacgtgctcggcgcgagcctggaggacgcccagctctcccgtctcgtcttccccgacatcctcggtgacctgcgcgcgctggccggggcgaacgtcgcgggcgacggtgaggaggtgtaccgcaagctcggccggctcgactccgtgctgaacgagatggcgcagcgcgccgctcgcttctatctcatgctgggcgacctggcgcgtaccaacgacacccggcccgaggtgttcctcgcccacaaggacacgctcctcgcgcacatgcgggagttcaccgccgagctcgggcgttatgccccgctgctcgccgaggcggtggagaaagcggcggccaccggtgtggagcggatgatcgagtacgcggccgaggccgacgagcgactcttccgcagccccgccgagcggctgacggactggcgtcaccggtgggacggcatcgtccactggttcgccgagcgtgagcacagtgagtccgagcggctgcaggacgccaccgtgaccgcgatccgttccgttctcgccctgctgcgccgggtcaccgaggcgcgtcggggcggggtgagccgggagagccagctgcgccatctcgcccagtggttcacctcctgcgagagcgacgaggacgctcatgccctgttccaggcggtcttcgggctcggtgcaccccgccacatcgccgtcccgtacgccgatcccgagctgatcccggggcgtacgtcctggtgggaggcggaaccggtcgagttggcccgcaccttggtccagtccggccgtacccccgccctgcacgggcccggccgcatcgaacgcgacgacgaccggcgggccctgctccgtgcccagcagctgaaggagcaggccgagcgccggggtgccgcgacctccctcgcgtcggacggcgtgtacggccggacgctcgacgagtccgagacaagcgccctgctggccctgctggacgtggcactcgccgcccgggttcccgccagccgccgggtcaccgccgcctccggttccgcccacggggtgcggctcacccttacccccgcggagggctccaccactgtcgacaccgcgcggggccggcttcatctggatgggctgcgcctggaggtcaccgtatga

SEQ ID NO: 51471 - DNA, 1416 bp, Streptomyces hygroscopicus subsp. limoneus
atgagccgcgtcgccgagggcgtctccccgctcgaactcgccgactaccagaaggcggtacggctcgtcctgcggcacccgctgatcacgtccgggtacccggacaaggcggcgttggcgaccgtgcgccgctgggccgaccaactgcgcaccgacctgatggaggcactcgggtaccggctcgtcaccaccgccgacaccgcccggctccagcgcgcccaggacggcctggacgccacccgcccagccctcacccgcgcgggacggcccttcgaccgccgccgctacgcctacctcgtcctcaccctcgcggctctcggacgccacggcgcgcaggtggcgctcggcgagctggccgacgcggtcgccgccgacgccgtgcgcatcgacggactcggcctcgacaccgcgcgcaagcccgaccgggacgccttcgtcgacgccgtcacctggctcaccgagcgtggcgcgctcaccctcgccgacggctccgccaccgcctgggccggcgaccccgagcgggccgaggccctgtacgacatcgaccgggagatcctcctcgccgtccaccacccgacccgcgtcctgcaacacctgacctcggtcaccgcgctgctggactcctccggcgcactgggcctgtccgcaggccgtgccgctcagcgccgcgaccaggcccgccgcgcccgccgtctggtgctggagaatccggtcgcgtactacgccgacgccgacaccgaactcctgggccagctgcgggcgcctgctctcgccgaggacctggagcggctgaccgggctgacggtggagcggcgggccgagggtgtggcgctcatcgacacctccggcaggctgtccgacctccgctttcccggcggcggtaccgtcgcgcaggccgcgctgctcctcgccgcccggatcagcgccgccgtccagcgttccggacggcacgctcttgaactgctgcccgcgcccaccgccgccgaacgcctgacggtccgcgcccggcgtatcgacacggccctgccgtcgcgtggactggtcaccgaactcgcagagccggacgaggcgtcggcgtacggggcatccggtgacgaggggcaggagccgacggagacccgttaccccttcgtcacggactcctggctccggggcagactcaaggagatcaccgccgagtacggtgcgggcttcgccgccgatctgcgcggcgacccggaccggctgctggaccaggcgctcggcctgctggccgcgatgtcgctgatcgcccgggtcgacggcggggccctcgcgcttccactgatcgcccgctaccgaggggtcaccgcccgcgtgaaaacccgtacggcagcccgaccgctctcccggacaaccctgttcaccgacgacatcgccaaggacccgactccatga

SEQ ID NO: 51472 - DNA, 4092 bp, Streptomyces hygroscopicus subsp. limoneus
atgagcgcccccgctcccaccccctcagcccggttcgtccccacccgtgccgggatcatcaacctgtgggactaccgggacgaggagttctccttcgccggtggctggctggtgctgcggggccccaacgggtccgggaagaccaaggcgctggaggtcctcttcccgttcgtcctcgacggccgtatcgaccccaagcggctcaacccgttcgccgccgaggaccgcacgatgaagtccaacctgctcttccgcgggcaggacagcgcactcggctacgtctggaccgagttcacacaccgggacactggtcaggcggtcacctgcggcatcgggctgcacgcccagcgccaccgtgacacacccgcccgctggcacttcgtcgcagagggccgcgtcggcgaggacttctccctcctcactcacgacgaccggccgatgacgaagaagcaactcgccgccgaactcggacgcgagctgatcacctccgcggccgactaccgcgccgccgtcgaccagcgcctgttcggtctcggcccggaacggtacgagcaactgctcaccctgatcctcaccctgcgccgcccgcagctcgccaagaacctcgacccggccaagctctccgacaccctcaccgccggtctgcgcccgctcgacgacgacctgatcgccgaggcggcccgctccttcgacgacatggagtccgtgcaacgcaccctggagggactggccgccgccgacgacgccacccgtgccttcctcgcgagctactccacctacctgcgggtccacgcccgcgccgccgcggaccggctcaccgcccgccgtaccgagaccgccgagcgcgccgccgcgctgaacaccgccaccacgggcctggcggtggcccgcgagcagcaggccgccgccgagacgaccgccgagtcggccgacgcctcactcgccgcccagcgcgcccgcctcgaccagctgcgctcctccgccgcctaccaggccgtcgagcaactcgccgacctggaacgtctggtgcgcacctgcgagcagaccgcccggcaggcgaccgccgaccgtgaacgccgcagcgccgccaccggccgcgcccgcgccgaggccgagcacgctgcgcggctcgccgccgaactcgacgccgccgtctcccgggacgctgccgccgtcgccgaccacgcccacaccgccggcctctcctggactccggccgatgccgagcctgcccgcctcgccgaacgctccgccgcgctggccgcggcccgtcacgagggcgtccgggccgtgcgcgccgcccagcaggcggcatgcggcgccgagcaggcccgtgaccttgcccgggcctccctcgaccgcgcgcaggaggccgtcgccgcggccgagatcgtggagaccgccgccgagtcggccctcgaatccgcccgcgagcaggcccgtacggcactcggccagtggacgcaggcgcacagcgaactcctgaccgaggagggggccggccgactcgccgaagccctcgaacgcaccggcgaggccgaggcggtcacgctcgccgacgccttcaccgaggccaccgctcccgccgtgcaggaactgcgcgacaccctcgcctccctgcgcgcccggcgcaccgatgttgagcgccgctgcgccgagacggaggccgaacgcggccggatcgccgccgaacgcgacgacgccccacccccggctcgcggccgcggcgccgacagggcggctggggacggcgtcccgctgtggcaactcgtggacttcgaagagaatctgacggaacgtcaacgagcgggcctggaagcggccctggaggcgtcgggcctcctcgacgcactcgtgaccgccaaggacacccccgtggcggcagggcacagcgaaggctacctgcgtgccggcgccccggtgaacggacccagcctcgccgatctcctgagccccgaggtccccgaggctggcatcgcgatcccgaccgccgcccggatcaccgccgtactgcgttccgtcgccgtcaccggcgacctcgacaccggcatcccgcagatcagccccgacggccggtacgccgcaggtgtcctggtcggtgcccacagcaaggagcacgccgagtacgtcggcgcgaccgcccgtgcccggcggcgcgccgcccggatcgccgcttgcgagacggtcctggccgaactctccgcccagctcgacgaggcggcgcgtgcgcaggcccgtacggacgccgccctcgacgggtacgccgcggcccgcgccgctctgccccgcaccagcggcatcaccgaggcgctgcgcgaactggacagggccgctgcgcgactgcgcgccacccgcgacgccgccgacgccgcccagggctcgtacgacgagtcggtggccgcctgctcggtcgccgagcgcgccctgcgccgcaccgcggccgagtatgccatcgagaccgaacgtgtcgacgccgtcgagaccgccacccgcgccttcgagacggcggtccgcgaactagccgcccgccgccgcgaacacgcccgccagagtgaggcggccgcggcagccaccggccggctcaccgtcgccgccgaggacgaggaggcggcggcggacaccgagcgcgcggcacgccgccggtacaccgaggaggccgcgggacttgaggccctccaggatgccgtcggggtcgaggcacaggaggtgatgcgccaggtgcaggagaccgaggacggcatcgacgccctggcgcgggaggccgaggcggctcgcaccgctcagcacaccgcgatcgcgggcaccgcggcggccgaggcccgccgtacggccgccgccgaggccggggcggtcgccgcggcggaggagaaggacaccgcccgcgggctgcgcccgtacgccgcccgtgaactcctcgacatcctgcgctgcccgcccggcctcgcctggcccgcccaggaggccgactggaccggagagacactcccgccggccgtggtcgccgtgcacgaggcgatcctgtccgccacccgcgacctcactcccaccgagaccagcctcaagcagtccgtgacccgtctcaccaaggccctggacgacctgcaggcgcagctcgccgccgcggggcaggactaccagcccgaatgggacggctccgacggcgtcatcctcgtccgcgtggccgacgaggagggcccgctgcccgtggcggccttcgcgcagaagatcgcctcccaccgccgtgaccaggccgaactgctctccgagtccgagcagcgcatcctggaggacgccctgctcacccggctcgcccaacagatccacgaccgcacggtcgacgcccgtgacctgatcaggcgcatgaacaccgacatgcgcaagcggacgatgtcctcggggacgacggtcggggtgagctggctgctcgccgaccatctcgacgacgagcagcgcgccgtctgcggcctcctcgacgcggacgccgcccgcctcggccccgagggtctcgcccgggtgcgcacgcacttcgcggcgcagatcaagaccgcccgggcccgccaccgcgaccagccctaccgtgaactgctcgccgaggtcctcgactaccggtgctggcggcacttcgcgttccagctggtacgccctgacaagacggaggagaggctcacccgcgcccggcacagccgcctgtcgggcggtgagcagtccgtgtcgctgcacctgccgctgttcgccgccgcgcacgccatgctcaactccgcccacccgcacgccccgcgcctgctcgccctcgacgaggccttcgccggagtggacgacaccgggcgcggcgaactcatgtcactggccgcccagttcgacctcgacctcttcatgaccggctacgacctgtgggccgcccacgcctccgtgtccgccgccgcccactacgacctcgcgcacagcgccgtcgaccacaccgtctccgcgcttctgctcgtctgggacggcgaccggctcctcgcggacgacaccggcgacctcaccgccgccctcggctcgcccggcacccggcgcgctccgacgcccgaggagaccgcggttgtcggctga

SEQ ID NO: 51473 - DNA, 1287 bp, Streptomyces hygroscopicus subsp. limoneus
ttgtcggctgagcagcgtgaaagccatgggtacgacgagttgcgtgacgagggatggacccggctgctcgccgccgcccgccgcaggctggagcgcaccggcggcgcgctcgacggcgacatctcgctcacggggcccagcgaggccgagcgccgcaccgtcatcggcatcaccggccgctaccggcccgagaccctcaagcgcctcgccgtacccctgcgtgacctggacgggtatctgtacgaccgttacggcgccggtctcctccagaccctcggccggctccacggtccgctgcgcgaccggccggccgaacgggccgacgaacaggcccgccgggagcaggccctgacgtcggcccgctccagtcggctcgccgggcagggatggttcgccgcctggcttgaccgcatcgccgccgacggtaccctcacccgtctcgtacgccggggagacgtgccgctcctcgacgcggcggtacgtgtcctggaaggactgaccggtgacggggaccaccgtgcgggctccccacaccgggttcccggtgtcctgccgcttccggtgctcgccgagtgggccaccggcgacaccaaagccctcgtgcccggcgcaccgctcgaacagctcgtcctgcgcgccctcgcccagcgcgccggcgacggccgcgacgtcccgcgtgagcgggccgggcggcgagccctatgggagagcgccggggccatcgccgacgacctcgccagccaggtcctcgtcctcaacatcggggccgagggcgataccgtggtctgcgactggctgcgcgatgccgccgacttcggcatccccttccggctcaccctccaccaactcgccaccgaccccgtcgtccccgccgcccgcaccatctacgtctgcgagaacccggccgtactgcgcgccgccgccggcgaactccaggacaccggtgccgccctcgtgtgcaccgagggcgtcccttccgccgcctgccacaaactgctcggcgacgccgtacgagcgggatcccggctgcactggcgtgccgacttcgactgggccggactgcgcatcaccgcgaacgccgtggcccgccacggtgcccagccctggcggatgaccgccgccgactacacggcggccctcgtcgagggcgagtccactccgctcgcgggatcgcctgcggccagcccgtgggaccccggactgaccctcgcgatggaggagtcgggcagcgcggtcatggaggaacgcctcctgcccgcgctcctgtccgacctcacccgcgcctga

SEQ ID NO: 51474 - DNA, 1470 bp, Enterococcus faecium; identical to SEQ ID NO: 50488

SEQ ID NO: 51475 - DNA, 1146 bp, Enterococcus faecium; identical to SEQ ID NO: 50407

SEQ ID NO: 51476 - DNA, 4158 bp, Enterococcus faecium; identical to SEQ ID NO: 50408

SEQ ID NO: 51477 - DNA, 1281 bp, Enterococcus faecium; identical to SEQ ID NO: 50491

SEQ ID NO: 51478 - DNA, 1506 bp, Rhodococcus enclensis
atggtggaagaaacgagtgcgccagattacgccgcgtacgccgacaccaatcgactgaagctgttttcgttcacgatcgcggaaaaacgggccgagtacctctgggtacttcgtgccttcgaccatgctcgcgccaactacaccgtcctgctgcatgccggagccgtcgcgcacatcctcgagaagatcggtggatcggatccggcggccgatctgtcggcagcagaggtcactcccctgttggatcagctccacgtgtgggagatcctcgagcgcagctacgacggcacccgcgcggccacgctggccgagtaccgcaatcgccacttcgtctaccagttcggtcaggccggataccaggtctatcgatcagtcgaagacgttctcgccgcacgcctggactcggcgtcgctctcgcgtctcgctctgccggacctgctcgcagacatgtccgaactcgccgaggccaaccgaagctccgacggcgatctgatcttccgcaagctcaagcgcctcgactcgacactctccgacatggctgatcgagccgcgcacttctatctcaccctcggcgacctcgtacggaccacggagatcactccgcaggctttcctcacgcacaaggacgcactgctcacgcacatgcgggagttcagctccgatctggctcgctacgcccccaagctcaaggaagcgatcgagcacgtcgaatccaccggggtcgatcgcatgatccgcctcgccgccgccagtgacgaacgggtgttcgtcccgatcaccgaacgcgaagacgactgggctgcgcgttggcgaggattgaccgcctggttcgtctccgcggaatcggggatcagcgagtccgagcgtctacgtgagggcacgatgagcgcgatcgccgcggttctggcgctccttcgccgcgtcacggaaacccgtcgcggcggcgtcagccgtgagagccagctccggcacctcgccggctggttcgccgccacgccgtccgaagacgcagctcatgctctgttccaggcagtgttcgacctcggtcgtccacgccatctctcgatggtgcatccggacgccgacatcatttcgcactcacgctcgtggtgggaggcaccgccggtcgagatcgcgcgaacactcgccgaaaccggccgcccgccctcacccggcttgccgagcaaagtcgcccgcaacgacggcagcatccgccgcctgcgcgaagagcagctggcggcgcaacgtacgcgcagtgccgcggcgcaatccctcgcgtcgaacggcgtctatcagcgcgaactcaacgagcaggagaccgaagttttgctgagtctgctcaatgcagcactgaccgcgcgcgttccggtggtgggacgcgtcaagagctccaccggtagcgagaacggggtgaagctgacgctcagtccctcggacggttcgaccaccatcaagaccgcccgcgggcgtatgcacctcgacggcatcgaggtcagtgttcgatga

SEQ ID NO: 51479 - DNA, 1443 bp, Rhodococcus enclensis
atgagagctcgcgagatcacgccccttgccctcgactcgtatcaacgcgcggcgcgagtgatcctgtccaaccacctgatcacctcgacgtacccggatcgaattgcgttgccgctcttgcgccgttgggccaccgagctgcgtgacgacctactcgaactgttcggctaccgcctcgaggtgacggagaccaccgcgcgcctgttcacggtgtcggatcgactcaacccgtcggcaccggcccgaactgcctccgagcgaaccttcgatcgcacgcgttacgcctacctggcattgtgcctggccgcgttgggccgcgccgggaaccagatcacgttgtcggagttggcggatcacgtcgcggccgatgctgcacaagtcgacggcgtcgaactctccaccgatcgtgcgtccgaccgcgacgccttcgtcgacgcagtgggctggctcggagtcagaggcgccatcgccctcgccgacggtgacgcaaacggctgggcgtccaatcccgaagcgggagaagcactctacgacatcgaccgttccgtcgtcgtagcgctgttccgtccaccgcgcgccctgcagcaccttcactccatccgcggactcctggccgccgagacctcgagcgcctccgaggacgacggaattcccgtggacgcgaaagagatcggacgccgagtacgtcgggcactcgtcgagcgcccggtcgtactggccggcgaactcgatcagcacgaattgatcgcgttggcgcagcccaagaccgcgtcggaagtcgaactactgacggggttggtggccgagcgccgcgccgagggaatcgcgatgatcgatcccaccggccgactctccgacgtccgcttcccgagcaccggaacgatcgctcaggtggcacttctcctggccggcgagattgccgaccgcgtactcgacgtcgacgctcctgaactgccgaaacttccgatcccgcacgtgtcggacgatcacctgatcgaacaactcgatgccgccatccccgaggccgggatcttcgaggacctcgccgacgaggacgacgacttcgtgctgcccgccggcgaaccggccgagccaccgccacccgtcacgtacccgaaaatcgacgacgactggctcgctgacaaggtcaccgagttggtggaccagttcgggcgaactttcgcggcgcagtggcaggccgatcacaacgggctgcgcaagcaggcgctcgggttgctgcaacgtctgcgcctgacgcatgcggtcgacggcggcgtactggtgttgcccgtccttgcccggtaccgcgacgtcgtggtctccgtgcgcgaacgcgatcctcagatcgacttcgcggtggacaactccgcaccggatccggtcgacgaattcggccccgaaccttcccccaacggcgaactatcagaggtagagaacgtatga

SEQ ID NO: 51480 - DNA, 4176 bp, Rhodococcus enclensis
atgagcaacgcccgcttccgacctactcgggctggaatcatcaacctctgggattaccgagaccaagagttctcgttcgccgacggtcgactggttctgcggggacccaacggatccggcaagaccaaggccctcgaggtcctgttcccgttcgtcttcgacggccgcatcgaaccgcggcgcctcaacccgttcgccggtgaagagcgcacgatgaagtccaacctgctctaccgcggtcaggacagcgcgcactcctacgtgtggatggagttctgccgcggctccctcgaagatcccgagtcggtgaccgtgggcatcggcatgcgcgcaacccgcaccaacgacaaggtcacccgctggtacttcgtcgccgacggccgcgtcggagtcgacttctcgctgatcggcaacgacgatcgtcctctcaccaagaagcagttggccgaacaactcggcagcgattccatcaccgaccgtcccctcgactaccgcacagccatcgacgcgcgaatgttcggtctcggtgtgcagcgctacgaccagctgatcaatctcattctcacgcttcgccgcccccagctcgcgaagaacctcgacccgaagggcctttcgcaggcactcaccgacggtctccgtccactcgacgatcagttggtcctcgaagctgcgcgttcgttcagcgacatggaggaagtcggccgcgcgctcgaggggctcgcggccgccgatcaggcagcccagagtttcatcggggtctacaccaagtacctgcgtcagcagtctcgcggagagatcgaacaggtcagcacccgcctcgcagcggtcaccagaggtgttgccgccatggacgagtcgtcgctcgcccagacccgcagccgtgaggcgcgggcagcagccgaggagcgcttcaaccaggccgagcaggcactcgagaacgcgcgcgccaatgtcgaagcactgcaacgctcgagcgcgtacgaaggcaaacagcaactcgacgacctcgcccaggccgtcgcgacgctcaagctctcgaccgagcagcaggcagacaagtcccggaaagcgcaggccgcactcgctcaacgcggcgacgaagccgacaaggctgcatcgtcggtcaagcgtgcggccgaagcactctcgcgcgtcgaggacgaactgcaggcggccgctgaggacgccggcatcgtctggactcccctgcccgacggctcacgcagtgaccagatcacggcagcagtccgtggccatgccgaggagcgtgacggtgacgtacgcgtcgtccgcaccgcactggcgaccgtcgagaaggcggcgaccgaacgaacccgggccgaaaacagctctcgccgtggacaagagctgctcgaagcgtccaaggcggctgtgctcgagggcgaagctgccgtggaactcgcacgcagtcagtgcgccagcgggctgcgcgcgtggtggaccgatcactcctccctgttttcggctgtcggcgccgacacgtcgctgttcgaagctctcgacgcggcgctcgccgaagtcggcgacgaagacgctccggcgctgtccgcagttctcgccgagcacaccgaggccggcaccgagacgctgcgcgagcgtcgacgtgaggccgaagctgaaatatctgcatcacacgcctccatcgcggctctcaaatccgagcgcaaggccgtctccgcggaacacgacgacgctccgcctgccttccacgcacgcaccgataaccgcagtgaactgggtggtgcaccgctatggcagttggtgcgcttcgccgattccgtcgaaccagacgtggccacgggaatcgaatccgcactccaggcggcaaatctgctcgacggctgggtctgcccggacgagaagattcccgagcacgtcagcgagcagttcctaacggctctgcccgtcaagcagcgtccgaagggacgaacgctggccgacgtcctcgaggtcgaaggcaatgccgacgtacccgacgctcgggtacaggacattctcgcgtcgatcagtctcgtcgaggcaccgggagactccgatgcaagcgtcgcgatcggcgtcgacggccgcttctggcagggcgtcgcgcgtggccggcacgtcaaggccgatgccgagtacatcggcaccacagcacgggcgcgtcgacgcgaagctcggatcaccgagatcgacgcggctctggaagaacttgccgcggcagtcgatacggccaaggcactggtagcgcagaccaacgagcaactgagccggatcaactctgcggcaaaggaattgccgaagacaggttcgatcctgcgcgcactcaagacggtcaccgaatccgccggcgcactccgtactcgctcggaggccacggaaacggcacaacgcgaactcgatgcggcgatcgctgatctcgcggcgaaggaaaagcaactccgagcgacggcgtcgcagcaccggaccccgcatatcggccgtgaactcgactccctcgcggcggcgatccgtcatttcgagaagcagggggaactggcgctgcgctgccgacgggagcatgccaaggaagtcgaactcgaacgcgagtctcgcgaccgtctcgacgaatcacgcgccaatgcggaggaattcgccgaggaagccgccatcgccgaggagagtctgctccagcaggtgcagcgtctcgagacgctgcgcgacaccctcggtgccagcgccgagcaggtcgacctggacctggcaaaagcccgcgcgaagatcgaagaatgcaaggtcgaacagcgtgcggcgcgaaaggcgtacgacgctgccgtcctccagatcggcacggcggagggtgcgtacaacaccgctgtcgagactcttcggcacaccctgaccgaaacccgcagtgatgcagagcgactcgcaccctacgcgcgcccggaccttctcgagttgttgggcgtcaaggaacatctgagctggccggcaagttcagcggcgtggatgagccccgatcagttggtctaccgcatccagaacgaagatcgcagcgaggacgcagcccacccgcccgtcctccccgaagacgtcgacaggttgtaccgagcgctcgaggctgcgacctcggcagtccgagtcaccgacggcgcccgaaaggcaacccgcacggcactgacctcggcgctgcaggacttcgacgcgcaactcgcagcggccggacaggactaccgtctgcagtgggatgcaccggatgggctgaccgtcgtacgagtccaggacgatcagggctattcgtcgatcggcgagttcgcaacgcggatccacgacgctcgcggcgatcaggagcagttgctcaccgaatccgagcgtcgcattctcgaagatgccctgttgacgggattggcccagcagatccacgagcgcacggtcgacgcacgcgagttgatcgcacagatgggcaccgagatgcgtgagcggcggatgtcctcaggcaataccatcggcgttcactgggtgctcgccgacaacctcgacgacagctcgcgggcaatctccaagctgctggatcgagacgcgtcggccctcggcgtcgatgaactagctactctgcgagcacatttcgcgacgcagatccgtaccgcccgcgcggcgcaccccgaacgctcgtacccggagattctgtcctcggcgctcgactaccgtcaatggcgcgtgttctcgttcaccctcatcagcggtgagggcaaggaagaccgtcttaccgtcgcgcggcacagcgcgctgtccggtggcgagcagtccgtctcgctgcaccttcctttgttcgccgcggcgcacgtcatgttggactcggccgacccgcacgccccgcgtctgctggcactcgacgaggccttcgccggtgtcgacgacaacggtcgcagcgagcttctcggcttgagcgttcagttcgacctggatctcttcatgaccggctacgacctgtggatcacatacgcagacgtccccgggtgtgcgcactacgacctcgcgcactccacggccgaacaggctgtcagcgccgcgctgctggtctggtcgaacggtgagctgcttgccgagcacgacggaacggatctggcgagggcattgggctcgccgctacggcgccgggtgccgacacccgccgaaggtgcgttggactacgcctag

SEQ ID NO: 51481 - DNA, 1536 bp, Blastochloris viridis; identical to SEQ ID NO: 51361

SEQ ID NO: 51482 - DNA, 1308 bp, Blastochloris viridis; identical to SEQ ID NO: 51362

SEQ ID NO: 51483 - DNA, 4179 bp, Blastochloris viridis; identical to SEQ ID NO: 51363

SEQ ID NO: 51484 - DNA, 1284 bp, Blastochloris viridis; identical to SEQ ID NO: 51364

SEQ ID NO: 51485 - DNA, 1557 bp, Paenibacillus sp. 32O-W
atggagcaccaaggaccgggactgccggcgcaagcgttgcgcggaattccggaattgaagtatgtcaatgcggacaatgtggcgcggtatcgcgcgattatgcgttttttctatcaggaatataagcggctgaaatactggcttaagccggaagaagtctacgaaacgatgaaggcctggaacatatggccggactatacgccggagatgtgccatcatgatctcgagcaactggttgaatggcaaaacttgaccgctcgccacgatggcgggcggtcttccacgttggaagaatatttgaagaaaaaaatgcaatattcccttcgtccgtattcgatcgaaatcgagcgtttgctggaaaatttggagaaggtgaccggctatggaggatcgctcgaatcgtctcttttcgacacgattgccgagaagctgttcgcgatccggcgcgatgcggaccggtggcagccggaagaggcgctcgagctgtggaatgtgctgtaccggtcgttcgttagtctgcacgagaacgcagcagattacatcgccagcctgcagacggcaaaagcggaagagatgatggtgacggaagcgttcctcgttttcaaggagaaactgaccgattatttgcaaaatttcgtgcaggcgcttcagcgcagcgcctataaaatagaaggaaacctgctgcgcattaacgactcggtccgggatctgtttctggaaaaagtggcggaaggcgagctcgccaagccgcggctggaagaaggtccggacaaagaggaatggatgaaagagctgcaacgcagttgggcgaatatccgtcgctggtttatcggggaagggaacacgccaagcgagctgacgctgctggaaagagcgaccaaggatacgatcgcgcgcatcgtccgcagcgccatccgcattcaggaacgcaagcgtgcggggcttagccgcaaaaaagaacttgagcatctggcgcgctggttcgcctccctcgattcggtggacgatgcgcatcgattggccgcctttgcgttcggcctgtttccgacgcggcatctgcaaggagaagacttgcgggattccgaccgggcggacatgtcttcctgggaggagcggccaatggtgcggatgctgcgttcgcgcagccgcaaacgcggcgaaaggctgcagtccgatccggtgcgtgacaacgaagaaaggaagcggcgcgagcgggaggcttaccggatccggcaggcggaagaaatgcggatgatcgaagcgatgctggagcggggacgggtccggatatcggagatgggcgtcgtaacggccaaggaacgtctgcggctgctccaatggatcggccgttgcatgacggcgggcaaaacgtatacgttcgtgacgcccgaaggcgtgcgcataaggatgagtaacccgcggacggacaaacggacgattttatacgccgaggacggagagctggagatggcggattacgagctgcacttcatgctgacgaatacggcggcggcgctggaagcggcggcatccgcggaagaaaggggagatcaatag

SEQ ID NO: 51486 - DNA, 1209 bp, Paenibacillus sp. 32O-W
atggcttccggagcattgcgaagagcggtcagaaaggaacgtaatgcggagcaactcgccgagcggaagcgggcgtgcatgcatgcgctgctgaaccgtccgtgggtgacgaaggaagacgatcccgatttgtacttcgcgattaaagatcattacgaggaattgcgggactggtttatggacaaggcggggttcccgctgatcgttacccggtcgatggccaagctggacaagacgccggtgaaagcttttccgtggatgggctttgcggagtttcgcgaaacatcggattatgtttttttcacatacggattatggtatttggaaggaaaaacggagctggatcagttcctgctttccgacattgtcgaagaggttcgcgagcagatgcttggcgcgggattggaggcggattggcgcaactactatcatcgtctttccatggcccgggcgctcaaaaagctgcgctcgctcggcgtgctgtacaacgtcgacggagacgaaagcttctgggcgcaggacgcggagcgcaacgccctgtacgaatgctcaccgctgacccggtacgtgcttcggcgctttccgcgcgatctgaccgagtgctcgactcttgaggaactgacagacccgattccttacgcggatacgcaggacggccagtcgatgaggcgcaggcatcgcgtctaccgacggctgctgctcgaaccggtcgttacggatcgtcaatgggacgaagaagatttgaattatgtgctgtggcagcggcgggcgattattgatcagctggggaaaacgttcggctgggtcggcaggcgctatcgcgaggggctgttgttctttcatccggaactgacgggcgagggggagctgttcccgacgctgtcggctgcttcggacctggcgttgctggcggccggcgaaatccgcaagcaattggcggaaggaggcggactgtacacggaggacaacggaacgatccggctaacgagagcagaaatggagacgatcatgtaccggctgcagtccagacataaagaatattggagcaaagagctgcgggaatccgcatcgcaggaactggcggagctatgtatgaaccatttggcggaatgggggctcggggaatgggaaagcgaagcttcatttcttgtgtctccagtgcttggccggtggaatgcggattatgccaattccgattttgatgcgtaa

SEQ ID NO: 51487 - DNA, 4248 bp, Paenibacillus sp. 32O-W
atggagcaaacgacagtcggaacgacggaacggacagcggagctcgggacggcagttgccgggacggcatcaatgcgtcgggcggatggcgcgcagccgccggacagatggcagatgaaccgggtcggcattctgaatttttggtattacgacgaagaagaatttcagctggaggacggccgtctcattcttcgcggagcgaacggctcgggcaaatcggttacgatgcaaagcttcctgccgctcgtgctcgacggcgacaaacgtccccacaggctcgacccgttcggttcgcgcgaccgccggatcgagtactatttgctcggcgaggatgacgacggtaaaggcaagacggatgcgaccggctatctgtggatggaattccggcacggacggacgggcgctttcaagacgatcggtatcggactgagagcgaggcgcaacgcttcgcaggtgcaattctgggggtttgtactggaggacggccggcgcatcgggcgggacttctggctgtacgaccgcaaccgatggctggaggaccaggtgcgtataccgcttgaccgcaaggaactggaggggaaaatcggttccgggggcatggtcgttcaggatcagaagtcgtatcaggacctcgtgaacaagcaaattttcggcttcgcggatatcgaggcttttcaggatttgcttcagcttatgatccaactgcggagcccgaagctttcaaaagatttcaagccttcggcgatatacgaaattttgcaccaggcgctgccgccgctgatggaggaagaactgcggccgctgtcggaagtactggaagatatggaccaaatggccgaccgtctggacgagatccgaaggcatcgcggcgagatggtcaggctgcaggagcggtacgatttttacaacaagcatattctttatacgaaggcgggagagctgctggaaaaccacgcttcttacaaggaagtggccgcccgggtgaaggcgtcggagacggcgctggagcaagcggagcgggagaaggaagcggcggcggcggagcgtgccgacatacagcgcaggctgcaggacatcgccttggagcgggagctgctggagaagcatgaggcgatcggcaagcagcgggaatacgaggcggctgcgaaagcgctcgaagatacggagcggcagctggagcgttcccgggacaaggcgcaaaaagcccgcatcaggcaggatcgactgcagcgcgagcaggaggaggcggcctcaagcagagacgcttccgagcggatacagcgggaaacgctggacgagatggagcagatggcgggcgagatggagtttgccgagcatgcggtatatcatcgctattggacgccgaatgtgccggaagacgacgcctggaaggatgcatggcgccgggatatccgccgtcatcgcgagcgggtcgagctggcgctggtcaaggcggcagaggagcgcgaagctgcgtcgatggtgaaggagcgggagatcgagcttggcgaagcgagccgggtgcgggatgaagcggaacgcgagcgcgccgagcgggaaaagcggctcgaggaagcgaaggagcggctgaaggatgcgatcgtcgtctggagggacggattgaaggagctcgaattcggcgacgaagcgataagggaaacgttcggcgcgattcggaattacggaccggagcagccgtcgcttgagcttgtgcgagcgccgctgctgcagcgctatgcagtcggccgcgatgcgcttgtcgaacggaggcttggcttcgagcggcgccgagacgagctgttagagcagaagcgcaggctggaagaagagaaacgcagttgggaagagagccgcgagccggaaccgccccgcagcgaagcgagggaaaacttccggcgcggtaaagcccgggtgggtgctccgctctacgccttgtgcgactttcggaagcaggttggcgaagaggagcgggcgcgcatcgaggaagcgctggaacgcgccggtctgctggacgcctggatttcgccggatggctggctcgaagattgcggcagcggcgacgaagaggcgtggatcgtcccgaaaccaatcgaattcgggtatacgcttgccgacctgcttgtagccgatccgccggaggaaagcggcgtgacggctgaaatggttgatgcggtgctgagaagctttttgtgggacgaaggaagcgctctgcaagacggcgccgactggcatggcatcatcgcggcggacggctcgtaccggctcggtccgttggccggccgttcgcgggtgaaggtgcgtgcggaatatatcggaagagagacgcgcaagcgaacacgaatgtttgaaatcgcccggcttgccgaagcgatcgccgcggtggaggcggagctgcatgaggtgcagctgtcgatcgacgggcagcgggaagcggaaagccggcttgccgaagagcgcgaccggttcccggatggaaccgaattgacagatgggctgcgggcgctgcaggaggccggttatcgtctggaggccgcgctccgtcatgaggagcgggctctggagcggttcaaagcgaaatcggaggaatggcgcgagctgcaaaggcagctccatgagatgaccgccggttggtcgaggctgaagcgcgagaaggagctggccgaagcggcaagcgttattcgcgaatacgaaggtgcgttgtcggaactgcattccttgtggcgtcaatatcgggatgcgagtgccgcttgggagcggctgcgggatgagcttgaaacgaccgctctcgagttggaagacgaagaagcgcagatggatgagctcgacgagcggagacgggatcagcgggcgcagacggaaacgctgcggaagctgatcgaagagttgggccttgctgatgtggcacgaagactggaggagataagagccgagcaaactgcgctggtgcagcgtaaccgggagcaggagcggctgctcgatgcggcgaaggacaaagccgcccgggcggaagcgcagcttgcgctgctgagcgagcaggcggaaggcaggaagctcgggctggatcgtgcgaccgtgcaactgtggaccgagctgcgccggggcctcgtgccggaatggcgggaggagctgcgggaggaatggccgggtgatgagcgcaacgatgcggagccgtttgcggtgcagcctccggaaggggatgccgcctgccagctggccagggaaattcgccgccggtatgagccgctgttcgcgggacgcaacgcggaaaatattacgaatcgtctgctggagcaatttacggccgcccggatgatgctgaccgaatatgtgctgcagacgaccgacgatgaaacgacgggacgcattttggtccattcgatgcgcgacccgcatcggccgctgccgccccagacgcttctcgatgaactggcggagcaggaagcggagcaaagcgctctgctcagcgagaaggatcgggaactgtatgaggaaattattttgcgcagcgtcggcaaggcgattcggcagcggattcaccgggctgaacagtgggtgcgcgagatgaacaagcttatggaagagcgggatacctcgagcggcctgaggctgcggctggaatgggagccgaagccggcgtcgggcgagcagcagctggacgtgtacgatctcgtagagatgctcaagcgcgattcccaccggctgcgggaagacgagatcgatgcgatgatcgaacacttccgcgcgcaaatcgcgggagccaaacagtccgccgaggaagaacaagagtcgcttcggcagcatttgtaccgtgcgctcgattaccggaattggttctactttgagctgaaatacaaaaaaggcgagcaaaccggctaccgtccgttgaccgacgcacgtttcaacgtgctgagcggaggcgagaaggcgatggcgatgtacatcccgctgttcgcggcgacgtggtcgcggtattccgacgcgcgcagcgacgctccccggctcatttcgctggacgaggcgttcgcgggcgtagacgaggaaaatatgcgcgacatgttcaagctgctgacggatatgggcttcgactatatgatgacgtcccaggtgctgtggggctgcttcgatacggttccgaaactggcgatttacgaaatataccggcccaaggacgtcgatttcgtcacactgttccgctaccgttggaacggcaagcggcgggaatatgtggaaaacgtcagaacagagtag

SEQ ID NO: 51488 - DNA, 1821 bp, Paenibacillus sp. 32O-W
atgcaagacagatgtttgcaaattgtccggtgtataacgcggttagacagagggcaagcgggtgacggcatgaacggttttcaaggatttaacagagaggatcggacaaacggattacgggctgaccggggggagcgggcgaaagcttatttctcccgccccggtttcgagcggccgctgcaagcggtatgggatcgctacgcgagtttcgggaaagcgagagggaacgcggtcgtccgcaatgcgacaccggaagagtgcgaaatggtgaactcgttcatggggtggaatgtgaaaccgggcggcgacatccggcttcctcttgcggcgttcgagcgggaattgctggaatccgccttcgcgatgacgatcgaagagctgcacgcggtgctgaccggcgaaccgttgctgacgaaatcggaccggcagcagcttgaccggcaggaatgggaggagttgttccggatcgtcaaagggaagctggagcgggaggaggggctgcttcatccggttgtggcggattggctcgaacaattgaaggcgggaaaggcggacggttaccggatgctccgggagctgtggcggcaatacgcgcaggatgccgagcgcgagctggcgaacgctgccgcggcatggaatttgctgctggcgagacatcttggttcggaacagcgtttggaggagagttcgatgcaatcgatagagccgttgctgggcggtttgcgatctgatgattcgcgtcttgacggctcgcttgacaggagcggcccggcgtcgccgagcgacggtttgcatccgatccgtttgccggtgctggccgcgctcgccacgggcaacccgcatgcgctggacaggaacgtcccggctggccggttgctgtttcaggcgctgcgtgtatcggcgcggcgagccgtgccggaaccgggacaagatcaagaaagtgaagtaagatgccgcgcagaccggattggccagatgggcctaataagccaagtagatcgtacggggcaagcggtgaatgccgctgacagcgccgaagccgcagccggctcagattccgattctgatttcgaatcagaatctgcaggtactccggaacgcgacagctccattgaagagccggaagcgtcggcgatcgaagctgacagtctggcgtcacgggagatttaccgggtcgcgggcattgcggacgacgatatctcgacgctcgttcatgttttcatcccttgggagtcgggcgggctgtctattctgtctttacgacagatcgaaaggatgaagcaagtaccgtttgccggtgatctgtatgtggttgagaatccggctgtattttccacattgatcgatatgaccgagcgatggctggagaaggggggagcgtttcgcctttctgtcgacggtcccgcgctgctttgcacaagcggtccggcaagcgccgcggcgcttcgactgttggatcggtacgtccaggaaggcccgaggtgcggtacgctgtactattcgggcgattttgacgtgaaagggatcgaaatcgggaatgtgctggcggccagatatcgagggcagttcagaccatggcggttcgattctcaaagctacgcagccggaagccgcagctccaaccgggaaggcgtccggttttccgatgaagaacgcaaccggctgaaacaaatgggagccgtgtgggatgactctctttgcagagcgatgagcggaatcggacgaaagctgtttcaggaagagcagatcgctttctacatggaagattggatgtgcgctttggagcatgccgttgcgggagtttcggattcttcgaagtaa

SEQ ID NO: 51489 - DNA, 1491 bp, Rhodococcus pyridinivorans KG-16
atggaggacgcgttggtgcgggacgaccgcctgcgcctgttctcgttcgcgacggccgagaaaagggtgcactacctgtgggttctgcgcgcattcgatcatgcgcgcggcaactactcggtgctgttgcacgccggcgacgtcgagaacgtcctcacccggctgcccggcgcgagcggcgacgacgtgcccgattcctccgagatcccggcgctgctcgagcagctgcacgcgtggggtgtgctcgaacgcagctacgacggatcccgggcggcgacgctcgccgagtaccgcaaccggcactacgtctaccagttcgggcaggcgggctaccgggtgttccgcgccgtggaggacgtgctgtcctcccgcggggaggacgtctcgctgtcgcgtctggccctccccgatctgcttgccgatctcaacgatctcgccgacgcgaacgcggccggcgacggcgagctggtctaccggaagttgagccgcctcgacgcgacgttgtcggacatggccgagcgcgccgcccgtttctatctcgtcctcggcgagctggtgcgcaccaccgaggtcaccccggagaccttcctcgcccacaaggacgcgctgctcacccacatgcgcgagttcagcaccgacctggcccgctacgccccgaagctctccgcggcactcgaccgggtgcaggtcaccggggtccagaagctcaccgcggccgcggcccggcacgacgagcgggtgctgctctcgttcgaggaacgcgaagcggactgggcacagcgctggtggggcatcgaacactggttcgtcggtgtgggctgcgaaccgagcgaatccgaacggctgcgcggcgcgaccatcaatgcgatctccgcggtgctcgggttgctacggcggctcaccgagcagcgtcgcgggggtgtcagccgcgagtcgcagctgcggcatctcgccggttggttcgccgccgcgccgtccgaggacgccgcacacgccctgttcggcgcggtcttcgacctgggccggccccgccacttctccgtcgcccatcccgatgccgacatcgtgccggtcacccggtcgtggtgggaggcgccccccgtggagatcgcccgcaccctcgccgagaccggccggcgccccgcagcgggagcaccgggacggatccagcgcaacgacgccggggtacggcggctgcgcgaggcccagctcgagaagcagcgtcgccgggcagaggcggcgcgctccctcgccgccggaggtgtgcgcgaacggaagctgagcgaaccggaagcggaggtgctgttgagcctgctcgacgccgcactgtcggcccgcgtgcccgtgagcgggcgggtgcgcagcgacgatgcctcctccggtacgcagaacggcgtcaagctcacgctccgaccgagcggcgagtcgacggtggtggacaccgcgcgcggacgcctgtatctcgacggtctgtcggtggaggtgcgatga

SEQ ID NO: 51490 - DNA, 1395 bp, Rhodococcus pyridinivorans KG-16
atgagggcgcgttcgatcccgtccgtcgagctggattcgtatcagcgcgccgcgcggctggtgctcacccaccatctcgtcaccgcgaccttccccgatcggtcggcgctggcgacggtgcgccgctgggccaccgagctgcgcgacgatctgctcgccaccttcggataccggctcgaggtcaccgagaccaccgcgcggctgttcaccgtcgcggatcgcctcgacgcgggggcgggcacgtcgacgcacaccggccggccgttcgaccggcgccggtacgcctatctcgcgttggcgatcgccgcgctcggtcgcggcgccgggcagatcacgctgtccgaactcgccgagcacgtcgcctccgaggcgagccgggtggacggtgtcgagctcgacaccgaacgcgccgccgatcgcgatgccttcgtcgatgccgtgacctggctcggcgtgcgcggcgcgatcaccctcgccgacggtgatgcggacaggtgggcgagcgatcccgacagcggagaggcgctctacgacgtcgaccgtgcggtcgtgcacgccctgttccggccgccgcgggcattgcagcatctcgaatcggttcgcggtctgctcggcaatgccggtgccccgcaatccgatacggcggaggtccgacggcgggtgcgacgcgcactggtgcaccgtcccgtggtgtacgccgacgatctcgacgacgacgaggcgctgcagttggcgttgccgcgcaccaccgacgaggtggagttgctcaccggcctggtgtgtgagcgtcgcgccgaaggcgttgcgctggtggacacctcgggacgactgtcggacgtgcggttcccgaacacggggacggtcgcgcaggtcgcgctgttgctggccggggagatgtgcgaccgcgtcctcgatcccgacgcccctgccccaccccggatacccgtacctgcacagacacaggacaccctcgtcgcggccgtcgattccgcgatcccgaggtccacggtgttcaccccgctcgcggcgtccgacaccccgatccccgacgagcaggagcaggacgacgacgctcgtgccccgctcgagcatcccttgctcgaggattcgtggctggcgggcacggtcggtcgcctcgtcgacatctacggccggaccttcgccgcgcagtggcaggccgaccccgcgggactgaccgaggccgcggtggacatgctcgaccggctcaggctggtggcccgggtgcccggcggggtgctcgtcctgcccgcgatcgcccgcttccgcggcgtgacggtcattgtgcgcgaacgggatccggaaatcgacctgttccccgagaccaccccaccgacagtccccgccctcgatacgaccccgacggagatctcatga

SEQ ID NO: 51491 - DNA, 4155 bp, Rhodococcus pyridinivorans KG-16
atgagcagcgcccgattccgccccacgcgtgccgggatcatcaatctgtgggactaccgcgaccaggagttctcgttcgccgacggacgattggtgctgcgcggaccgaacgggtcgggcaagaccaaggcgctcgaggtgctgttcccgttcgtgctcgacggccggatcgaaccgcgacgcctgaacccgttcgccggcgaggaacgcaccatgcgctcgaacctgctgtaccgcgggcaggacagcgcccactcctacgtgtggatggagttctgccgcggccgcgccgacgacccggaggccgtcaccgtcggtatcgggatgcgcgccacccgcggcaacgacaaggtcacccgctggcatttcgtcgtcgacggccgtgtgggagtggacttctcgctgctcgacgacgaggaccgaccgctcacccgcaaacaactggtcgatcagatcggggccgacgcgatcgccgatcgtcccgtcgactaccgggccgcgatcgacgcgcgcatgttcggtctgggcgcgcaacgctacgaccagctgatcaacctgatcctcacgctgcgccgcccccagctcgccaagaacctcgacccgaagggcctgtcgcaggcgctgaccgacggcctccgccccctcgacgacgatctcatcgtcgaggccgcccgctcgttctccgcgatcgaggaggtcgagcgcaccctcgaatccctcgccgccgccgacgatgcggcacaacagttcgtcaaggtgtattcgaagtacatccgtcagcaggcgcgcaccgccgtcgacaaggtcgccacccgtctcggagtggtggacaccgccgtccggtcgctgcgcgaggcgaccgaagcccgcaccgaggccgccaccgcccgcacggcctccgaggaacaactcctggtggccgaacgcgaccacgaacaggcacgcaccaccctcgaggcactgcaccgctccagcgcctacgagggcaaacagcagctcgacgacctcgcgtccgcggtgaagaacctcgagcgcaccaccgccgcgcaggccgagcaggcgaaccgcgcccaggccgtcgtagccgaccggctccgcgatcacgacagtgcccgcgacgcgctcgagacggcgacggcggcgcgtcgtcgcgccgaggacgggctgagtgcggccgccaaggacgccggcatcacatgggccggcctcgatggcatcgaacggaccgagcagctcaacaccgcgatcgacgcactcgccgaggaacgcgacgccgacgtgcgcgcggtgcgcagcgcactgtcccagctcgacggtgcgaccgccgcgcggtcgcgggccgaggccgccgcggtgcgtgcccgcgcgcaacgcgacaccgcgtcggccgcggtggaggccgccgagaccatggtcgagctgtcccgcagcgaggtcgccgccgagctgggccggtggtggtccgatcgcgccgagaccttcgcggccgtgggcctgtccactccggtcttcgaagcgctcgacaccgccttcggcaccgtcggtcaggacgatgccccgtcccctgcggcggtgttcgccgagcacaccgggcccgtgctcgacgacctgcggttccggcgtcgcgtgtgcggctctgagatcgagtcgctcggcacccggatcgccgaactcgagaccgaacgcgccgccgtcgcggccgagcgcgacgacgctcccccggcgttcccggcccgcaccggcaaccgcgacgatctcgtcggcgccccgctgtggcagctcgtccggttccgcgacgacgtctcggcgcaggacgccgccggtatcgaagcggccctgcaggccgcgaacctgctcgacgggtggatcgccgacggcgacctgccggacatcgagtcggagcaacttctggtgccgctcgagcccgagcaccgccccagcggtcccacgctcgccgacgtactcgttcccgaacccgacacggccgtccccgaggaacgggtcgccgcggtgctgtcgtcgatcgcgtgggccaccgatcccggtccggccgcgcgggtgtcggtcgatgcgcacggcgggttccggcagggagtgcagctcggtcgccacgtcaaggagcaggccgagttcatcggggccaccgcccgcgcccggcgtcggcagcgtcgcatcgtcgaactcgagaccaccatcgccgagtgccgcgccgacgtggagtcgctgcgcgagcaggaccgcgagatcggccaccggctcaccgcactcgacgaggccgtgaagtcgttgccgcgcaatggatccgtgctcgcggcgctgcgcaaggtcaccgaatgcgccggagcgttgcggaccgcatccgaatccgcggccgcggccgaccgcgacctggaccaggcgatcgccgcggtcgccaccaaggaacagcatctgcggtcgaccgccggccgacaccgagcgccgctcaccgcgacggaactcgacattctcgacgcggccgtgcggcacttccgttcccagggccaggccctgcagcgcgccctgcgtgagcaggtcacctgcgatgatcgactccgcgacagcgatgttcggctcgacgaggcgcgggtctccgccgagaatgcggccgagctcgcggcggagaacgccgagacgctggccaacgagcagcagaagctcgagacgctgcgcgagtcgatcggggcgagcgccgaccggatcgatgcccagctcgacgaggcacgtcgccggatcgaggccgcgaaggccgccgagcgggccgcgcgtaaggcccacgagtcggcgctcgagcggatcggcaaggccgaggccgcccacacgggcgccgagcagacgctgcggtcggcgctcaccgaggcccgcgctgacgccgacgccctggcacccttcgcccggcgcgacctgctgaccctgctcggcgtggagagcgagcacgtgtggccgtccagcgccgccgcgtggctcgatgccgatcagctggcctaccggatccggcagtcccccgacgacacggtcgacgtgctgcccaccgaggtcctctcgttgttccgggcactcgacgccgccaccgaatcggtcacagcctccgagtcgacccgcaagtccaccgcctctgcactgacctccgcgctgcaggagttcgacgccgaactcgcccggggtcgcgactaccgcctgcattgggacgccgccgacggcatcaccgtcgtgcaggtacaggacgaacaggggtacacgtccgtcgcggcgttcgcgcagcgcatcgcccgggcgcgccaggaacaggaaaccctgctcaccgactccgaacggcgcatcctcgaggacgccctgctcaccggtctcgcgcagcagatccacgagcgcaccgtcgacgcccgtgacctcatcgcccggatgggcaccgagatgcggcaacggcacatgtcctcgggcaacaccatcggggtgcactgggtgctcgccgaccatctcgacgagccggcccgcgcggtgtgcaagcttctcgaccgcgacgcgtcgatgctggctccggaggatctggcggggatccgcgcgcatttcgcatcgcggatccgcgcggagcgggccgcgcacccggaacggtcgtacccggagatcctcgccgcgacgctggattaccgccggtggcgggtgttctcgttcagcctcgtcggtgcggacggcagcgaggaccggctcaccccggcgcgacattcggcgctgtccggtggcgagcagtccgtctccctgcacctgccgttgttcgccgcggcgcacgtgatgctcgattcggccgacccgcacgcgccgcgtctgctcgccctggacgaggccttcgccggcgtggatgacaccggtcgcagcgaattgctcggtctgtcggtgcaattcgacctcgatctgttcatgaccggtttcgacctgtggatcacctatgccggcgtgccggggtgcgcgcactacgatctgtcgcattcggtggccgagcacaccgtcgccacgacgctgctggtgtggtcgggtggcgaactgctcgccgagcacgacgggtcggatctggagagcgcgctcggatccccgcgcacccgacgggtcacacgcccggtggagggagccctcgagttcgcctga

SEQ ID NO: 51492 - DNA, 1530 bp, Rhodococcus pyridinivorans KG-16
atgggcgaacacatcggtcgcgacctgttccgtcatctcgtcgccgacgaagcggacgagtacctcgcggtgatggactgcttcaccgacctcctgctcgccgatctgtccgccgacgatatcgcggtctcgtgtgcgcggcgcggggtggcgctcgacatcgcggtcgtcgatgcccggtgccgcagcctggtccggtggggcaatctcgcactcaccagcggcggaaccgacggtggcggctcccaccggcggagcgctcccgagaccgcctcgaccgaggtccgtgcccgataccggccgacaccggccgggctgcgggtccaccgcgagaccggcaggctcctctccacctccgacgacgtgcgcggcgtggcacgcgtgtcgctccgttgtgtcgcggacgggctcgcccgcatcgaggagctgctggtggacgacgggagcgtgcccgaccgggacgagctggccgcccacgtcaccgccctgttcgcgcaccaccggttgttcaccgacagcgtcgccgatttctattcgcacctcgccgagatcctgagccgtctcgagcgctccggccgtctcgaacactcatccgatcgcgaacgtgccggggtggtcgacgactacgccgaaaccaagaacctgctcctcgactacgtcgacgtcatcggttcggacgtcgagcgtctcgcccctctcgtcgccggccggctcgatcggatggagccgcgtctggactccctgctcgccgcggtgcgagagtccggcccgccgaacaccgtgcccgggtcccccggtcgcagtcgcaccgactgggacgaactggcgcagtggtacgccgaggacgccggcccgcgccgcatgcgcgaggcggcggcatcggcgctgaaccggctgctcgtgcgtactcggcggatcacgacgaccacgccgggcttctcgcaccgcgcagatctcctgcgcctggcccggtggttcaccgagtcctccgacgagcaggcccaccggttgttcgccgcgaccttcggtgccttcccgagccggcacctgctgctcggccccgacgagaccgacccgcgagtgggtgcgggcacgtcgtggtggcgggccgatcccgtcgtcgtgcccgtgtcgttgcgcgaacgcggcgaccacacgtcccgcggggccgtcgggcgactccccgattcgctgcccggccgggtccgggccgacgaactcgcccggcgagagtcgcgccgccgctccgacgccgtcgccgaactgggtgcggcgggcgacctgcacggagcggacctgtcgacggaggcacgcgacgttctgctcgacgtcctcgccgctgcgctcgcgggtcaccgcaccaccgacggtccggtgcacgtggacgatcccgatctcgggttgtcgctgacggcggagccgggcgccgacaccgtggtccactcccccgacggcgatctcaccgtgcacggtttccggctgcgcacgtcggccacggcaccgctcgattacagtgcggtggccccgtga

SEQ ID NO: 51493 - DNA, 1131 bp, Rhodococcus pyridinivorans KG-16
gtgagcacctcgtacgcgagcgcggtgtccggggacgtctccggtcggcgggacgcggcgcgggcactgctgcaacaaccgatcgtcaccgcggcgggtgatcgggagaccttcgacctcgtgcggcgccatgccccggctctgaagtcgatgttcgccgaccgtctcggataccggctcgtcgtcgaaccgaccttcgcccgtctgaccaaggcaccgctcgggccgacctcaccgcatcgggcgctccggcacgccgacggcaccgagttcggcgcgatcacctacgcgtgtctcgcgctggtgtgcgcggcactgctcgaacccgggaccggcgagagggtgtccgtcgacgacctgctcgagcaggtgcgcgccgatgcgcgcgagaacgggatcgtgttcggcgacccggtgtccgaggagcggaacttcgctgcggccctgcgcgtcctcgaggagtggggcgtgatcgccgagtccggtcgcggggacgaggcgagcggcgacgggccgcatctcgacgtccaccgcgacctgctcccccagctgctcgacattcccctgcacgggatgcccggtcccgcagcggcactcgcacgtcacgagcacgaacccgccgctcgccgcctgtaccgcaggctcgtcgaggatccattcgtcgcgcgcgacgaactggacgacgagtcggcgacgatcctcgcccgcgaccggcacgagctcgcccggatgctggaggacgacttcggcctcgtgctcgaggtgcgtgccgagggcgcgctcgcgtacgacccggccggcgtgctcaccgacgaggcgttcccgggatcgggcaccctgaagcacgcctgcctgctgctcctggccgaactcaccgaacggttcggcgactcggcgccgaccacgctgcacgtcgacgtccacaccctcgactcggttctcgccgatctcgccgccgcgcgttcccgcacctggaagagcatctacgtccgcgatctcgcactcctgcgccgggacgtcgtcgcactgctcgtccggctcgggctggcgcgcccgcacgaagacggactcgaactgaccgcacccgccgcccgctaccgccccgtccccgccgaaagcaagtgtcgatga

SEQ ID NO: 51494 - DNA, 4227 bp, Rhodococcus pyridinivorans KG-16
atgacccactcgtccgacccgtccgccctcgacgagaaccctccaccccgtttcccgagtcgctggcgtctccaccgcgccggcatcgtgaacgtgtggcactacctggacgtcgagttcgtcctgtccggggggcggatgatcctgcgcggcaccaacggatcggggaagtctcgcgccctcgagatgttgctgcccttcctgctcgacgccgaccgcaggcgcatggacgcgacgggcgccgcgaaggtcgatctggacgaactcatgcgcaccggggcgtcggacaccaccgaccgtgtcggatatctgtggctcgaactggcgcgttccagtgggcatctcaccgtcggagcgcacatccggtaccgcgccgacgcccgtcgcagcgacgtgcacttcttcacgacacctttgcgtgtcggcaccgagttgcacctcgtcgacgatgcccgcattccgctctcgcgggagcgactcgccgggctcgtgggtgccgacaacctcacccgcgatccggagcggcatcgcgagaccgtgcggaggtcggtgttcggcctccacggggagacgggacgcgaacgctacgacggcctgctgcaactgctgcacaccctgcgctcacccgatgtcggccaccggatcgacgagggtcgcctcccccagatcctgtcggacgcgctgccaccactgacggagaacatgctcgccgaagcgggaggtcgcctcgacctgctcggcgacacccgccaggaacagctccgtctcgaagcggcgcacgcacacgtgctgcgattccacgaggtgtaccggctgtacgcggcggatctgctgcgcgccgacgccgagaccgcccgcgacctcgcgcagcgggtcgtcgagacgcgacgcgcgctcgtcgtcgcggaagccgaggcggccgacctcgacgcgcaggccgccgccgcggacacccgcctgaaggagcgccgcgaccaggtcgccgaactcgaccgcgcgatccgcggactcgagacccacgagatgttccggtccgcggacgatctcgcgcagcgccagctcgccgtcgatgcgctccgtcgcgccgccgagcacgcagcggccgccgccgatcgcggccgtctgcaggaacggcgcgacaccgacaacgcggcccgcctcctcgacgaactgtcctgctcggtcacgcgtgccgcgcgacggcttgcgacggcaggtcgcgacctgctgtcggtgggtcttccgcacgacaccgtgccgaccatgctgcacttctccgccgaccgtccacccgccgtgctcgaatccgtgcgcaccggcatcgacgacaccaccgagcaggtggtgcggccggtcgtcgcgacggtccttctcgacgccgggcacgtcgacgaggtccgggacgcggtcctgcgtgccaccgaggcgacccgtcgccagcgggaccaggcgggtcggcgactgctcgaggcgcgtcgactcgacgccgccgcgcatgcggtccgggaagccgaggcggcggccgaccgcgcggcccgcgacgccgagcagcgtgccgtcgaggccgccgagacggatgccggtgtcggtgcggccgccgccggtctgcagcaccggtggcgcgagtggatcaccgccgaccgcacgacggctctgctgccggaactcgatcgggatcgggtcgtcctgatgcgccgactgtccacgcgactcgacgcactgatcgactcgtcccccaccgacgccggcgacacggactccgaggacgtcgacctcgattcggcactcgccgagctggattcactgcccacgactgccgctcggtccgccctgagcaacctcgccggcgccccggccgagcgcgagcgccgcgaacgtgaggcgcggaccgcgcgcaaggacctcgtccgcgaacaggcggcactcgacgcgatcggcgagggcccggaacaggcgccctggcacgtgcgcaccgacggtgtcccactgtggcgggcggtcgagttcgtcgacaccctcggggacgacgatcgcgccggaatcgaggcggcgttgctctccgcgggtttcctcaccgccacggtcgacggcgagggccgcttgcgtgcactgggcggtcaggtcctcgtctcgccgcgcggtgaaccaccggcgcagcccctgtcgacggtcctgcgtcccgaccccgaggccgacgtaccgcgcccggcgatcgaggcggtcctcaacacgatcggattcgaggacgccaccgcggtggcctcggtctcacgggacggccgctggcacaacggcgttctgcgtggacgccacaccgccgaggccccgcgcagcatcggcaggcctgcccgggaggccgcgaccgcggcccgtcgggtgcgtctcgacgagatccgcgccgaactcacccggatcgacctggcggtggaacagctgcgcgtcgactaccccgacgcggtgcaccggcgggcggagatcgacgcgcacctgtcgaccgcgccgacctcacatgccctgcgcgccgcgctcgaacgacgtcggcacgcgtacgcgcatgtgcggtccggggcgaacaccgcggtggaactgcgcgagcgggcgacgacgctgcgtgctcgctggaccgccgagctcgacgcacaccgcacggcgtgcgagcacttcggcgtgcccggcgatgttccggaactcgaggcgctggtcgccggatgcgcgtccgcagagacactgtgcaccgaactggcacgcgatctctgtgacgtcctcgccgcccatgtccggttcacggatgccgccgaacggtgcgtgcaggccaccgccgagcggatcgacgcggaggagctcgccgaatcgtgccgctacgaatggcacgcgaaggccgcggtggtcgctgcccagaccgccgctgtcgacgtcgatgccgccgacctggggcgggaactgcgtgactcggaggccgaacgggcacgcgccgacgaacagttccgacgcacggtcgcccatcgcgaccatctcggccgtgccgtcgccgaggtgctgcagcgatgtgctgccgcacgcgaacggctcgaccgcgaccgacgcgaactcgccgcggccgccgaactgctcgccgcgcacatgcagctgcccgaactgcgcgccgcgctcgaggaggatccgggatccgactccgcctctgcccggacggttctgcctccggtccacctcgaggatccggatcatgtgctctcggtggcccgcaccctgctggccgcgttgccgccgcgcacgggagtcgacgagaacgcgatgctggtcgcgctgcaacagttcgaccgcgacatcacggcccggttcgacatcgagcacacggtgacacacggcgcccatcgcgtccggatcgccggggcgggcgacgacaccacgcccgcgggtgtctcggccaccctgacccggcaggtcgaggacggtcggcgggcactgtcgcaacgcgaacacgacgtgttcacgggattcgttctcggcggtgtggccgacgaactgcgccggcggatcgagcgggcacgacaggtgatcgccgcgatgaacgacagtctcgccgacagccgcacgacgcacgggatcggcgtgaggatcgagtggcgccccgatggcgaggacgccgacgcggcgcggctgacgcagctgctcaccgccaccgagcggtcacccgacgatgcgtccgaactggtcgggatgctgcggcgccgggtggaatccgcccacaccgccgatccgtccgtcggctacgcccagcacctgtcgcaggcactggactaccggcgctggcacgaggtcgaggtgaccatcctcggcccagaaccggaccgggagaggcggatctccgcgcgcgccaagatatcccagggcgagacccggttcgtgtcgtacgtggcactgttcgcggcggcggacggttatctctccggcctgcccgacaccggcaccgcgctgcggctcgtgctgctcgacgacgcgttcgccaagatcgacgacccgacgatcggtgaactcatgggcctgctcgtgcggcaggacatcgacttcgtcctgaccgggcacgcactgtggggttgtgtgcccgaggtacccgaactcgacgtctacgaggtccggcgactcgccgacggtgcggccgtgacgacccgcgtgcactgggacggccgcgtccggcaactccgaccgctcaccgagctgcagacatga

SEQ ID NO: 51495 - DNA, 1473 bp, Planococcus rifietoensis
atgctagaagaggaatttaaacgcataaaagaagcgacgtatttatctgcggagaaaagtggaacatacagaacgattttacgtttcttttatattcagcatgaaagaatgaaggagtttttactgccagaggaggtgtttgcgcatctcaaagaatatataacttttgaggattatgcgatagaagaactccatatggatttgacgcagctggtgaaatggggcaatttattcgctcaacaggagagtggaaatgttcgcacaatcgaggaattcaagaagcgccgttttcgttatcagtgtaccccatataccgtggagttcgagcgtatgctcaccggattggaaagaagcgatacgtttagcggttcgctagaaaaaacgcagttcgatcgcttatacaaatgcctgaagagtattgaagtattttcgaaagatgatgatgatgaaaagtgtgcacagtattgggatgatgttctgacttatttcaataaaatccggcagaacacatctgattatttcgcatacctccgcagtgaagatgcgagtgaacaaatgaaatcggaagcgtttcttctatataaagatagcttcacagcctacttgcgagattttatcattgcgctgcagcaaactgcttcacaaatacaaggacttttgcagtcacttgatcaccgacatatggcatcgtttttcgagaaagtcgaccgtcatgagggaaaaacattccgcttcgaacagaatgacacggaagcaattaccgtaatgctagagaaatgggccaacattagagattggttccttggtggcgaagatagccaatacgaaacgatccaacgacagacgaacgaagcgatccgccgtatcacgcgtaccgtgcaaagattgggtgagcgcaatcagcaatttcggagcaggaaagacgattatttgcatctggctaattggtttgcaggaatggaatcagtcgatgaagcgcataagttgtcttcagttgtctttggtgtttttcacactcgtcattttcattcagatcatattcctaccgatgatatctatacagagacgtgggaagaacaaccaatgattcacgaaacactccctcgggttctaaaatacggagagaaaacaaagccgactgaaatgtcggatcacacagaacgaaaggaagaagcaaagcggcagcatcttaaacgtcgtaacgaggaaaaacgggttatcgagcagtacatgaatggcagcgaaattcttctccacgaattgccctccgtggagccatatgttcgtaaattgctattgtcatggattgccaaggcaatggtgagagaagaccggataattcaaacggaatacggtacgaaagtagaagttacgcttgattcgcatgaaacggtcttgcttaaatcgtcagatggcacgattgaaatgcctaatgcccgtttccgctttatccgggaagaggtgaggtcatga

SEQ ID NO: 51496 - DNA, 1170 bp, Planococcus rifietoensis
atgaatgtgagagaagaatattttgacgaacagacggaagaagcactcggactgttatttgagaagttttggattttacgagcggaagaccccaatgcttacaagcagattcaggagcgggaacacaaattaaagcgctacatcagcgaaaagtttggctttgatctaattattcgacagcattttatcaagatggagaaagtaccggttgaaccgaaaagttggatgggtattcaagtattccaagagccaatggactatgctattttctgctgtgcacttgcttttacggaacaaaaagcagtaagtgagcagtttctgctatcagacttaacagaaagtatccaggaaatttatagtggtgattttccacttgattggacagattatcggcatcgcaaatcactggtgcgtgcattgaaagaaatcgcccagttgaagctgattcgtacaattgacggaaacgtagaattgtttcagtcggatggtggagaagaagtattgtatgaagtcacgatttatgcccgctattttatgcgctcgtatccggatgacctattccgattcaattcaattgaagagattttggaaagcgaatggcaacgacatctagatgatcaacggcgcaagcgcgtctatcgaaagcttatgttttcacccgtggtgcatcgcaatggagaggcagatgcagattttgcttatatccgtaactatcgaaactcgctgcgtgatgatttagaagcacacccgccgtttagactcgaagtattcaagaatgcggcaatgctgactttacctgagcggaaacaacgatatacatttttgccggaccagcgtggtatcagtagtgtcgcactgcacgtggcagcatatttgcgtgaagaggaaaattttgaagtgacagagcttggcgaagtccggctgccgcgtcaaacatttgaagcaattgtgagacaagttaaggagcgacatggtcatggttggagtaaacagcatcgcgatgagacagataaagagacagtcgcatcgcttctttccatgtggcaggaatgggaacttgcagaagtagataaggagcaggaagtaatcgtcatccgttccggcgcagcgcggatgatcggccattacccaaaagactatatgaaagaagtgaagcgaagtgacgaataa

SEQ ID NO: 51497 - DNA, 4113 bp, Planococcus rifietoensis
gtgacgaataaatggaaaatgaatcgggcaggattgttgaatttctggtattacgatgaagagacatttgattttgaagatggaaaactcttactacgtggcagtaacggctcgggtaagtcagtcacaatgcaaagctttctaccggtcttactagatgggaaaaaatcccctgaccgattggacccttttggatctagatcacgtcgaatggaagattatttactcggtgaaaaagagataaccaaccgggaagaacggaccggctatttattcctcgagtataaaagacagggtacggatcagtatgtaacgacaggtatcggcatgcaggcaaagcgtggcaaagaattgaaatcatggggatttgttattaccgataatcgccgaatcggtgtcgatctggaactgttcaaggtggaaaatcagaacgggaagttggcgaaaataccaagatcccgcatcgaactggaaaatcttatcggcacgggtggagaagtcgttaagacgaatcaggaatatatggcacttgtgaacaagtacgtattcggcttttcaacaatggatgcatataaagaattgatcgagctgctcctccagcttagaagtccgaaactgtcgaaggatttcaggccgactgtcatttatgaaatcttggagaatgccttacctcctttgactgacgaagaccttcgttatctgtccgattcgattgagcaaatggatcagacgaaacagcaaattgaacagctcgatagggaagtgaaagcacttagcaaactgacgaaagcgtatgatgcttacaaccatagaattttggccgaccaaattgaagaactgaaaagggctatattgcgagtgaagaaagaaaaggaagacgagaaggcgatggtggcgtcacttcgaatactagagtcagttattctttcgattgagcaagaactcagagaacatgagcagcgcgagaaagcgctcaagcagacgaaagaccggctaacaggtcatcggatgtgggggctggaagcggaacgagagaaattactgaaatcgcagtctgacaatcaaaataagtttaagcgcgaaaacaatcgacttgcaacctatgaaaataaagaacgacaaagtaaacaggtgattgaagatacagaagaaacgctcaacgaacagcttggcagactgaaagaccatttgcaggacatggcatatgaaggagaaatgagtggattcggacagcatgagcagaacgcagcagattttggacgttatttggaagaaaaattttcgtttggcacatgggaaagagaaacggctgctcatcataagcggctagaggaagcccgaggtaaactacagacatttgaagcgctgaaagagaaaattgccgagaagcgtaaagaaatcagcaatattgagcatcagcgtgacgaaaaaaagcaagaggcaaaaggctggaacgatacatttgaagaagataagcaaaaaaagttgaacgaattccacttatgggcacaaacttataaccaatacgggatcgctggaactgcgcaccagcaagcatctcgtcttttgggtgaactgtatgtggacagttcatatagtgaggtgaaacaatcctatctaccatttgtacaagcatatgatgataagctgcaactcaaaagactgaagcaagaaaacgagctgaacgttcaaaaagacaaactggcggataaaaaaactgagcttgaagagagaaaagcacagcgtgatccggagccggaacgccagccggcaacggtcgaagcaaggcaagtccttttggaaaaaggtgtggtatttgcacctctctatgagctagtggaatttcaaccgaatgtatcggagggaatgcaaaaacgtctggaagcggcgcttattgatgctggactgcttgatgcattagtaacggaacaggcggtcgatattttacatgaccgcgtattggaagaagcaccggttatgctcgcccacacactcgttgattatctgaagccggacactggacagaccggaatatcggttgaacaggtggaaaaagtattgcaaagcatactcgtcggtgaccacgatagtacgacggggataggagaagacggcacatactcactcggtattctaaatggtcacgccgtaccagtcgagcatgtacgctatatcggacgagaagcacgtcgacgtttccgtgagcggcttatccaggaactggagctggaaatcgcgtcgataaaagagcggattaatgtatttgtagcaaaacaggaagcgacagccactgaactggctaactctaaaatagcctggagtacatttccagaagacctagatttaaaaacaagtttcaatgaaaaaagggaagcagagcgtcaaatccaattcttggacagtcaaatagagcaggcagctgaggggctccggaagatggacaaggactttcagcagttgaaacgggatgtgtacgaagtaactcaaacactttcattggaaacaacagcagaatcgtaccgtgaagcgctcggatttttacggacatacgaaaagcaattggcagagcttaaaaatcaacatctcatacgtcttcatgatgctgaaagtttgagaaaagaacaagagcagctgaagtatttagtagaggacattgatgaactgaaaggcgaactgaatatgctggaagacactcttgctattgccagccaatctcttcagcatctggatgaacaactggaggaggaaggggccaacgacatacggaaacagattcgctctgttcaacatgagctacggcaaatcgaagaagttttagccgatcggcgtactactctgccgcagcgaaaagccgagaaaacagcattgagtgatcaactttcggtttcctctaaaagactcgctttttggagaaacatgcagacgagttgggaagaagcggtgcggggagaacttaagcgcggatttatttcattaaaggaaagcgtatggcaagatgtgactaaagtagaagcggcattattagtggatgtctcgaaagataaaagccagattgaacgaaaacttacaaacgtattttacgaagtgcagacagaccttgctgaacaccgcatgcgtgagcgaagcgtgaagtgggaattagaagactggatggcgggcgtcgacgcagatgagttgttaccaatcatcgatcagtggcgtcaaaagacatcacgccgaatcattgaattcgataatcgtggcatatcggtaacaccttattccctgtataaagaaattggagatgcgcaactcctacaggaaaatcgcttgaacgaacaagataaagaattgtatgaggaaattctattcaactcggttggtcataaactgcgcagccgaatccgccgggcggagaactggactgaagggatgaagaaattaatggaaagtcgcgattcgtcttccggtctaaagttctctatccggtggaaaccaagaagcgcggactctgaaagccagctagatacaacagacttggtagcgttacttaagcaggatgcacgattgctcaaggaagaagatatagaacgaatttctacccactttcgttcgaaaatcgaaatggcaaagcagtggatgctagagaaaggagaaggacagacactcctgcaagtgctgaagcatgtcttggactaccgcaagtggttttcgttcgaactatcgtatgaacgaccaaacgaaaagaaacgtgagctcacaaaccataaatttttcacattcagtggcggtgaaaaagcgatggcgatgtacattccgttgttcacggcgtgctactcgcgatatcttgaagcagctgatagcgcgccgtacatcattacgctagacgaagcatttgcgggcgtagatgagaacaatatcaatgaaatgttcgaggtcgtcgaacagctagggtttgactacatcatgaattctcaagttctatggggagattatgagacggtcagcaggctatcggtttgcgaactagttcggcctcgaaatgcagattttgtgactgtgattcgctataaatgggatggccgtgcacttgtcgcagtgacagatacggaaagggattggcagaatgaataa

SEQ ID NO: 51498 - DNA, 1260 bp, Planococcus rifietoensis
atgaataaggagataatctgccaagctgtcacttactttcaaagtactcctgtgtaccacaagctgtttagtgaatttcgagcaaaaatcgaatcgcttggtcgaataggtggtaccgtgaatattgaagattattctgcggaggagctggaatcactaacactttttttcggagagatgggaaataagaaagcaattcccctcattgcattcgatgagcggttgcaggaaacgaagtttgtagacattcatctacctgaattgcttgaagtgtttttcggtgaaccgattcgttttaataaagatgtgcggaaagagaagagggacaaggaagaggaaatgcttaagaaattaggagttacttatcctgtgctgaacggttacttcaattatcttagtaagcgaacagctgactcccactggattatccgacttctgttaactgacagttttactttgagtgcccaatttcttgcgaaggcagcgaatgcgctaccacagaagtttgagcggctcccgtttttcagtcagagagtgagcggtaatccacacacatttgatttatcgggaatgaacggcaagttgcttattcattttcttcattttcgactttacgatggcggagcaccaccttccggcacggaagaagtgaatgaactcttgctgcaatttctgattcttcgtgatgatatttcaaattttgtatcatttgctaatttactcggaactcaggatggtacagtacatcctgtttggtatgcagctgttaagacagaaagtgcagtcaatatgccactgcgggaactgcttctgattgatttggtaaaaccagcagtggggaccgatgtctatgtcgtagagaattctggtattttctcttcgctgctcgatgcggtgccgtctgctcctcttgtctgtacgcatggtcagttcaagctagcgggacttcgtcttctcgattttcttgtggagtctgggagctacgttcattatgcaggtgacttcgatccagaaggtgtggcaatggcagcccgattgcttgaacggtatcccgaacgcgttcgactgtggaagatggattcagaatcttatgcaactgcactgtcgtcgtttgaacttggcgaccgtgtcaaaaaaatcggtagtattaagcaccctgatgtacaggaaatactggcgatgatgcgagaaacaaagaaagcgggctatcaagaagcactgctggaagaaatggtgaatgaactgaaagagaaatattaa

SEQ ID NO: 51499 - DNA, 1536 bp, Desulfitobacterium hafniense; identical to SEQ ID NO: 49790

SEQ ID NO: 51500 - DNA, 1251 bp, Desulfitobacterium hafniense; identical to SEQ ID NO: 49791

SEQ ID NO: 51501 - DNA, 4089 bp, Desulfitobacterium hafniense; identical to SEQ ID NO: 49792

SEQ ID NO: 51502 - DNA, 1422 bp, Desulfitobacterium hafniense
atggaactaatcagtcgaaaaacagccagacaatactatggagatccccttttagggaatctcattgatgctgtcttcaaaaagtatcagggccagaatggagtaaggggtaacgcaaaaatttgcgtgagttcgagtgaagaagcccaacggttgcaggactattttggcaatcgcctgaagcacttaatccgtcccgggtcagaagtggaagtgcctcttaaggtatttgcagaggaattgcagttgggttatagactgtccattcctgatttgtacgaagtattaaagggtgaaatgttattgacaaaactggaacagcgtcaattgaaggaagaggcatgggcgcagatctttatgcaggtcaggatggaattgcgggaaaaggccgagattgacttggataatgaggtttttcgggcagaaacttttgattggttgaaaaggcttgagggcggagaagcatcggggtaccatgttcttagaagcgctatgaataagggtgaggatgctgttgatgctcttttctgttgcttaaagggtttatggtacctgttggtcgataaagagaagatcaaggacaaaataggaaagaatgttaaggaaattagaatccctatatttgctgtccatgtaacatcagataaagattcgcatggttttgattggacaaagacggcaggaagattattgtggtatgccctttatgatattgatatacaaagaatcaaagccggtaaaaaaatggctagtgagaagttgatagttcctgagtatatgcaaaagaggcagatatatcgcaattttggtttgaaagatgatgatattagctccttttcccatgtttttgcacctcactttgtttcgggaacatctcctcgaacattaaacttgagggaaattcaatcctatggaaaatttccgatgtactcggcattatatgtgtttgagaatcccgcggttttatctcacattatagatgaacttatccatttcttagatatgaacggattatcccttgagcaaattcccaaaaaattcccggccttgttatgtacttcaggtcaaccacgtagtgcagctcttgagtttattacaaagtgtcttgaggcaaaccccaattgccttatccgctattccggcgatctagatttaccgggggtacagatgatgcaaggaatacaagggcaatttacatttaggttcgaggcattcaggatggatgataagacttatcgcaattacagtgatgcgaatcatttacgcctatcgtttcaggataaaacagtattgaaacgaatgggagatgagttgtcaaaggtaatggtggaactaggcgtaaagatatatcaagaagaatttgtcaaagacttagcagaagatgtgttggagaccattaggcaggaaaaggagattgaatga

SEQ ID NO: 51503 - DNA, 1620 bp, Streptomyces sp. AVP053U2
gtgcgagtgcggcagactggtgcggaatctcggctgtccggccggggcgagtacgtgtccagccgcagcgaggaagccgccagatccgtgagtgacgagcccgacgccccggaccccgtcgacgagggcgcgttcggtatcgacgcgttctccctcgacgaccggctgcggctgttccacttcgccgccgccgagaagcgccacgagtacctgtggctgctgcgggccttcgaccgcggacgtgccaactaccaggtgctgctgaatgcttcggacgcggtggggctgttggagcggctcgccgccgaccaccccgccgcgagcgcagtcggtgggcaggcgggtgtgcagtcgttgctcgacgcgcttgcggagtggcaggtcctggaccggtcgtacgacgggacgcgcgccgcgaacctcgccgagtaccgcaaccggcactatgtgtaccagttcacccaggccgggtaccgggcgtaccgggcggtggaggacgtgctcggcgcgagcctggaggacgcccagctctcgcgcctcgtcttccccgacatcctcggggacctgcgtgcgctggccgaggccaacaccgcgggcgacggcgaggaggtgtaccgcaagctcggccgtctcgactcggtgctgaacgagatggcgcagcgtgccgcccgtttctacctcatgctcggcgacctggcgcgcaccaacgacacccgccccgaggtgttcctcgcccacaaggacacgctgctcgcgcacatgcgggagttcaccgccgaactcggccgctacgctccattgctcgccgaggcggtcgagaaggccgcggccaccggcgtggaccgcatgatcgagtacgcggccgaggccgacgagcggctcttccgcagccccgccgagcgcctcgcggactggcggcaccggtgggacggcatcgtccactggttcgcggagcgcgagcacagcgagaccgagcggctgcaggacgccaccgtcaccgcgatccgctccgtcctcgccctgctgcgccgggtcaccgaggcgcgccggggcggggtcagccgggagagccaactgcgccatctcgcacagtggttcacctcctgcgagaacgacgaggacgcgcacgccctgttccaggcggtgttcgggctcggcgcgccgcgccatatcgccgtcccgtacgccgaccccgagcggatcccggggcgtacgtcctggtgggaggcggaaccggtcgaactcgcccgcaccctggtccagtccggccgcacccccaccctgcacggccccggccgcatcgaacgcgacgacgaccggcgggcgctgctgcgcgccgagcagctcaaggagcaggcagagcggcgcggtgccgcgaactccctcgcgtcggacggcgtgtacggccggaccctcgacgagcccgagacgcgggcgctgctcgccctcctcgacgtggccctcgccgccagagtccccgccagccgccgggtcaccgcggcctccggctccgcccacggagtgcggctcaccctcacccccgccgagggctccaccaccgtcgacaccgtgcggggccgcctccatctcgacgggctgcgcctggaggtcaccgcatga

SEQ ID NO: 51504 - DNA, 1425 bp, Streptomyces sp. AVP053U2
atgagccgtgccgccgagggtgtctccccgctcgaactcgccgactatcagaaggcggtacggctcgtcctgcggcatccgctggtcacgcccgggtatccggacagggcggcgctggcgaccgtgcgccgctgggccgatcagttgcgcaccgatctgatggaggtgctcgggtaccggctcgtgaccaccgccgacaccgcccggctgcagcgcgcccaggacggcctggacgccacccgcccggccctcacccgcgcgggccgccccttcgaccgccgccgctacgcctacctcgtcctcgccctcgccgccctgggccgccacggcgcgcaggtggcgctgggcgaactggccgacgcggtcgccgccgacgccgtacgcatcgacggactcgggctcgacaccgcacgcaagcccgaccgggacgccttcgtcgacgccgtcacctggctcaccgaacgcggcgcgctcaccctcgccgacggttccgccaccgcctgggcaggcgatcccgagcgggccgaggccctgtacgacatcgaccgggagatcctcctcgccgtccaccacccgacccgcgtgctccagcacctgacctcggtcacctcgctcctcgactcctccggcgcgctgggtctgtccgcgggccgcgccgcccagcgccgcgaccaggcacgccgggcccgccggctggtgctggagaacccggtcgcgtactacgccgacgccgacagtgaactcctgggccagctgagggccccagccctcgccgaggacctggaacggctgaccgggctgacggtggagcggcgggccgagggcgtggcgctcatcgacacctccggcaggctgtccgacatccgcttccccggcggcggaaccgtcgcgcaggccgcgctgctcctcgccgcccggatcagcgccgctgtgcagcgctccggacggcacgccctcgaactgctgcccgcgcccaccgccgccgaacgcctcgcggcccgcgcccggcgtatcgacggcgccctgccgtcgcgcggactgatcgccgaactcgccgaactcaccccgtccgatgaggagtcggcgtacgagacgctcggagtcgaggggcaggagccgacggagacccgttaccccttcgtcacggactcctggctccgtggccggctcagggagatcaccgccgagtacggcgcgggcttcgccgccgatctgcgcggcgacccggaccggctgctcggtcaggctctcgacctgctggccgccatgtcgctgatcgtccgggtcgacggcggggctctcgctcttccgctggtcgcccgctaccggggggtcacggcccgggtgagaacccgtacggcggccgggccgccctcccagacacctctgttcaccgaccccaccgccaaggactcgactccgtga

SEQ ID NO: 51505 - DNA, 4143 bp, Streptomyces sp. AVP053U2
gtgagcacccccgctcccactccggccgacctctcggccgctgcccccgccgcccggttcgttcccacccgtgccgggatcatcaacctgtgggactaccgggacgaggagttctccttcgcggggggctggctggtgctgcgcggccccaacggatcgggcaagaccaaggccctcgaagtcctcttcccgttcgtcctcgacggccgtatcgaccccaagcggctcaacccgttcgccgccgaggaccgcacgatgaagtccaacctgctcttccgcggccaggacagcgcactcggctacgtctggatcgagttcacccatcgggagaccggccaggccgtcacctgcggcatcgggctgcacgcccagcggcaccgcgacacccccgctcgctggcacttcgtcgccgagggccgggtcggcgaggacttctccctcctcacccacgacgaccggccgatgacgaggaagcagctcgccgccgaactcggacgcgaactgatcgcctccacgaccgactaccgcgccgccgtcgaccagcgcctgttcggtctcggcccggagcggtacgagcaactgctcaccctgatcctcacgttgcgccgcccgcagctggccaagaacctcgacccggccaagctctccgacaccctcacggccggtctgcgcccgctggacgacgacctgatcgccgaggcggcccgctccttcgacgacatggagtccgtgcagcgcaccctggaggggctggtcgccgccgacgacgccacccgcgcgttcctcgcgagctactccacctatctgcgggtccacgcccgtgccgccgccgaccggctcaccgcccgccgtaccgagaccgccgagcgcgccgccgccctgcgcgccgccgcggcagatctcgaggcggcccgcgaacggcaggccgccgccgagacgcgagccgagtccgccgacgcggcgctcgccgcccagcgctcccggctcgaccagctgcgctcctccgccgcctaccaggccgtcgagcaactggccgacctggaacgcctggtgcgcaccttcgagcagacagcccggcaggcgagtgctgaacgcgaacgtcgcagcgccgccaccggccgcgcccgcgccgaggccgaacacgccgcgcggctggccgccgaactcgacgccgccgtctcccgtgacgcggcgaccgtcgccgaccacgcccacaccgcgggcctgccttggacaccggccgacgccgagcccgcccgcctcgccgaccgctccgccgcgctggccgccgcccgtcacgaggacgtccgggccgtgcgcgccgcccagcagacggcacgcggcgccgagcagacccgcgccctcgcccgcgtctcgctcgaccgcgcgcaggaggccgtcaccgatgccgaaactgcggaatccgcagccgagtcggccctcgaatccgcccgagagcaggcccgtgaggcgctacgacagtgggtggggacgcacggcgagctgctgaccgaggaggggaccggccgactcgccgagaccctcgaactcgccggcgaggccgatgcgttcactctcaccgatgccttcaccgaggcgacggcccccgctgtgcaggaactgcgtgacaccctcgccgccctgcgcgcccagcgcaccgaagtcgagcgccgccgcgcggagacggaggccgaacgcgaccggatcgccgccgagcacgacgacgccccgcccccggcccgtggccgcaccgccgcccgggcgcccggcggcggggttcccctttggcggctcgtcgacttcgacaacgaactgacggaccgtcaacgagcggacctggaagcggccctagaggcatcgggcctcctcgacgcactcgtcacggccgaggacacccccgtgacggccgggcagagcgagggctacctccgtgccggcaccccggtgagcggaccgagcctcgccgatctcctgcggcccgacaaccccgacaaccccgacaacccggcgggcgccgcggcgatcccgaccgccgcccggatcaccgccgtattgagctcggtcgcagtcaccggagacgtcgacaccggcatcccgcagatcagccccgacggccggtacgcggccggtgtcctggtcggtgcccacaccaaggagcacgccgagtacgtcggcgcgactgcccgcgcccgtcggcgtgccgcccggatcgccgcctgcgagactctgctggccgaactctcctcccagctcgacgagtcggcgcgcgcacaggcccgtacggacgccgccctcgacgcgtacgccgccgcccgcgccgccctgccccgcaccaccggcatcacacaggcgctgcgcgaactcgaccgggccgcggcgaggctgcgcgccacccgcgatgccgccgacgccgcccagggcgcgtacgacgagtcggtggccgcctgctcggtcgccgagcgcgccctgcgccgcacggcggccgagcacggcatcgagaccgggcgcccagaacaggtcgacgccgtcgagaccgccacccgcgctttcgagacggcgacccgcgaactcgccgcacgccgccgcgaacaagcccggcagttcgacgccgctcacgtgggcgccgaccggctcaccgccgccgccgaggacgaggaggcggcggctgacaccgagcgcgcggcgcgccgtcggcacgcggaggaggccgcgggacttgaggcccttcaggaggccgtcggggccgaggcgcaggaggtgatgcgccacgtgcgggagaccgaggacggcgtcgacgcactggtgggggagaccgaggcggcccgcaccgcccagcacggcgcgatcgcgggcaccgccgcggccgaggcccgccgtacggccgccgcctccgccggggcggtcgccgcggcggaggagaaggacaccgcccgctccctgcgtccgtacgccacccgtgaactcctcgacatcctgcgctgtccgccgggtctcgcctggcccgcccaggaggccgactgggccggcgaggcactcccgccggccgtggccgccgtgcacgaggcgatcctctccgcgacccgtgacctcactcccaccgagaccagcctcaagcagtccgtcacccgcctgaccaaggccctggacgacctccaggcgcaactcgccgccgcggggcaggactaccggcccgaatgggacggatccgacggggtcattctcgtccgcgtggccgacgaggagggcccgctgcccgtcgccgccttcgcccagaagatctcctcccaccgccgtgaccaggccgaactgctctccgagtccgagcagcgcatcctggaggacgccctgctcacccggctcgcccagcagatccacgaccgcaccgtcgacgcccgcgacctgatccggcggatgaacaccgacatgcgccggcgcacgatgtcctcggggacgacggtcggggtgagctggctgctcgccgaccacctcgacgacgagcagcgcgccgtctgcgccctcctcgacgccgacgccgcccgcctcggtccggacggtctcgcccgggtgcgcgtccacttcgccgcgcagatcaagaccgtccgcgcccgtcaccgcgaccagccctaccgcgaactgctcgccgagaccctcgactaccggcgctggcggcagttcgcgttccagctcgtgcgcccggacaagagcgaggagcgactcacccgcgcccggcacagccgcctgtccggcggtgagcagtccgtgtcgctgcacctgccgctgttcgcagccgcgcacgccatgctcaattccgcagacccgcacgccccgcgtctgctcgccctggacgaggcgttcgcgggcgtggacgacaccgggcgcggcgagctcatgtcgctggccgcgcagttcgacctggacctgttcatgaccggctacgacctgtgggccgcccacgcctccgtgtccgccgccgcccactacgacctcgcgcacaccgccgtcgaccacaccgtctccgcgctgctgctcgtctgggacggcgcccggctcctcgccgacgacaccggcgacctgaccaccgccctcggctcacccggcacccggcgcgtcccgacgcccgaggaggccgcggttgccaactga

SEQ ID NO: 51506 - DNA, 1287 bp, Streptomyces sp. AVP053U2
ttgccaactgagcggcgcgaagacgacgggtacgacgagttgcggggcgagggatggacccggctgctcgccgccgcccgccgcaggctggagcacaccggtggcgcgctcgacggcgacatcgggctcaccgggcccagcgaggccgagcgccgcaccgtcatcgggatcaccggccgctaccggcccgagaccgccaagcgcctcgccgtacccctgagtgatctggacgggtatctgtacggccgctacggcaccggtctcctccagaccctcggccgtctccacgggccgctgcgtgaccggccggccgaacgggccgacgaggaagcgcgccgcgaccaggccctgaagtcagcccactccagccggctcgccgggcaggggtggttcgccgcctggctggagcgggtcgccgccgacggcactctcacccgtctagtacgccggggggacgcgccgcttctcgacgcggcggtacgtgtcctggaaaggctgaccgttgacggggaccgttccgcgggctccccgaaccgggtccccggtgtcctgccgcttccggtgctcgccgagtgggccaccggcgacaccaaggccctcgtgcccggcgctccgctggaacagctcgtcctgcgcgctctcgcccagcgtgccggtgacgggtgcgccgtccctcgccagcgggcagggcggcgcgccttgtgggagagcgtcggcgccatcgcggacgacctcgccagccaggtcctcgtcctcaacatcggtgccgagggggacaccgtggtctgtgactggctgcgcgacgccgccgacttcggcatccccttccggctcaccctccaccagctcaccaccgaccccgtcgtccccgccgcccgcaccatcttcgtctgcgagaacccggccgtactgcgcgccgcggccggcgaactccaggacacgagcgcggccctcgtctgtaccgagggcgtgccgtccgccgcctgccacaagctgctcggcgacgccgtacgcgcgggagcccggctgcactggcgtgccgacttcgactggaccggcctgcgcatcgccgcggatgccgtggctcgccacagtgcccgcccctggcggatgaccgccgccgactacacggcggcactcggccagggcgagtccactgcgctcgcgggaccgcccgcggccagctcctgggaccccgaactggctcgagccatggaggagtcgggcagcgcggtcatggaggaacggctcctgcccgcgctcctgtccgacctctcccgcatctga

SEQ ID NO: 51507 - DNA, 1593 bp, Streptomyces silvensis
gtgaccgatgcgcgtaagagcgtgggatatctggtgcggccggagtcaagcgaatacatcgcgatcatggatgtgctggaagggtcggtggccgacctgaccgtcagtgaggtcgcaacagcgctgtcggctgccgggctccgcttggacgcgcgcctggtggaaacccgcttggacgcgctgaaggacatcggggctgtttcggtgcggtcggacaccagtcacgcgcgtcgctacgccgagatcctggcccggaactggcgctacaccgccagccctgcgggccggcacgtccagcgtttctaccgccaggtcctggcgggaacggtcaccgtgcgggagatcccgatcgtgtcgcttggccgcatcgtgtcccaccttgagcaactcactgcagctctgggtgcgggcgagcccgacgccgatcgcctcgatgccaccgtgctggatgccgtgaacgccgtgttcaccagccacgacgacctcgatgccgccctggtcggtgccgaggacgcactgatcggtcttgccgaccggttcgacctggatgaggaacacaccaacgacctcaagggcctgctggtcgactacgccacccgcgtcgcagccgaactcgattccggctccgcacgggccgccgcggcactcgcggtgctgcagccgtggttcgccctgctggcccaggcggctgttgacgcctcccaggcccgcgacctcatcgctgtcggcgccctcagcgcctcccgcggcggccgcgcggaggactgggaaggactgtacgcgtggttcgatgcccgcaccggacgggccgcgcggttttcgctgcgcctggtgagggcgctgccgagcatgcatgccaacctgcgccggctgcactcctcagcaggcaccgcctccacccgtagccgtgccctggccctggctcgggcggtgctgaccccgcagatcggggtgcagatcttccaggccgcactcggcgaccattcctggcgcaagctctacggccaggctgaggaggacgacaggggccgcaacccgtcctggcgcggcggaccgcaggtgccggtgccgacactgctgcgcaccgtcggccggtccggtccgcgcggcagaggtgcagcaccacgcgacgacaccgcggccaaggcccaggtcgccgaggcccgggcacgccgccaagccgaacaccaaagggcactcgccgcggtcctggccgcacttcccggccagcaactggatgaggtagcggcccgagcagccctcgccgcgctgatggccgccgctcgcgccggtgcgaccgggccccgccgcacaggctcaaacgggggtcttgcctgcacgctcctccacaccagctccggtacaggcatcctgcacgcccccacctggcgggtgctcctgcccggacgtatcccgctcttccaccggcccggccagcgtccttccgtcgcggccctggctgcccttgcgggtactacgacgaccgacgacccttcggcacacgcaacgctgcgcatcaccccacacaccggtccgagcacacctgacaacgacgcatcgcccttcgtgccccggcaggagggcgcagcatga

SEQ ID NO: 51508 - DNA, 1239 bp, Streptomyces silvensis
ctggcagccacctgctggctcatcggcggccgccacgacgaactcatcgccgcagtacgccgcaacgaacacgccctgcgttccgccgtcacccggttgggatgggtcctgatcatcgaacgtgacctggtgcgcctgcgaaagagcccgccaccacggccccaggcatgggccgaccagggaccgagtcccgccgtctgctcctggttctttatgctgctggctgctgccgagtcgatgccgccgcgtacggccgttggacacctggttacccaggcccacgccgccgctgccgaagcaggactgcccgtccaccacgacatcgcagagcgccgggccatcgtggccgccctgcgtatgctcgacgaccgtggcgttgtcgaacgcctcgacggcgacctcgacggctacctgcacgacgaccaggcgcccgtgctgctggccgtccatcacacccggctggcctacgtcatcgccaaccctggcaccctcgacccggccgccgacccgcacgcatggctggaacaggcacagcgcgaaccggacgccgcccgccggatgcgccgcgcgctcgtggacgacacctgtgtgcacaccgcgctgctggacgaggccgaagcgcagtggctgagccagcgtgtgcgcggcgacgacggcggtccgctggccgatgcgttcgggcttgtgctggaacgccgcgcggagggagccgccttcgtggtgcccgacgaggccttccgtcacttcagcgaactcggcccgatgccctttccggcgtccgggaccatcgcccatgccgcgctgctgctgctcgaccacgccgctctgcacggcaccgctgagaacgcccctgggccgggctggcgcggcctgagtgaggaggcggtggtggcagcgctgacggcatttggcgccgacaacgcctccggccggggcggctggagcgccgagcacgtccaagatcccctcctgctggccggcaaagtcggcgacctgctgaccggcacccatctggcccggctgaccctcaccaccccacaggccgacggcaagacgtccctgtggtggttcgcccccaccaccggccgctgggcggaggaaggcaccgcccagcccaagaccgcccgcacccgctcacgccgcggcacatcgacaccacagcgctccccgatccctctgcagcagggcctgttcagtgcgaccgagaccgacgagaacccggaggaacaccctgcatga

SEQ ID NO: 51509 - DNA, 4245 bp, Streptomyces silvensis
atgagtgacatcctggacctcgacttcgccctgcctccagcgccggaaccgtcgggcaacgccggccgcttcggcggccgctggcggctggtcggcgccggactgtcgaacgtgtggcgctacggcgacctggaactgcccgccgcatcgggccggctgctgctgcgcggccccaacgggaccggcaagaccaccgcgctggaagctctgtggccctacctgctcgatctgaacggagccaaactggccgccggcaaggcgcggcccaccacgctgaagctcctgatgagtgacggcgccccggccaagggccgccgttacggctatctgtggctgacgttcgccgccccggccggcgaaccggtatcggacacgccggacggagcggcagtcggcggcgttgtcagcttcggtgtccggctgcagtactcgccgagttccacccccgctgtcaaggtcgtccccttcacggtgccaggtcggccgctgaaggacctggcgctgcgcggcccccacaacaacagtgccctggagcatgaggagttctccgaccgcgtcgaggccgccggcggacgggtctttgccgagcccgaggactacgtcgaagagctggccgcccgcatctggtccaccacctccggtgaactgaggcttctcgcatcacggttgcgagaagtgcgcaatcccaccctgctgggcgacgtctccccggccgcagccgccgacgcactgcgccagtccctgcccggcgtggccgaggacgttctcaccgccaccgccgaggccctcgccgaatccgacaccacccgcgaggcgttcgaacgcgacgaacacgccgccgtcctccttgaggaattcgcccgcgtatggaccgggcacgccgtcgaagtcacccgcaccgcccacacctccgcacgccacgcccacgacgacgccagcacccgcaaacgccgcgtccagctctgcaccggcttactggagagcgcgaaggccgaagccgaccaggccgcaggcgacgtccaacggctcgagaacgcccaccagaaggcccaggccgccgtccgcgccatcgagaccagcgatgcctaccgctcccacgggcacgtcatggacctgcgtaaacggctccgggcggaacagcgcgccgcatccagcagctacgacagcctgcacgccgccgcccagcaggcccgcacacagaccaagaccggccacgacgccctcgatgacatcatcggcgacatcgcagagaccctggccggggcggaggcagccggttcccagccggtggcactggagatcctgctcgcccaccacccccgggcccgcgtcacccgtccggtcgccgaccgcattgctgacccgggccccggtctcaccctcacccacgaccgcgaaggcctcgaccggcttgccgccacgtggagggcccgagcccaggaacaccgctccacagccgaccgggccacgctggtcctgcgtgaccacgaccccgtcgcggcagccgaagggacagccgcgaccacacaccgcacggcagccggcgccgagagcgcctacgacgaagccagccaggcccatgaccgagccaccgcggccgcccgctcggccgcccgccaagctctcgccgcggtgacccggtgggcagccgaccaccccgccctgcgcggcctgcacgacgaagcaactctggacggggacgaactgacggtgtgggacacgggcgacgtcgatgccctcatccacgcagaacctgctgcggtccgcgaccagctcaacgcctgggccaaccaagccctgcgcatcggcgaaaccctcgccgccggccacgagagcgcagcccaacaccacctcgccaccgcaacaagcctcgacctcaccgcgacgcagcaccgcaccgaggcccgccacctgcgctcgggacggctgctgcccctgccccgccccacctgggccgggccaggcgaggacgacaccgcgctcggcagcctgctcgaatggcaccccgccctcgaggacgcggacgaccacaaggcactgctggagctggccctcgccagttccggcatcctcggcgcccacctgcacaagggccgcgccaccacccacgcctggcacatcagccccgcaggggcagtccaagagcacaacctgaccgccatcctcaacatcgcccccggccacccgcacaccgacctcgcccgcgccgtcctgcagcgcatcgccctggccgacaccgccaccccctccggacaccgtgacacgccggcgctcgtcatcggacgcgacgggaccttcaccgccggccccctcgccgcagaccccgctaccgccctgcgcgcagccggcactcggatcccggccgcctcacacatcggcgcccgcacccgcctggcccgggcacacgtcagggcctacgaactcgacgccactgcgcaggaactcgagaccagcgccgccaacgagcgccgactcgccgacgagtgccgccagcaacgcgacgccctgcgcgccgaaggacgaggcttcccgccacgggacgacctgaccaccgccgaggccgaacgctcgcgcaccgcgaacacggcgcacgaacgccacggcaccgcacgaagcctgcgccgacacgccgatgacgccgcagccgagcacacccgcctgcgcaccgcctgggagacccgcgcccgaagcctgggcctgcccaccgaacccgagggcgtggcccagctgatcgacacaagccaggcagtcgcccagcagctgaacagctgcacaacccagctgaccacccggctgctgccccggctcgagcgcatcgtgcacaccctgcccgacgaagccgccctcaccgagcgcctcgccgaactccagcacaccgcccaggacatgcacatcaccgtgctcgagacccaggcagaactcaccgaagcccagtcccacggagacgccgacgacgcagcacgccgctatgagcaggccaccgcacaggccaaggatctccaccagcagtccaaacacgccgcagaacaagcagtcatcgccgaaaaacgcctcagcacgtgcgaaagcgacctcatcgccgcccaagaacgcctcgacgaatccctgcccctgcagaagaccacccggtcatacctgaccgcactgctcgcctggccgccccttgcccaggccctcggcgccgacgccagcctcacctcccaggacaccgacaccgcagaactcctcaccgctgtagaggagttgctagcccgccgccccactgcctccaagaagaccctcggcgagcgctacgacgccgtccgtgccgaactcgcccagacctggaccatcgcccgcgacgacccgcccgccggcatcgaacagctcgacacctttgtcctcacgcacgcggaaacccactacgaccccttcaccgccgcccagcgcgcccaggccctcgccgtccgcgccaaagccgcactcgacgcagcggaagcggcagcactacgcgacttcgtcatcggccgcctgccctccgccatcggcaccgcatgggccgccctgaccggctggaagaagaccgtcaaccgcaaaatgcgggcggcccaggcatcctccggcgtcggcgtccaagtccagatcgacctgcgcagcgacctcgacgccgccacccgcaccgtgtacgagctgtcctgcaagatcagcgacgccgtacgcaccgacacacagaaagaagaagtcggccaggccctgcagtccctgctggccgccgccgacggctccaccatgcaagaacgcctcgccgccgccgtcgacatccgcaactgggtcgatgtccgctacctcgtcgaacgccccggccccggcggaacccccgtcaccggccagtggggctcgcgcaccggcctgtccggcggcgaacggcgcctggtcgtcctggcccccatgctcgccgccatcgccgccagctacgaccgcttcaccagcaccggcctgcgcctggtcccgctcgacgaagttcccgcggaagtcgacgagcgcggccgcgaaggactggcccgctacctcgccgaactcgacctggacatcctgtgcacgtcctacctgtgggacggcgcacccggagcctgggacggcatcgacgcccacgacctcgaagcaggcgccgacggcaccgtcgtcgccttccccatgctcatccgcgcaggccaggccctgcccggagacacgggttccgcaccccaggccgggggagtggcatga

SEQ ID NO: 51510 - DNA, 585 bp, Streptomyces silvensis
gtggactgcgacgatctgctcggtgggctcatcatcaccggcgtcacgccccgggggtggcggatcccgcccggtgcgacattcaccctgccgccccgcgagctggcccatatcgactgggagcctcccgagaccaccggcacgtgggtcttcgttaccgagaacccctccgtgctggccgcagccagcacggaggccttggcccgggacaacctcgtgagaccacgggtgatctgcaccgccggcacaccatcccaacgggaatgcgaagccattggtgctctggcggacaccggatggaacatcgccgtccgcgctgacttcgaccaggccggcctggcacacatgcgtgccctcctggctgcagcaccttccgcggttgcgtggcggatgggcgcagccgactacctcgcggccgtccccgagggcactgacgtcctgcatttgcagggctcggatgccccctgggacgaccacctggtacccgtgatgcgcaaacactccgtgccggtctacgaggaggatctgcttcccgccttgctggccgacatcacggccggtgcaccgggctcttgtgttccatga

SEQ ID NO: 51511 - DNA, 1569 bp, Streptomyces acidiscabies
gtgcacatcaggaacaatggccggacgatgacgtcgacgccctccgaacccacccgagccgagtacgcccccttcgcccatctcagcgcgcccaacgcggccctctaccgccgggtgatgcgcgtgttcctcacggccaaggagcgcttcgcggtgcacctgcggcccgaggacgtgcacgcggcgctggagccggaacaccgccccgccgaccaggacaccgtggccaaggccctcgacagcctcgtcggctggggcaatctgcgggcggacccggacacgtcccgggtgacggcggtcgaggacttctaccgcaagcgcttcatctaccagctcacccgggccggcgaggccaccgagcaggcgctgtccgtgtacgacgaggcgctgggacggcgcggcgcgctccaggcggtggccctgcacgacatcgtcacgcagctgcgggccctgctggtgctcaccggtgatccggacgcggccaaggcgcacctggcgctgtccgcgctgaccgcccggttcgaggcgctggcggagaacgcgcgggcgttcatgggttccctccagcgcacgatcgacctgcacgaggtggatgtcgaggtcttcctcgcctacaaggaccggctgatccagtacctggaacgcttcatccaggacctgatcaccctgggcggccggatcgccctgctcatcggcgagttggaggagcggggccgggtggacgcgctgctgcgcctggcggcggcgcgggaggcggccgacgccgctccggacgaggccgtcgatgccgaggcgcgggcgtacgggcggtgggcggcgaagtggtcggggctggccgcctggttcgtgtcggcggacggccgtgagtcgcaggcgaggctgctgcggggccgtgccctcggggcgatcccgcaactcctggcggtggtccggcagttgaacgagcggcgggccgggcgctcggaccgctcggcggacttccgcgcgctggcccgctggttcgccgaggcccccgacgacgcggcacgccaccgcctgtggcgagccgcgttcggcctgtacccggcacgccacctcaccgtcgacgccaccgccctcgaccggcgcacggcccgcccggtgcccgcgtccaccccgtgggccgaggccgaaccgctgcgcatcagcccgcagttgcgccgcacgggcagctacgagcggcgcggcaaggcccgccgggtgcaggaccgctccgagcagcggcgccgcctggccgagatcgccgcgaagcagacgcaggagatcgcggcggcccgcgcccgcctcgcgacgaacggcgtcacccggctgtccgcgctcggcgaactggacccactctccttccgcctcttcctccagttgctgggtgacgccctcgccacctggcggcccggcatgacgacgaccgtggcgaccagcaacgacggcacgatggagatccggctcaccgccctgtccgacgggacgacggccgagatacgcacgcccggcggtgtcttccgcggccctgaccacaccgtcgagatcatcactggagaagggcggccatga

SEQ ID NO: 51512 - DNA, 1215 bp, Streptomyces acidiscabies
atgaccacaccgttgggcgaggtactggagaaccggcgcaccgccgagttccacaaggccgcccgcgccctgctcaaggagccgctgctgctcgcgcacggcccgcacgccgacgagttccggctggtgcgccgacacgccgccgacctgcgcgactggttcgaccgcaacaccggctggccgctgcgggtggacgcggaggcggcccggctgagccgcacgcccggcaccctggccgacccgacgcatccggcgcgcgaggcgtcccgtgcccgcgtccccttcacccggcgccgctatgtgctgttgtgcctggcgctggccgcgctggagcggggcgaggcgcagatcgcgctggggcggctcgccgaacaggtggtcctggacgccgccgatcctcatctggccgcggccggtatcgcgttcacgctggagcgccgcgacgaacgcctcgacctggcggcggtggtccggctcctcatgcactacggggtactgcggcgggtggccggggacgaggacgcctacgtcagcggggcgggcgacgtgctctacgacgtccagcgccgcgtcctggccggtctgctcgccgcccgccgcggcccgtccctgatcggcgccgacggtttcgaggaccggctggccgaactgaccgccgagagcgccctggacagcgacgaactgcgcttccgcgccgtccgccagcgcctgaccaggcgtctgctggacgacccggtgctgtactacgccggcctcaccgacgaggagctcgcctacctgacccgtcagcgggccttcatcgccgcccggatcaccgaactgaccggcctggtcgccgaggtgcgggccgaggggatcgccatggtcgacccgttggacgacctgaccgacgtccggatgcccgagcagggcacccacggccatgtcaccctgctgctcgccgagcacctggcggcctcgaacagcgcggtgagccgcgccgagctggagcgccgggtgcgggaactggccgtcgaacacggcgggttctggtccaagagtgcccggcagccgggcgcggagggcgagttggtggagctggcgctggccaagctgaccgcgctcggcctcgtcgccctcgtccccgggggtgtctccccgctgccggcgctggcccggtacgcggtcggtgagaccgtcgtcaaggaatccccacgaaaggcgcagcgatcgtga

SEQ ID NO: 51513 - DNA, 4089 bp, Streptomyces acidiscabies
gtgaccgccctgccctcccccgcacccggccggtggcggccgttgcgcatcggccttgtggacctcttctactacgacaccgaggagttctggttccgcgacgggcggctgctgttgcggggcaacaacggcaccggcaagtcgaaggtcctggcgctgaccctgccgttcctgctggacggcgatctgtccgcgcggcgcgtggagcccgacgcggacccgggcaagcgcatggaatggaacctgctgctgggcgggcagcatccgcaccccgagcggctcggctacacctggatcgagttcggccgccgcgacgagaccgacgggcgggagcacttcctcaccctcgcctgcggcctcaaggcggtggaggggcgtggcatagcccgccactggtacgccgtcaccgaccagcggatcggcgcggacctcagcctgctcgacgcgaccggcaccgcgttgtcgcgcgaccggctcgcggaggcgctcgccggacacggcatggtgtacgacacggccacggcgtaccgcagggcggtggacgaggccctcttcgggctgggtgagcgccggtacgcggctctggtggacctgttggtgcagttgcgccagccgcagttgtcgaagcggcccaacgaggcggcgctgtcgcgtgccctgaccgaggcgctgccgccgatggaccaggcggtgatcgccgacgtcgccgaggcgttccgttccctggacgaggagaaggaggagctgcgggcggccggtgaggccgagcgggcggcctccgccttcctggaccactaccgccgttacgcccgggtcgccgcccgccgccgtgcccggctgccccgccacgagcacgcccgctacgagcagttgggccgcgatctcgcccaggcccagaccgacagggcggcggccgaggaggagcgggagctgatcgccgggcggatcgcggacctggaggagagcgccacccgcctcaaggcgcaggacgccgcgctgcgcgagggccccgagatgcgcagtgcccgggagctggagcaggcggcggccggagcccgccgtacggccggtgagctgcgccgtgccgaggcggaccgggagcaggcggcccaggtgcacacgcgagcgctgggccgctccgagacggccggaaggcgcctgacggcggccgaacagcaggtggcggacacgctgggccgtgcgcgggaggcggcctcggccgcccgcctcgacggcgaggtgcgcaccgagggggcgcaggagcccgaactgcggcgcgcggccgaggagtcggtggcgcgcaggcggcgcaccctcgaccacgtggaggagttggcggcgcgtgccgaggaggccgcagccgagcggcgcgccgccgcccgccgtctggacgaggcgcagagcgaggcggggcacaccgcgcggcggcaggccgaggcggagtcggccgctgccgaggcgggccgggagctggtcgtctcggtccgcgaacacctcgatgtctgcgaggagttggtgcccgctgacccggcgggcctgctggactcgctccaggactgggtcacgcacctgcgcggcccctcccccgcacgcgtgcacaccgccgacgcccatcgcgcgcgggccgcgcacctggccgatgcggcggcctcgctcgggcagcggctggccgtcctggaggcccggcgcgccgaggccgagcgtgagctgggcgacctggaggcgggcggccagcgtggccccgcggcgcctcacacccgtacccccggtgtgcgcgaccgggctccgggcgctccgttgtggcgtcttgtcgacttccgtgaccaggtcggtgccggtgaacgcgcgggcttggaggcggcgttggaggcgtccgggctgctggacgcctgggtgtgcccggacggcaccgccctgcgcggggacgggcacgacgtgctggtgtcgccgggtgacccgcttcccgggagcacgctcgccgaggtgctgcgtccggcggtggaccacggtgacgcgcgggcgtcggaggtcggtgagcggacggtggcccgtcttctggctgccgtgggcctcggctccgacagctccggcgacacctgggtcgcggcggacggccgtttccgcgtcggcgcgctgcggggcagttggtcgaaggagagtgccgcgtacgtcggtgagggcgcccgcgaggaggcgcgccggtcccggatcgccgtcctgcgcgaggaactcggcgttgtcgcgggccggttggaggcggtggaggccgagcgggccgaggtggcccgcagtcgccggaccctggacgccgagctggccgccgtccccgacgacgccgccctgcggcacgcgcacgcgctggccggtgccgccgtggacgccgcccaccgggcacgcgcccgccaggacgaacgcgccggggaactggccgaagcggccggcgtggaggccgaagccactgccgaactcaccgacacggccgccgccgtgaatctgccggccgaccggccgggactgacggctgtgcgccgggcactggccgactacaccgccgtcctcgccgctctgtggcccgccctgcgcgagcgggccgacgccggacgcgccgtcgccgaggagcgcgcggaggccgagagcgcgggtacccgggtggccgaactggcgctgcgtgccgaggagtcggcccgcctcgcgaccgccgccgacgaacggcacaccacgttgcgggccacggtcggcaccgccgtcgccgaactcgaacggctcctggccgccaccgcggaggcgctggcagggtgcgagcgcgaccagcgccgctcccgcgaggaacacgccgcggccggccgccgcgtcggccacgccgagggccgtatcgagcagttggccaaggacgtacgggaggccgccgccgcccgcgcggaggccgtcgccgcgctccagcggttcgcgggcaccggtctgctggccgtcgccctgcccgaggcggccgtgcccgcgtcggacggcgggccgtgggcggcgaccccggcgatcgcgctcgcccgcgccgtcgaggcggacctctcgtccaccgacgactccgacggggcctgggagcgggtgcagaagcggctgagcgaggagtacaagaagctccaggacgccctctcgcgcggcggccacaccgcgaccgcgaccatggtggaggacggcatggtcgtcgacatcgtctaccagggccgcaggcggacggtccccgagctggccggggccctcgccacggaggtggccgagctggcgcgcatcctgtccgctcacgaacgcgagatcctcgagacgcatctgctgaccgaggtcgcggggaccttgcaggagctgatccaggcggccgagcggcaggtgggggcgatgaacgccgagctgaaggagcggcccacgtccaccggcatgcggctgcggctggtgtggcgtccttcgcgcaaggcgccggccggtcttgagcaggcccgggggcggctgcggcagtcggcggacgcgtgggcgcccgaggagcgggcggcggtcggggagttcctccaggccgagatcgcccgccggcagagcgacgacgcggcgggcggctggctggaggtgctcaccgcggcgctcgactaccgcgcctggcacgagttcggtgtcgaacgtgaccagcacggcagctgggtcccggccaccgggcccgcctccggcggcgagcgcgtcctcgccatgtccgtaccgctgttcgccgccgcctcctcccactacgccaccgccgcccccgacgccccgcgcctggtcaccctggacgaggcgttcgcgggggtggacgacgactcgcgcgccaagtgcctggggctgctgcacgccttcgacctggacgtggtgatgacgtccgagcgcgaatgggcctgttatccgcaggtccccgggatcgccatcgcccagctctcccgtgtcgacgagatcgccgcggtcctggtgacccgctgggagtgggacggcagcgagcggctgcgcggcacggaaccggagcaccggctcacggccggtgaggagtccgatgccgaccaggaggcgctgtgggcgtga

SEQ ID NO: 51514 - DNA, 1245 bp, Streptomyces acidiscabies
gtgggcgtgagcgcttgcgacggctccggcccgcacgtcgaccgcgaccggctcgaccgcctgctgggcgaccccggcctcggctggctggtcgagcgcgtacgccgccgtctggagcgggacgaacctctcaccggcccggtcaccctggccgctcccagcgccgccgagcgggccgccgccgagcgcctgctgggccgtgccccgcgcaccggaggctcgctgaccgtgcgcctcgacgcggtggacgccgtcctgcgccgctccggcatcagccccgggggactcacccctgcggtgaccgcgctcaccggacccgtcccgcgtctcgccgacgtccgcgcgcaggaggcgagcgcctggcgggacgcgtacgccccactcgccgcgctcccgcccgaactcgccgactgggcggaccggttgcgcggcgacggcctcgtacgccgtctcgcccgcaccccgcccacggcgaagagcctcctcgccgacgccgcgacagccctgcgggcgctgcccgccgaccccgccatgtccctggcggccttcgccgcgggcacgctcggtgacgcccacgccctcgacgacgggaccccgctcgccacgctcgtcctgtccggcgtccgtgccctgaccggcttcccggacggcgccggagccgagtggcgccgcgaggcgtgggcgtcggccggtctgctgcgggacgccctctcctcgaccgtcctcaccgtgggcctgcgcagcacgcccgccctcgactggatgaccgacgcgggcgaaccggccgtcctgaccctgcgccagctcacccgcaccccgccgaggacggcacccgcggtcgtccacgtctgcgagaacccggccgtcctcgccaccgccgccgacacccacggcccggcgtgcccgcccctggtctgcctccagggccagccctcggccgccgccctcgccctgctgcgccacctccacacccgaggatcccggctgcgctaccacggcgacttcgactggggcggcctgcgcatcgccggcgcgctgctgagccacgtcccctggagcccctggcgctacaccgccgccgcctaccgcgccgcagccgtcgccgctcccctggccccacccctgaccggcacccccacgaccgctccctgggaccctgagctggccccggccctcgccgaactcggcctgcgcgtcgaggaggagaccgtcctggacgtcctgctggccgacctcgcgccctga

SEQ ID NO: 51515 - DNA, 1839 bp, Streptomyces scabiei
gtgcgcagggttccacccgagatgttccggttcacgacgggggagacacccgacctggacggagcggtcctggacgccttcggcgcggccgccgagcatctggagacggaggtcgggcccgacgcggtccgtgcgtggctgcgccgggcgggccgggcgacggcggtcgaggacgccgaactgcacgagacgctggggagactcgtgcggtgggaactgctggacgtgctgcacgaccaccacgcggagcaccaccccgcggcggtggagcacgagcggcacccccgcacgcccgaggactacggggggcaccaccgcacggccgtggactacgagccgcacccccgcacggccgaggagcacgagccgcccaccccgcggtactcgctgacccgccggggcgaggccgccctcgcgggagtccggcgcacgctggaggttctcggctccacgggggcgccgcggacggccgtgccggacgcgatcgccgaccggctcgacgagctgtgcctgctgtccggcgaacccgcctcggccgaccgccggatcttcaccgccctgcgtgagctggagggccacatggagaccctggtggagaacaccacggcgttcaacggcgaactgcagcggctgctgcgcgccgagagcgccgacccggaggcgttccgcgaggtcgaggccgccaccgtcgcgcacctccaggagttcctggccgacctagaccggcgcggacggacggtcgccgccgccgtggcccgggtcgaggaacggggaagcgcgggcctgcgcgagcgggcgctgcgcggggccgaactaccgccgtcggccggcccggaccgtgcggcggcctggctggagaaccgccgcgcccgctgggccgtgctgcggtcgtggttccggccggaggacgggacgcggccccggatcgagcggctgcacgacatcgcccgccgggccgtcgtctcgctcctggaggccctggagcggatcgacgcctcgcgccgcccctcctccggcgccgcgcaggacttccgggaactggcgcgctggttcgccgcggccccggcggaggaggacctgcaccggctgtggtcggcggccttcgggctgggcccggcacggcacgcacacctcgcccaccccgacccggaactgatcccctcgtcccgctcctgggccgagaccccgcccgtggaggtgtcggcgctgctgcggagcagcggacgcacggagcgcttcacccggacggcccgggtgcgcgacgtcacggcggtcagggcggagcgtgccgagcgggcccgcgcggaacgggccgaactcgccctggcctgccggatgctgcagacccgcggtccggtgcggctgtccgccttcggcgagctggaacccgcggtcttcgaccgcctgctggatctgctcggccgcgccctgtccacccggccggactcggccggcctgcggcgcgccaccacgggcgacggccgggtggagatcgtcctggccccgccttccgacgcccgcaccgccctgctgcgcacggcgaggggcacgctggccggaccggactacgtcgtccgcatcatggaggccggaggggcggccacacccccggccacacccccggccccgcggccggcggagtcggcacccgcccggcagccatgggcacagccctcggtgcggaccgggcagcccgccggaccgccgcagcgaggcacccaccccggacacctcgtggcccccgccgcccggccgcccctgccaccgtcctccgacgtgtcggcggccgccttcccggccggccactcgtccgccctgcgccgggagacggcccgatga

SEQ ID NO: 51516 - DNA, 1299 bp, Streptomyces scabiei
atgagcagcctcgccaaccacctggccgccaccgagcgggaggaggtctcccgcgccgtccgtctcctgctcgcccgccccctgctcaccgagacctccgacccggccggcttcgccctcgtacgccgccgccgcgagccggtggcccgctggttcgaccacacctgcggctggaccctgctggtggaaccccgccgcggctacgcacgcctcgccaaggtccgcgccgacccggacggctcccgcccggcccgcgccgcgcgagcgggccgggcccccttcgaccgccgccgctatgtgctgctgtgcgtgaccgcggccgaactgctggcggcaccgacgacgaccgtcggcatgctcgccgaccgtgtcgtccgggccacggccgccgacccggccctgcccgcgttcgacccggcccgccgcgcggaacggacggccttcgtggacgtgctgggactgctggagtcgtacgacgtgctgcacgcggtggacgggtcgaccgaggcgtatgccgcgtccccgcacgccacggtcctctaccgcgtggacaccacgctgctgacgcgcctgcccgcggcgccggtcggcgccgcccgcctcgccgtacccccggacgggatgcccgcccgcttcggcgacctcctcaccggaccggtgcgcgaacgcagccacgggggcccggacaccggcgacggcacggccgacgacgagcacgccgccacggacgcccggcacggtcggcggctgcggcactccgtgctgcgccgcctcttcgacgaccctgtcctgtaccggtcggacctcaccgacgaggaactggcctacgtcacctcgccggccggacgcctgaccctgcgccgctcggccgaacaggccggcttcctgctggaggaccgcgccgagggcttcctgctcgtcgacccggacgcgctggccaccgacgtccgcttccccgacgacacctccaccgcccgggtcgccgccctgctcctcctggaacgcctgtgcgccgagcccgccggactcctccccgagcagctcgccgaggccggcaccgacctgctgcgccgcttcccccgctgggccaggacctaccggcccgaggaggacggcggcgcccgcctgtccgacgacgccgtggacgtgctgtgcgacatgggcctggcccgccgcgccgccggccgtgccctcgcccgcccggccgcacaccgctaccgcctgacggggacgacgtgtccggccccgggcaccccggaaaccgagaagtcggcgaagacagaggaagacgagcggtga

SEQ ID NO: 51517 - DNA, 3423 bp, Streptomyces scabiei
gtgagcctgacagagcttcccctgccccggcggcccgaggccaccgaccccgcgcgcccggcggcgcgcgcggcggacggacccggcggccgctggcagccgcaccgcgcgggcatcctcaacgtctggcgctactacgacgagacgttcaccttccaccggggccgcctgctgctgcgcggccagaacggctcgggcaagtccaaggccctcgaactgctgctgcccttcctcttcgacgccagcctccgccccaaccgcctctccacgttcggcggttcggaacgcaccatgcactggaacctgctgggcgagggcgccaccggcaagacccgcgtcgggtacgtctggatggagttccgccgcgtcgacgacgacggcaccgagcgcttcttcggctgcggggcccggctgcaggcgagcgtgcacaccaccggggtgcacgccgactacttcaccaccggcgcccggatcgcccgtcccgacggcgtgctcctcgtcaacgaggcgggacagccgctgacccgcgccgccctcgccgaagccctcggcgacaggggcgaggtgcacacctcggccaccggccaccgcaccgccgtacgccgtgcgctcttcgccgggatgggcgagcagcgctacgagtcactgctgtccgccctgctccagctacgtcagcccaagctctccgaacgcctcgacccgtcgctgctctccaccctgctgtcccgcgccctgccacccctgggcgagggcgagatcgccgaactcgccgcgggcttcgaacagctggaccgtcagcgcgaacacctccgccggctcgacgacgaggtggcggcggccgagaccctcgcccaggagcagcgggcgtacgcgcgacgggtcctgcgtgccggagcggccgcgctgatcgagaccaccgccgagacggacgccctcacccgcgccgcccggaagagcgccgaggagttcgcgcaggccctcgcccagcgcgagtcggcccgggccctgcgcgaggaacaggaacggcgggcccgcgccctggaggagaccgtcgagggcctgcggcagagcgaggcgtacgggcggggcgaggaactggaccgcctccgccgccgcaccgaggacgcggcggccgccgccgcccgccggcgcgccctcgcccgggccgctcgggcggcggcggagcaggaccgcgggctcgccgacgggacggcgggccgggcccgcatcctcgacgagcacgcgagcgacgccgccgaggaagcacgcggatcggcccggccggccgggctggagtccgtccacgacgaggccgacaccctcctcggcaccggcgccccgcggcggaccgcggacgacccgccgggcgagagcggggcccggcaggcccgcctgctgctgcgccgcgcggtcaccgcccggcggcagcagctcaccgccgtcaccggggcgatggacgaccacgaccgcgcggtacgcgaccggggcgccgccgaggatctgctggacgaggcccgggcccggttcgcggaggcgaccgcccggcgggacgaggccgccggagcctgggacaccgccctggccgcccagggtgaacggctgctcgcctgggccgcgaactgtacggaactgcgtatcaccgaccccggagaactcgcggcgagagcggcggccgagtccgaggtgacggccctggtcgaagcggccgcccgcccgtcggaacgggagatcgccaccgcggaggccaccgtacgagccgcccgtcccggcctgtgggacgagcggggcaggctcgtggaggaggtgcagcgcctcggcgacgagtccgatctgccgccaccggccccggcgacccgcaccaccgtccgctcggccaccgcgggagcacccctgtggcggctgatcgccttccgcgaaggcgtcccgatgcccgtccaggccgccgtggaagccgcgctggaggcatccggcctcctggacgcctgggtcggtccctacggcgggatcacgctgcccgggcacgacacccgcgccgagtccgccctggccgtcgccgccccggggcacagcctgctggcggtgctgcggcccgaggagggcatcccggtccccgtcgacaccgtgaaccggatcctcgccggtgtcgcgttcggagcgggcctgcccgacggccacgcggcggccgtgtccgcccagggcgcctggcgtctcgccctggccaccggttcctggagcaagcaggaaccggtctacatcggtgccgccgcccggcagcgggcccgccagcgcgcgatcgccgcactcaccgacggcatcacccgcaccagcgcctccctcgcagcgctcgacgaccgctcgcgcgacctcgccgcacgccgggcgcggctggacgccgacctcgccgcccgccccgaccaccgggaactcgacgcgccgcgccgcgaacgggaccgggccgaggaggcggtggccgcccacgacgacgccgtacgccacgccgccggccggctggcgcggtgcgaggacgaggtggcgggcgccctgcgcgagctctcccgccgggccgcggagcacgcgctgcccgccgaccgcggccggctgcgggcgctcgacgccggtctcgaccggttccgggacaccgccgacggctgggtggacgcccgcctcgccgcgcacggcgcggccgacgcggcccggcaggcggccgcacgcgcggaaaggtcggggcaggcggccgacgaacaggagggggacgctacggcagccgaggcggaggcggaggctctgcgggcgcgcctggaggcggcggaggccgggaccggcgcgcaccaccggcagatcgtcgcgcggctcgccgaggcgcgcgaagaactgcgccgctgccgggaggcggtcgcccgggcggccgatctccagctccggctggagggccgcgccggcgggctgcgggccgtcagcggacaggacgccgcacgacacgaacaggccgtcctggcccgggaccgcgccgcgcaccggctccggcatctgtgcctggccgggctggccgaggacgcgggcatcgcactcggaccggacgccggtgtcgcaccgggaccggagggtggtgtcgcaccgggaccggacgccggggacgaccccggggacatgctggaggcggcccgtgccatcgcggcgaagtggcccgcgctcccgtacgccccacgccacctgggcgaggccgcgacccgcctctcggaagcggtccacgaggcgcgccggcacctgggtgcccgcgccgacctggacctggcggccgacgacgacgtcctgatcttcagtgccggcctggacggcgtacgcgtgggagcgacgggactgctcggcgcgctcgcccggcagcgcgacagcagccgcgacgacctcaccggcggcgagcggtag

SEQ ID NO: 51518 - DNA, 1635 bp, Streptomyces scabiei
atgggggcatcagtatccggttcaggtcaggacgccgacgaggagacgcggcggcggctgaacgcgtacacgtacctcagcgcgcccgagcggctggagcacgtcgcgatcatgcgggtgttctgcggaacgctgctggcggatcttgccgtcccggacatcatcgcgaaactgcgccaggctggtggttccgccgcaggactcgacgccgacaccctcacagtccgactggaacagctggtccagtggggaaacctgctccgcagcagccacacggtgaacgcgtccagcatcagcgagtaccagcgttcccgctcgcgctaccagctgtcgaaactgggcgaacgtatccagcgggacgccgatggggtcctgaccgaggccgacgccgcccgcgaggtgagcaacgaactgctggccctggtcgagcgcgggctgcgggagctggccggcctcgtgaccgctccgggcggcatcgagccgcaggacggactggagcggatcagcacgctgttcgtgcagttcaccgagttcgcggactccatacgcgacttctacgcctatctcggccaggtgctgtcccgctacgacctggacagcgccgagtaccagggcttcaaggagctgctcctggactacgtcgaggcgatcacggaggacgtggcgttccgcgcgccccggatctcggctgcgctggacaccctgtggccacacatcccggctctgctggatcggctggacgcccacgcccaggggctcaccgggctctcgacgcaggcgcaggcgcagggcgaaagccgaccggacgtccggatccagcgcagccggggccgcgaattcgcggactgggagggcctgcgcggctggttcagcaacaccgacggccagggcagccaggtcgaccagctacgcgatgccactctgcgcgcgctgcagtcgctgctcgccaacgccaagcgaatgctgcggtcggccaccggggagatgtcccggcgcaaggatctgctgcggctggcccggtggttcgaggaagcggcgccgcgggacgcgcacgacatagccgtcgccgccttcgggctgtacggcgcccgccatctgggcatacctccggccaccgacgaggtggtgcccgcctacacaagctggtggaccggtccggtggtcgaggtaccggtggccctgcgggaaagaggcagccgcgcccagcgaggccgggcctccgcggtggaggaccactccgcgcagaagcagctgctgagggaggccgcacggcagcgggcagcggccagagcagcggcggcggacgaactgcgcagcgcgtccggccggttcgccgaggtacgcctcacgtcagcggcgctcggcctgctcttggagctactggccacagcgctcggaaacgcacagctcagcaggcccgtcagcacggacggggagagggcggcggggttcgacctcgactctgccagcagtgaagacgccgaactacgtatccgcctcaccgtgcgccggacggagggcacgcgaacggtgctgtactcggccgacggcgacctgctgctggacgacctggagctggacatcggtcgcacctccgccgcggtcggcggcgaagcggaggcgagcgtgtcatga

SEQ ID NO: 51519 - DNA, 1326 bp, Streptomyces scabiei
atgaccctcccctcggctcacgacgtagccctggcagccgagcgccgcaccgccgcccggctgctgctcgcccacccgctgatcgcatcggacggcccccacgccgacctcttcccgctgatccgcaggcacgccgactggctgggcaaacggttccagcaggtgctcggctaccgcctgctggtcgacagctcctatgcccgcctgttcaaggcggggctggggacggattcgggtcatcggctggagcgctccaccggcaccccgttcaccccacacacgtacgcctgcctcgccctcgccctgtccgtgctggtgaccgcgcccgagcagatgctcctgtcacacctggtcgccgatatcagggctgccgcagccgacgccggaatcgagctggaggaaacgggccgagcggccgggaagcggaccctggtcgcggctctgcgccagctcgtcgactgggacgtgctcatcgagaccgagggccatgtggccgcacttgcgcaggaggcaggcggagaagccctgatcacgatagaccgggagctggcacgcgtgatcgtcgccggcccactctcccaggcacggaacggcgccgacctggtccggcgggcagcggacccgggcttcggcggaccacgcacctacgtgcgccggatgctcgtcgagacacccgtcgtccacctcgacgagctgacggacgccgagcgtgactggctgcgcacccggcagcgccgggaggcccaggcattctccgaactccttggtctggagatggagatccgtgccgagggcgtggcactggtggaccccgaggaagaactcacggatctgcacctgccgggcacggggaccgtcgcacaggccgcgctgctgctggcggaacggctcgtggaacgccttcggccgcaggaaccggggcatccggcgaccggcgggacactcatcatcggggtggccgtcccggacggcctggtggacgaggtgctcgccgagctcatcaccgagtacgggcagcgcagcaactggcaacgcggctacctggaagaccttccctccctgcgagaggccgtactggacctgctggtccgcatgcggctgatggcccgcgcgggccggctgcgcgccgagggcgaaggactgccggaggggtacgtcgaagaggcatcggaaggacgcacggtgaccgatgtccatggcgcacggcccggcggcgactgctgggtgctgctggcagcagcggcccgctacgccacccaagtcacggtgcgcccagccaccgcagccggcaaaggcacggacgttcaagaggagtttccgctatga

SEQ ID NO: 51520 - DNA, 1281 bp, Streptomyces scabiei
atgagcgggctgcccgccgcgacgcgcgactggctgacgggacctggactcacccggctctggcagggggcacgcaaacgcctggagagcaacggcgtacaggccgcaggttcgctccgactgaccgcgatgaacgcccaggaacgcaacgacctgtctctcctgctgggcaaacccctcacaggtgccgccgtgaccatacggctcgacgtgctcgacgcacggctacgcgcctcggccgccggactcggcctcagacagaccctggaggaactcggcccgccactcaccgaccgccgcgccgcccgcgcggacgtggcggcacggcgggaacaggtgtggtcgtctcttgcttcgtcactggacgcctccccactcgccgaccaggaatggccccggcagtggtacgacctgctgcgccgttccggtgtcccgagaggagtgacgcccgaagcggcgatatggacactccagcaggcggtccaagtcctcaccgctctcctcggacccgacggacctgaacgcaacggcacatgcggtcgaggagaactcgccgccatgacgaccggctccgcgcacggcctggacgacggcacctggctcgcacgcctcgtccaacgcggggtcgccctcgcccacggcaccgagttccccgacgacgcggccggtcgacgcgctctgtggcggctggtgtccgtcacaccggacgaggtctccagcacggtgctgacgtacggactgcgccccgacggcgagggctggcgggagcgtgctctgcgggagcgagccgaccatcacgccgaagtgcacgtcacaccacgcgacctgcatggcctccggctgcagctccccgccggaacgctcatccacatctgtgagaacccgcgcgtggtggaagcctcggcggacgcggcctgcgtccagcccttggtgtgcacctccggcagcgcggccaccgtggtcttcactcttctcgacgccctcgccgccacgggttgccgcttcgcgtaccacggcgacttcgactggccggggatcgctctggccaatcgggtcatccgccgctacgaagcccagccgtggcgcatgggcactgcggattacgagcacctggccgctcgcagccaggctgagggcatccctcaactggcgctcgacggccagccggtcaacgcggactgggacccggatctcgcccctgccatgaccgccctcggcgtcgcgctccacgaggaggcgaccctcgaactcctggtggacgacctgtcccgccagacgtag

SEQ ID NO: 51521 - DNA, 1494 bp, Oceanobacillus picturae
atgcagcaaccatttaaaaaagttatagaagctagctatttaacggcagataaggcttggcgataccgggctattctacgttatttttatatacagcatgaacgtatgcgggagtttttatttccagaagaaattttggcatatttgaccgatttccaagaatttaaagactatacggaagatcagcttcacctggatttagatcaactagtcaaatggaataatttgcttgcccgacaagagatgggacgtgcccataccattgaagagtttaaaaagaaacgtttccgctatcaatgtacgccatacaccgttgaatttgaacggatgttaatggaaatggaaaagggcggcaatgtatttgggggctcgttggagaaaaaagagtttgagcgtttgtatcaagctttagctgacatagaatccagaattaatcaaaaagaactttcagatgccagcgaatgttcccagctatggaacgatgtctttacctattttcgctctattacgcaaaatacatcggactatattgcccatataaatagtgaagaagcagaggagcgaatgcaaaccgaggcttttctcgtttttaaagaccaatttactacctatttgcgtgattttattattggcttgcaacaaacagcgtggaagatccagcaactattacagtcaatgggaacatctcatctgcagcctttcctccatcaagtaattcttcatcaacagcaagtgccacgttttgaggacatcgcagcagatgagaaagaattaatgacagaacaagaggaaaaatggcatagcctaaccgcctggttccttggaaacgcacacagagaaagtgagttggacagcctgcaaactcgaacaaatgaacagatacgacggattactagagttgttcaacgtttgggtgaacgtcatcaaaactttcgcagtagaaaaaaggattttttacacttggctaaatggttcgattcattaaatgacattaatcaagcacatgagctatctgccgtgtcctttggtgtattccatacccgccatatgttcagtgaccatgttcccacggatgacatttatacggatacgtgggaagaacagccgatcagccatgagacaaagccacgcatacgtcaatatcgcgaaaagacacgggcaggagcgattcttagtcaaacgcataaaaaagaagcagcaaaagaggattatttgcgagaaaaaatggcggaagaggaaacgctgaatgcctatatgcaagggaatgaaatcaagttgggtgcattgccaattgttgaaaagcatgtgcggaaaatgttactgagttggattggtaaggcaatggccaaaaaggatcatacatttaaaaccgagcatggacgcacggtacaggtcatggtatcgaaacaagaacgcatccaacttcaagctgaagacggtgtgatggaaatgccagcagtaacgtttcgatttatggacgaggtgaaaaattaa

SEQ ID NO: 51522 - DNA, 1176 bp, Oceanobacillus picturae
atggagataactactttcgatgaaaaggcccaaactggattacgcctattatttgaaaagttttggatcttaaggtcaaaagaaccagaagtataccagcaaattagggaacgtgaaaagattataaaaaggtatgttgatgaaaagtttggctttgaccttattgtacatcagcattttataaaattagaaaaaataccggttgagacgaaaagctggatggggatgcaaggatttctggagccacgcgattacgctatgttttgttgtgcattagctttcacggagaatcgtaccgtggatgagcaatttcttttatcggatgtttgtgaggatataaaggatttgtatcctggtgaattcccgttggattggaccaattataaccatcgtaaatcacttgttcgtgtcattaaacaattagaaaaactctcgatccttgcggttgttgaaggagaaattgaacagtttgctcttaatgaagagcaagaagttctttatgaagtgaccgtctatgcgcgttattttatgcggtcgtatcctaaggatttagttcaatataaaagcattgaggaaatacttgagggcgaatgggaaaggcatgaaacagatgttcgacgaaaacgcgtctatcgtaagctgcttttctcaccggctgttcatcgagaaagtgagcaagatccagatttcgcctacattcgaaatttccgaaatcgattgcgggatgatatggaggaacatacccttttccgctttgaacttttcaaaaatgccgcaatgcttgttacagatgaacggaagcaagagcttactttgtttcctgatcaaaaagcaatcatggatgtggcattgcactttagccactacttaagaaataatcagcacgaatacgttccagacacgttagggaatatacacgtaaccaccgttgcttttgaacaaattgtcacacagctccatgcagaatacggaaaaggctggagtaagcagtatcgagaaggcacggtgaaacagaccatgcaggaactagcaacgctgatgggggaatgggaaatgctggaacgagatcctttcacgggcgaatatcttatcaagcccctagctggtcggctttcaggtcactatccgaaaaattttgatgcggaaaagggtgttaccaatgaaaaaacacaataa

SEQ ID NO: 51523 - DNA, 4146 bp, Oceanobacillus picturae
atgaaaaaacacaataaatggaaaatgaatcgagcaggactactaaatttctggtattatgacaacgaaatttttgactttgcagatggaaaattattacttcgagggagtaatggttctggaaaatccgttaccatgcaaagcattttgccggttttacttgatgggaagaaatctcctgatagacttgatccatttggttcaaaagctcgtaaaatggaagactacttattaggtgagaaagacatagtggacagagaagagcgtacgggttatctgtttattgaatataaacgggaagataccaatcagtatataacgacaggaattggactgcaggcacgccgtcataaatcgatgaattcttggtacttcatcatcacagataaccggagaattggcgaggacttcgctttgtatgaaacagagcggcatggcggagaaacacagcaaattcctctctcacgtacccaattggaaaatcgcgtgcaggacggtggccatgttgttcgaacacagggcgaatatatgaaactggtcaataaatatatctttggttttgaagaaatagatgcttacgaggatttaatcaagttgctcatacagttgagaagcccaaaactatctaaagattttaagccgaccgtcatttatgaaatcttggaagcggcccttccccccttaacagatgaagatctccgccatttatcagacaccattgagcatatggaccaaacaaagcagcagattgaacagctggaacgagaacaagacgccctaaacaaattaattaagcggtatgatgcctacaatgagtatgcgattgctgatcgagcccatgaatatgtggaagcgaagaaacgccataccaaggaagaacgcttattaaatgagaaggaagctatcgaagcaaccctaaaggaagaaattaagcgagggcaagaacaaagcgtaaagcttgagcaaacgaaggaagtactggaaaagaaacaggaacgcctgcgccagcataaagtttggaatttggaaaaagaacgcgcaacagagcaagaagcattagaagaagtaaaaaaagagttggaaagaaaaaatcaacagctcaccaacaaaaagaatgatgagttagagacaaaaagccgattaaaagcattggatgatgaactgtataatcaagaacagcagatgggagaaaccttgcgagatcttgaagcagatgctgaggcatcatctttcacaggacattcgctcaatcaacaagatttccatcgcaataaagaaagtgactttgattttaaggtatggacacaggaagcagaaaaccattttcaaaacttggaatccattacggagggtctgcgttattatgagaatcttcgcgagcaaattgtggcattccagaaaaagctttcagatttaacgatggaaagggataaaacgaaacaagcggaacaggactggcttgctttatttgaaaaagataagcaagagaagctggacgaaattcaccgatgggcagcggaccattcctttttgcccattgaagaaaaaacactccaacagagcgccagacaaatggagcagctttatgagcccttatcctttgaaacggttcgaaatccatttgtacaagtaagcaatgattttcaaatggatgtaaatcaggaaatcgctacaaaaaaaagtgatctaagtaccttagaaaaagagaaaacggggaaagaagctgaacttgccgaatggaaggcaaaacgggaccccgagccgccgaaccaacgggaggaaacgagagaagcgagaaaattgctagaagcatcaaaccgcgcatttgttcccttctatgaagcggtggaatttcaagaccatgtaccagaaaatgtacgaaaccaaatcgaagcagtgctgctagatacagggttgttggatgctttgatagcggaagagcagacgaccattacgcatgaccgaattattaaagccgacccgcacatgatggcacacactttacgtgattacctaacaccagatttggctgcagagagacaggtttcttctgagttaatcgatgaggtgctgcgaagtatcctcgttgatgaagaggttgaaggaaagatctccattcaggaaaacggctcctatacgatcggcatagtccatggccatgcagtgcctgtgaaatctgtacgttttatcggaaaaaatgcccgaaaacgttatcgtgaagaacaaataacccgattggaagaggaaattactggacttaacagtaactaccagtcgattgagcaacacgttcatgccttatcagaaaaggtagaagatgcaaaacaggccatgatcgcttttcccgttgatcatgatttacaagttagcttttcaacgattaaagaaaaaaggtttgacttagagcaacttcaaaaatcgcttcaacaagttgatcgcgatatggagataacgacaaaagcgtaccaagaaaagaaacgagagcttgatcgtaaaactcgggaattaaatattacgttttcctttactgcatacaacgaggcgaaatcaattatgcgggattacgaaaaagcgttacgttcgctgataacgacgcatacgacttatgttctgcaacagcaaaaccgcagaggagtaatagaaagagtcgatgagcttatggaagaagtcgacgaattgcaaggcgagttaaatgagcgtacggataaggaaagcaagcttgtaggtaatattgaggaaattgtgaaacaactggaaatgcaaggcgtcgccgatatacgaaaccagatacaggaggtacaagcttccttaaaacagacagaacaggagcttatgcacaatcgaacgacattacctcaaaataaagcgcgacttgagacgctgacggaagagattagtcagcatcaccaaaaactacattttcagcaacagatgattcatgtatgggcagataccattggtcaagagatgaactatggatttatcgatctccccgatgatcttcagaagatggaagaacgggccaagtggatagataagcattttaaacagctattaaaagaaaaagacccagcgtcaattgaaggacaattaacgagcatttattttgaacaacattccaatctaatggaatatcgtttatctgatcagcatgtcccagcagtagaggcaccatggatgcgggagcaagaatggacagatgaacagcgtatgcaaatagaacactggcggcaaaaagcagcaagacgattaattcaattggattatcagggcaaaaagattgatccttactttgttcgagaccgaattgaccaggatcgcttacaacaacagcatctactggatgaccaggatcgtcaattatacgaggaaattctctttgattcagttgggaaaaaactacgcagtcgcattagcaaagcgcaagcatggacagaaaaaatggataagctgatggcagaaagcgactcttcctctgggctgtctttttccatacgctggaaaccaagaacagcagaaacagaggaagaattggatacgaaagagctagtagagctgctgaggagagattcccgcttgttaaaggatgaagacatggatatggtcattgatcatttccgctccaaaattgaacgagctaaagaacttgttgacatcaaaggggaaggaagtacgttgttgcaagtattaaaggatgtcctcgactatcgtaactggttttcctttgtactttcctataagcgggagcgagaaccgaaacgagaattgacaaaccatgctttttacaaattcagtggtggggaaaaagcaatggccatgtatattccgctattcaccgcatgttattcacgatattctgaagcagaccctactgcaccttacattattacattggatgaggcatttgcgggtgtggatgaagataatattagtgtcatgttccggatcgtggaagagcttggatttgattatatgatgaattcccaagtgctatggggagattatgatacgatcagcaacctatccatcaatgaacttgtccgacctaaaaattctgatttcgtgaccgttattcgctatcattgggatggcaaaaaacgatcactgctcgtgaaggatcaagcagagactgtcaagaataggtaa

SEQ ID NO: 51524 - DNA, 1287 bp, Oceanobacillus picturae
gtgatggataagcaaacaaaacaagccgcaaccttttttaagtgcgagcgcctttatgattccttatttaagcaacttagaaaaaaatatgaatccataggccgaattgggggtacgattcccattcggcttttctcctatgaagaattggaagcaattgctgggctatttggaaaatcagtggccactttagaacgaaaagggacggtttcgatagtagaattagcagaagcgctaaatgatacaaggtttagtggggtggatctaaaagctttactggatgcctattttggcgaggaacttgtctccaagaaggagcaaagacttgcgacggcagcacgtcttacatctttattggaacgtttaaggaaaacctatccgatgttaactgattggttcgcatacattcaggcatccacatcagagggacgttggatattgcgccaagcggaaaaaagtcctggacagtttgaacaggaggttgcattattagcacgtgcggttactgcgttgccaacacattctgagcgacttccgatgttcagtcagcgaattacagaggatccacatgcatttgacctccatacggatcttggcaagatgtttttatatgttttggcagtgcgcacaggtgatgaaaagccggttgccataccgaaaagtacagaaacagttaatgaactgctaaaaacggccaatatttatcgggatgaccttttaaattttgtaacatgtgccaaccttttggcagtagatcagtcaggggaacagcatcctgtctggcaggcaactggagcaagtcatactgtgcaaaatgtcccactgcgggagatcgtttcattaagtcggatctacccagcacaaggaaaaaaagtatggatcgtggaaaactctggtgtctgttctacgttgcttgattaccagcgtgacatccccatcatcagtacgaacggacaatttaagttggctgctctcatggtaatggatcttcttatcaaagaaaattgttcccttcactatgcaggggacttggatccagaagggttacaaatggcagaaaggctgttcaatcgctatccagatcacgtgcaattatggcatatggatggaaaagcatataagaaaagtgcaccttccaaagagctgtctcaagaaagattagcgaagctggatacgattgaacacaaaacattacgagaagttgccgatgccatgcgcctgtctggtaaagcgggatatcaggaagcattagttgcacatatgctggtagacatacggagtagttaa

SEQ ID NO: 51525 - DNA, 1629 bp, Streptomyces albus subsp. albus
atgggggcatcagcatccggtgcaggtcaggacaccaacgagggggcgcgacggcgactggacgcgtacacgtacctgagcgcgcccgagcggctggagcacatcgcgatcatgcgggtcttctgcggaacgctgctggcggaccttgccgtcccggacatcatggcgaagctacggcagagcggtggttccgccgcagggctcgacgccgacactctcacggtccggctggaacagctggtgacctggggaaacctgctgcgcagcagccacaccgtgaaggcgtccagcatcagcgagtaccaacgttcccgctcgcgctaccagctgtcgaaactgggcgaacgcatccagcgggatgccgatggggtcctggccgaggccgacgccgcccgcgaggtgagcaacgagttgctggccctggtcgagcgcgggctgcgggagctggccgacctcgtgaccgcgcccggcggcatcgagccgcaggacgggctggagcggatcagcacgctgttcgtgcagttcagcgagttcgcggactccatacgcgacttctacgcctacctcggccaggtgctgtcccgctacgacctggacagtgccgagtaccagggcttcaaagagctgctcctggactacgtggaggcgatcaccgaggacgtggcgttccgcgcgccccggatctcggcggcgctggacaccctgtggccgcacatcccagctctgctggaccggttggacgcccacgcccaggggctcaccgggctgtcagcgcagggcgaaggccgcctggaggtgcgggtccagcgcagccggggccgcgagctcgcggactgggagggcctgcgcggctggttcagggacaccgacggccagggcagccaggtcgaccagctgcgggacgccaccctgcgcgcgttgcagtcactgctcgccaacgccaagcggatgctgcggtcggccagcggggagatgtcccggcgcaaggatctgctgcggctggctcgctggttcgaggaagcggcgccgcaggacgcccacgacatagccgtcgccgccttcggtctgtacggcgcccgccatctgggcatacccccggccaccgacgaggtggtgcccgcctacacgagctggtggaccggtccggtggtcgaagtaccggtggccctgcgcgagaggggcagccgtgcccagcggggccgggcctccgcggcagaggatcactccgcgcagaaggagcgactgcgcgaggccgcccggcagcgggcggcggccagggcagcggcggcggacgaactgcgcagcgcgtcgggccggttcaccgacgtacgactcacctcggcggcgctcgggctgatcctggagctgctggccacggcgctcgggaacgcacagctcaagaggcgcaccggcacaaacggggaggggccggcgggcttcgaactggactcggcgagcagcgaggacgccgaactgggcatccggctcaccgtgcaccgaaccccgggcaaccggacggtgttgtcctcagccgacggcgatctgctgctggacgacttggcgctggacatcggtcgtatctcaatgggagccgacggtgaagcggaggcggaggtaagcgtgccgtga

SEQ ID NO: 51526 - DNA, 1329 bp, Streptomyces albus subsp. albus
gtgacccttccctcgactcacgacgtggccctggccgctgaacgccgtgccgccgcaaggctgttgctcgcccaccccctggtcgcatcggacggccctcaggccgacctcttcccactgattcgcaggcacgccgactggctaggcaaacggttccagcaggtgctcggctaccgtctgctggtcgacagctccttcgctcggctgttcaaggcggggctggggaccggatcgggacaccggctggagcgctccaccggcacgcccttcactccgcacacctacgcctgcctcgcgctggccctgtccgtgctggtgaccgcacccgagcagatgttgctgtcgcacctggtcgccgacatcagggccgctgccgccgacgcggggatcgagctggaggagacaggccgggcggccgggaagcggacgctggtagcggctctgcgccagctcgtcgagtggggtgtcctcatcgaaaccgagggccaggtgaccgcgatcgcgcagcaggcgggcggggaagccctgatcacagtggaccgggagctggcacgcatggtcgtcgccggcccgctcgcacaggcccgggacggcgccgacctggtccgacgggcagcggacccgggattcagcgggccacgcacctacgtgcgccggatgctcgtcgagacacctgtcgtccacctcgacgagctgaccgacgccgagcgcgactggctgcgcacccggcagcgccgggaggcccaggctttctcggaactcctgggtctggagatggagatccgcgccgagggcgtcgcgctggtggaccccgaggaggagctgactgatctacacctcccgggcaccgggaccgtcgcacaggccgcgttgctgctggtggaacggctcgtggagcggcttcggccgcaggaaccggggcatccggcgaccggcgggacgctcgtcatcggggtggctgtcccggacggcctggtggacgaggtgctcgccgaactcatcgtcgagtacggacagcgcagcaactggcagcgcggctacctggatgaccttcccgccatgagggagaccgtgctggacctgttggtccgtatgcgactgatggcccgcgccgggcgactgcgggccgagggcgaagggctgccggaggggtacggcgaagaggcgccggaaggacgcacggtgaccgatgtccatggcgcacggcccggcggcgacggcggctgggtgctgctggccgcggcggcgcgctacgccaccctggtgacggtgcgcccggctgccaaggctcgccaagggaccgatgtgcaagaggagttgccgctatga

SEQ ID NO: 51527 - DNA, 4257 bp, Streptomyces albus subsp. albus
atgaccaccgacgcgcgtggcctcgttccgctgccgcgtgccggcaccgcgacaaccgccgcccccgcgacgagcaccggcatccgtttccggctgtaccgggcgggcatccagaacgtctggcagtacgacgcccaggagttctccttcggtgacggacggctgctgctgcgcggcaagaacggcgcgggcaagtccaaggccctggagatgttgctcccgtatctcctggacggcgactcccgggcgctggacgcgaccggcaccggccgcaccacgctcgcctggctgatgctggacgggttcgagcagaccaaccgtctcgggtacctgtgggtggagttccggggcacggccgacgacggcggacaccgtttcctgacgctcggtgccgccatccgcgcctcgaagtcgactcagaaggcgctgccgacgttcttcgtcacccccctgcggatcggcgaggacctgcacctggtcgagggcggaaagccgctgccggtcgaccggctcaaggagatcgtcggctccgacaacacgaccgagcgggcggtcatgcaccgctcccgggtggcccgggacctgttcggcatcaccgacacgacgcgctaccgcaacctcacccagctcctccaccggctgcggcgccccacggtcggggaccgcatcgagcacgggggcctggcctccctgctcagcgagaccctgccggggctcgacgaggacgtggtcgagaaggtggcacgcaacctccacgacctcgacgccgtacgggacgaactcggccgcctggaacgcaccgacgcggccttgcgcacgttcctcaccagttaccgcggctacctcgccggagtcctgcgcacctccgcgcagcgagtcagccacgagctgggcgtcctctcgcagcggcgccgggcggccggagacgccgcacagcggacgagcgacctgcggacgcaggaggaggagtcggagggccgactggagaccctgcgcgaggaggaacaggcagcccggaccgacctggccgccctgcacgccagtcacgcctaccgcagcctgcgcgaactgtcggaacgccgctccacggtggaggcgctgcacaccgccgccgcagccgcgttcaccaccctgcggaacgcacacgacgcggaggaagccacggctgagcggcttgccgaaggtgtcgaacacctcggaagccgcctggtcgaactgggaaccgaacaccgggaactgctgacgcaagcggagaaggccggacttcccaccggccatctcggcgaggcggtagcgctaccgcgcacggttctcgcccaggccaccgagacggagctgacgaccccggacggggagacgcgcactgtacggcatcggccggtggcccgcgtggacacagccacgacgcaggaagagctgcggtcctggcagaaccagctggagaacgccgaggcggtcacgcgaaaccgggcccgaatggttgaggaggtgacccgtctcgtctcgcgggcggacgaggcccgggtcggggcggctcaggccgatgccgagcgggaacggctggagggcgaggcggaagaggccgtcggccgtctcgacatcagccgccagaaggtcgttgaggagagccgcgcctatgcggaccgtgtcgccgagtgggtggcgtacacgcggaccgcgctggggcccgactgcccgcctctggacaacgtccacacctccgtcggctgtgagacctccgccgacgcgccgttcgcggaccgcacgctgccacccgacatcgacagccaggcgcggcagaccgctcaggccgcgttggagccgtacggggaggaactcaccggacgccgggacgccctggcgctcgacgtcagccggctcggcgaggaactcgaccgcctggcggaacagaagcgggactgggagcaacgtaccgaccctgagccgccggccccgcaccatcgcgtcgccgcgaggacgccgggcaatggagcacctttctaccggctcgtggatttcgcggacgatctcgctccggccgaccgggccggtctggaaggagccctggaggccagtggaatcctggacgcgtgggtgggcgcggacggcgtccttctcgatccccgcacccgggacactcttctccggcccggtgccgtgctgcccgacggaccagctctcgcctcggccctgcgcccggcccctgaaccggattgcggcgtcacgtccgagcaggtggggcgtctgctggccaccatcgcactcgcaccggtacaggagacctccgctcacaacgcagttttctacgacggcagttggcgtctgggcgtgctcagcggccgtcatgacaagggcgccgccgagtacgtgggggccgccgtacgcgccgagacgcgacggcgcatcctcgccgagctggaggagcggatcgcgcgggcggaactgcggctggctggcgtccgcgaggaactcgccgtagccgatgccatgcgtcgggctctcacgctcgcggagcgggacttccccagggctcggaggcttgcggacgcgtggagcaggaccgaatcggcagagaggacgctgcatgccctgaccgccaaggcgaccagggcggcgcgactggccgaggaggcccgcgctctcgcggtatcggcgcgtgccgaggcggatgccaccgcgaccgcccacgatctgcccggcgatccggacgccctggaccgcgtacgcaccgcactggctgccctgctcggcggtgtcgggcatctacgcagggccgtcggcagcacgggcgagcggctcggcgcgcatgagacggatgccgaacggtacgggcgtgcccgcgaggatcgcctggccgcggaggagggctaccgggtccacctcaccggactgcgcaccgctgagcaggatctgcggacccgcgaggtggccatcggatcgtccgaggaagagatcctcacccgcgagaaggaggccaagcagcgcatcgtggacgccgtgcgcgacctgcctgcggcgcaacgatcccgcgatggcctccacgaccggcgcgtgcgagcagaagaggacgagaagcgcctgcgcgggactctgacggaccaggagacggcggtcatcgacaccggcagcgctcttcgcggtgcgctcggccgaccggaggtggtgctaggcgccggcctcgaccggtcctcgctgcccgagtacgtgtcggacgatcccggcgcggacgtccgcagccgtctgcgagcgctgcgggccctcgccgacacggtggagcaggccatcggccgcccgaaggacgaagtttcggacagcgccctgctcatccggcacactgcgctgcgcgaccaactggctggcgggtacgacgcacagctggaggaacgcgacgggatcaaggtgtgccgcctggtcgacgaccacggctcccatgacgtcgcggccgtgggcgagcggatcgcggtccaggccgcggaggccaggggacggctcaccgaacgcgagcgtgaggtgttccagcggttccttaccggcgagctcggtgaccatctctcggcgcaggtcatcactgcggcgaacctggtcgcggctctcaacgacaccctgcggaccgtgcgcacctcccacggtctcggtgtcgagctgctgtggaagctggacgaagatgtggacgcggacgtccgggcagccgtggacctgctgcgcagtccctcgagcctcaggacgcgcgagcagaccgagcagctccgcgaagtcctgcaacgccggatcgaggacgcccgacgcgccgatccttcagccggttacgccgcccatctgcgaaccgcgctggactaccgcgactggttccgcttccacaccttcgtggtggaggacgcggctccgagccgccgtaggaaactgaccggacggaccggtctcagccagggcgaacagcgggtgctctcctacctcgtgctcttcgccgcggccgccgcccacttcaccagcctcgccgaatcggcgccgtacgcaccgcgactgatcctcctggacgacgccttcgcgaaggtcgacgaacccacccatggtcggctgggccgtatcctcgtcgacctcgatctcgacttcgtcctcaccagcgagcggctcatgggcaactggcccgaggttccgtccctacacatctacgagtgcctccgcgatccccatgtccgaggcgtggccaccctgcactacacctggaacggccgccatcggcgtctggtgtccgtgtga

SEQ ID NO: 51528 - DNA, 1305 bp, Streptomyces albus subsp. albus
ctggaacggccgccatcggcgtctggtgtccgtgtgagcgcactgccctccgcgacgctcgaatggctgacgggccccgggctcacccggctctgggagagcgtacgcaaacgactggagagcaacggcgtacaggccaccggctcgctccggctcaccgcgatgaacccccaggaacgcaacgacctgtccctcctgctgggcaaacccctaaccggtgccgccgtgaccgtacggctcgacgtactcgacgcacgacttcgcgcctcggccgccggtctcgggctgaggcagaccctggaggaaatcggcccgcccctcaccgaccgccgtgccgcccgcgcggacgcgacggcgcggcgggagcaggtgtggtcgtctctcgcttcgtcactggacgcctccccactcgccggccaggaatggccccggcagtggtacgacctgttgcgccgggccggcgttccgcgaggagtgacgcccgaagcggcggtgtggacactccagcaggcggtccaggtcctcaccaccctcctcggacccgagcggggcagtgcacgcggccgaggtgaactcgccgccatggcgaccggctccgcgcacggcctcgacgacggcacctggctcgcacgcctcgtccaacgcggtgtcgccctcgcccacggcaccgagttccccgacgacgcggccggccgacgcgctctatggcggctggtgtccgtcacgccggacgaggtctccagcacagtgctgacctacgggctgcgccctgacggcgaagggtggcgtgagcgtgccctacgggagcgggccgaccatcatgccgaagcccacctcaccccgcgcgacctgcacgccctacggctgcaactcccctccggaacgctcatccacatctgtgagaacccgcgcgtggtggaagccgcggcggacgcggcctgcgtccagccccttgtgtgcacgtccggcagcgccgccacggtggtcttcacccttctcgacgccctcgccaccacgggctgctgcttcgcgtaccacggcgacttcgactggcccgggatcgctctggccaaccgggtcatccgccgctacgaagccttgccgtggcgcatgggcaccgtggattacgagcacctggccgctcgcagtcaagccgagggcatccctcaactggccctcgacggccagtcggtcagcgcggactgggacccggatctcgcccctgccatgaccgccctcggcgtcgcgctccatgaagaagcgaccctcgatctcctggtggacgacctgtcgcaccaggcgtaa

SEQ ID NO: 51529 - DNA, 1488 bp, Thermoanaerobacter thermocopriae
atggaagataaacttgatttgaatgtgataaaaccgattgaagaggtaaagtatttatctgctgagaatgcgtcgcgatatcgcctcatcatgaggtatttttatgaacagtaccagaaatttaaatattggctgtacaaagaggatgtatatgaatatgtaagtcaatttgatatgtttgctgactatacaatggaaaaatgtgagcaggacttaaaagcacttactgaatggaaaaaccttattgcgacacaagataccagtaaagcttctacgattgacgaatttaaaaacaaaaaattcaggtatcagctgagtccatattctattgagatagagagaatgaccataaggctggaaagcatcgtcggttatggtgggtcactacagccgtctttatttgaaaggatttaccgcaatttaataaagataaatgaaatggcgaaaaaagaggatttacaggaaataaacagatggtgggaagacctcaataccgactttgaaaatatatatcacaatgcgacagattacattgcaagtcttcaaagctctaacgctgatgaacttatgaagtcagagcagtttatcatttacaaagacaaacttatagaatatttaagagattttataaaagaccttcagagattttctgttgccatagagagttttttgaaaaaggtgagtccggagattgtcaattccgttgtagataagttatgccaatatgaaatgagtatcccaagaattgacagggttttaaatgaagaggaagtaaaagaagatttgatggataagtggaataacatatctttttggtttacaggtcataattttgaagacagcgaggcagtaaggcttcttaatatatcaaacgaaataatcagaaaaataacaatgtatgcggcgagaatagcagaaaacaggatgaaagctgccagcagaaagaatgaatatattgctctttctaaaatgtttgcaaaagcaagtaatataaaagaagcacaccttttgtctgcggcggttttcggttgcttttacacaaggcacataaaaggtgattttgaaagaaagacagaaagtgtaaaccagagcgtatgggaagaaccgccctttaaagtgattataaagccaaaaacaaggagctacagtaattctgttaagacaaatgcgattattgatagaagtgctgacaagacggagatgctgatggactatctcaatcagaaaaatatagaagatgaaataatagcaagttgcattgttggcaatagaataaggataaaggatttacctgttgtaaaaccttttgtgagggcaacgatacttaaatggataggaaaagcgatggcaagaaatggctttataggtaagacagaagatggaagaacatacaagcttcatatgccaaagaatggtgagagggcaatactaaaatgcacagatggtaatcttgatatgcctgatattgtaattgagtttgttgattga

SEQ ID NO: 51530 - DNA, 1152 bp, Thermoanaerobacter thermocopriae
atggaagaacttcagatgcttcttgaaaatttttggatactgagagaggatagagaaaatttcaacaaaataagagatgcggagaataaaataaaaccttttgttgaagaaaaattaggatatagattgattataaacccatatattattaagttggaaaaagtgccgtcagatgttgaagagtggatggggatagatgcatttcaaatgcctatggattatgcatttttgtgtttgctcttagcttttttggaggataaaggacctgaagaccagtttgtgctgtctaatataacggaatacatagaggcgcagtatgatggacctgataaagtagattggacgctttttcagcacagaaagtcacttgtgcgggtgctcaattttgctgtagatattggcataattaaaatagatgatggtgaccatgagaggttttcagaaagtgaagatactgaagttctttacgaaaacacaggcatttcaaggtattttttgaggtcttttaacagagaaattacagaagacatgaagattgaggattttttgcaggaggatttaaatctttcaacccccaaagatgcggttatacagagaagacacagggtgtaccgaaaacttattctttcaccttctgtgtatagtgaaggacctgatgaccaagacttcatgtatataaaaaattacagaaatactatagcgaaagatttagaggagtatcttgatgcaaaacttcacctccacaaaacttctgcttttgttctctttaatgacaacaaatatttaaagtcctattttcccgacaaaaacaaaaacatatctgatataatgctgcaggtaagtaaaattataagacaaatgattggagatggaaaactcgcctataatcctgatgatactatagatataactgaagcagaatttataaatatcattttgaaagtaaaggaaagatttagtgatggttggtataagtcttacagggaaatgagtgaaaagcagcttatagaagaggtcattgaaaacatggaaagctttaagatgataaaaagagttgaggaattgcattctattaaaatattgcctatggcggcaaagttaattggggaatatcctccagattttgaaaaaggagaaggtgcagatgagtga

SEQ ID NO: 51531 - DNA, 4167 bp, Thermoanaerobacter thermocopriae
atgagtgaaaaattagccgaaagatggatgattaacaggattgggcttcttaatttttggtattatgatgatgaaatatttgagtttgcagatggaaggcttcttttaagaggtgctaatggttctggaaagtcagtgacaatgcagagtttcatacctttagtattagatggcaacaaaagtcctgaaagacttgatccctttggctcaaaggcgagaaagcttgaggactatcttcttggggaagaagaggtaagtgggcttgatgaaagaactggctatcttttcatggaatttaaaaaagagaaaaaagacagctacattacaataggcattggactaaaggcgaaaaggcatcaaaatatggacttttggggctttgtaatacttgacggcaggcgtataggtatcgacttctttttatacaaaatggaaataggcgatgacggcaaaagagcaaaagtcccacttaccaaaaaagaacttaagaatagaataggtgaaggcggagaagtagttgaaagccaaaaagagtatatggaaatggtcaataaatacatttttggctttagttctatcgaggaatacgacgagctcataaaactgctgatacagcttagaagtccaaagctttccaaagacttcaggcctactgtgatatatgaaattatgaaggcttcactaccttctctcacagatgatgatttgaggcctctttcagaaaccatagaaaacatggaccagattaagatgcaccttgatgttctttacaggaatatggctgcagtaaaaaagcttaaaaacgagtacgacaactataacagatacattctttatgaaaaggctggggatttagtaaaggcatacagcgatttatacgcatcaaaaaaagaatacgataatttaactaaagatattgaaaattatagaagtacaatagcaaacttaggaaatgacatcatttctcttgaaagtgaaagagaagccttaaagaaaaaggaagaacagctttcaagtggtgatgctaaaaaaacccaaaaggagttattagaagaagaggatcgatataagcagtatttggaggataagtctaaaaaagaagaagaactccggaataaacaagataaatattatggtttagaaagaaagataaaaaacactgaggaacaaaaatacaaactggataaagaactacaggataaattagaggatatatcttcaattgcacaggatatagatttcatggaacatgagttttctgtaagtgaacttaaaaaagtgtatggaaaagaatttgattttacttattggaaaaatgaattaaaaaagcataaagataaaataaagcgtgcaatgagtgcattgagagaagaaatagaagcaaataaaaggtatgatgccgcacttaaagagcaggaaaggcttaaaaaagaaagagaagacagggctaaaaagcttaatgaggcagaaaggctttttgacgaacaaaaaagagaatacgttgaaagagtttatagttggtcgcagggcaatgcagaacttaagcttttaagtagccaactggaaggcttaagccgtgtcatactggcgtatggagaggataaaggatttgacgatattttggcttttgtgagaaaaccctatgaggaaatactaaatggaattcagcaagaaattttaagattacaaaatcaaagagaggtaaaagaaaatcagcttcatgagaaagaaaagttattggaggaatggaaaaacaaaaaagatcctgagcctgaaagagatgaacaagtcataaacaacagaaaaaggcttaaagaagctggaattccttacattcctctttacatggcgattgattttaaagaggatgtggatgaagagacaagaggcaatatagaagctgcgatagaagacatggggcttttggatgctcttatcgttcccaaagaatattttgaaaaagctcttcaaatggacagcaatatggcggataaatatgttatgcctggaagctttaatatgatgttaaatgtatctcaatattttaaagtagttgacaatgaagaaggagtttcaccagaagatatttcggatgctttaagcaatatatttgtatccgaagaaagcgggacaacctatattgattcaaatggcacatatggaataggagtaataaaagggaaagcgcgggataaagttaaatcaaagtacatcgggagtgagtctagaaagcgctacagagaagagcttattaaatctatacaagaagaaatacaggctataaaagctgaaatatctgcaatcgatgaggaaataaatgcaaaaaaatcaaggatacagaggctggattacgaatattcggcatttcccgggaaagaagatattgaagaagcatatagatatttaaaaacggcaaaggctgattacgaatacacctctcataaactggatgaacagctttttacagttaaaaactgttttgaggaccttcagaaaaagaaagctgttgtaagagaattgacatctggcataaacatacatccagatattgatacctattcttctgcgtatgaatatgcggaagaatacgcttcagggcttaatgaagtagaaatactatacaacaaatatgttttgcacatttcaaacgaagaaatgttattgcagcaaaaacaagatttagaatacgatattgataacttaaagtacgaaatagacgtactggaaaacaaaatacagagttctgttaagaaaattgagatgctaaaagagacattaaaagaacttggacttgaagaaattgagaaagaactagagttttgcctaaaaaggctggaggaaatacctaaagagattacaaataaatcagccgaaaaagcaaaacttgaggagcggctacagagaagcttaaaagaccttttaaacattgaagaagagattcatcttaaagaggaaatttacaatattgttgaagagggtttaaaaaaggaattagcacttggctttgtcaagcaagacgttgaaatggaggatatgttaaaattaagtaaaagcattctttctgaatacaaaggcttttttgacaaagcgggctttgacagagaaaagtttacagagagacttcaaaatgtgtattttgaaactcgcaacgaacttttagaatatggactttcaattggcaatatctttgacgaagcttgtgagggagacaatgaaagaataaaagaagcaaagagtaagcagagaagacttaatattacggcaaatataaatggtaaagttgtttcattatatacgctttattctaatattgaagaggatataatggcgaatgaaagccttttaagagagacggataagattctttttgaagagattataatgcacaatgtgggaattaagataagggcaaagatttttaaagcagaagaatgggtaaagaaaatgaacaaactcatgtctgaaagggatacttccagcggacttaagttctctattgagtggagaagcattcctgcttccaatgaagaagaacttgatacaaaggaacttgtagatattttaaaatctgatgctgatatgctgaaaaaggaagtcttcgataaagttgtaaatcattttaggtcaaaagtagaaagagccaggagggcaatggaggaaaaaaacaatacagaaacttttcacaagattatgaaagaaatattagattacagagattggtttgagtttaagctttactacagaaaagaaggggaaagtcgcaaggagcttactgataatgcctttaataagttgagcggtggagaaaaggcgatggccatgtatatacctttgttttccgcggtttactcaaggtatgagggagcacccccgactgcacctcgcataatatctctagatgaagcatttgcaggggttgatgacacaaacataagggatatgtttaaactgattgaagatctaagatttaattatataatgaattcgcaggttttgtggggagattatgacactgtccccaagctttcaatttatgaacttataaggccaaaaaatgcaaaggctgtattggtcatgaagtatttgtgggatggaaaggtaaagcatcttatacttcctgaaaaagaggaggttgccgctcttgaggtgggtgctgtaaatgaataa

SEQ ID NO: 51532 - DNA, 689 bp, Thermoanaerobacter thermocopriae
atgaataaagaagaacttaaatattttaaagaaaaaaagggatacaagaggatttttaaaggtataagggaaaagtacagaagtttaggacgtcttggaggcgttgtaaagcttgataatcttacggaagatgaaaaagaagtacttacaaaccattttaaaaaagactataggacaaaaaaatctgcatccattgatgtggcaaagtttgaagagtcgctaaaaaatacgcgatttgaggagtatacgctaaaagacatactggaatactattttggcgaaaaactcaccagcaaaaaagaggatatggaaatattggcaaaagaaagagaagagttctttaaagagctcttctctaaataccaggaatgtaagtgcattgattggctaaaaagtttgtatgagggaaccgctgtaggggtaaggacagtaaatcagaggtatttaaatgatagaaatgggctaaaaaaagatataatgtatgtatgtgatgctataaataatttgcctgtttataaaggggaaaagaaaagactgccggtgttttcttcccagattgcacgtaatcctcactattttgattcaaatacagaagctggaagtatgtttataaacgctttatgcactttaatggggctgaatgaagtaaaaggaagtgaagaaatatcagaactttattacaacgttgg

SEQ ID NO: 51533 - DNA, 1416 bp, Caldanaerobacter subterraneus
tcgcgatatcgcctcatcatgaggtatttttatgaacagtaccagaaatttaaatattggctgtacaaagaggatgtatatgaatatgtaagtcaatttgatatgtttgctgactatacaatggaaaaatgtgagcaggacttaaaagcacttactgaatggaaaaaccttattgcgacacaagataccagtaaagcttctacgattgacgaatttaaaaacaaaaaattcaggtatcagctgagtccatattctattgagatagagagaatgaccataaggctggaaagcatcgtcggttatggtgggtcactacagccgtctttatttgaaaggatttaccgcaatttaataaagataaatgaaatggcgaaaaaagaggatttacaggaaataaacagatggtgggaagacctcaataccgactttgaaaatatatatcacaatgcgacagattacattgcaagtcttcaaagctctaacgctgatgaacttatgaagtcagagcagtttatcatttacaaagacaaacttatagaatatttaagagattttataaaagaccttcagagattttctgttgccatagagagttttttgaaaaaggtgagtccggagattgtcaattccgttgtagataagttatgccaatatgaaatgagtatcccaagaattgacagggttttaaatgaagaggaagtaaaagaagatttgatggataagtggaataacatatctttttggtttacaggtcataattttgaagacagcgaggcagtaaggcttcttaatatatcaaacgaaataatcagaaaaataacaatgtatgcggcgagaatagcagaaaacaggatgaaagctgccagcagaaagaatgaatatattgctctttctaaaatgtttgcaaaagcaagtaatataaaagaagcacaccttttgtctgcggcggttttcggttgcttttacacaaggcacataaaaggtgattttgaaagaaagacagaaagtgtaaaccagagcgtatgggaagaaccgccctttaaagtgattataaagccaaaaacaaggagctacagtaattctgttaagacaaatgcgattattgatagaagtgctgacaagacggagatgctgatggactatctcaatcagaaaaatatagaagatgaaataatagcaagttgcattgttggcaatagaataaggataaaggatttacctgttgtaaaaccttttgtgagggcaacgatacttaaatggataggaaaagcgatggcaagaaatggctttataggtaagacagaagatggaagaacatacaagcttcatatgccaaagaatggtgagagggcaatactaaaatgcacagatggtaatcttgatatgcctgatattgtaattgagtttgttgattga

SEQ ID NO: 51534 - DNA, 1152 bp, Caldanaerobacter subterraneus; identical to SEQ ID NO: 51530

SEQ ID NO: 51535 - DNA, 4167 bp, Caldanaerobacter subterraneus
atgagtgaaaaattagccgaaagatggatgattaacaggattgggcttcttaatttttggtattatgatgatgaaatatttgagtttgcagatggaaggcttcttttaagaggtgctaatggttctggaaagtcagtgacaatgcagagtttcatacctttagtattagatggcaacaaaagtcctgaaagacttgatccctttggctcaaaggcgagaaagcttgaggactatcttcttggggaagaagaggtaagtgggcttgatgaaagaactggctatcttttcatggaatttaaaaaagagaaaaaagacagctacattacaataggcatgggactaaaggcgaaaaggcatcaaaatatggacttttggggctttgtaatacttgacggcaggcgtataggtatcgacttctttttatacaaaatggaaataggcgatgacggcaaaagagtaaaagtcccacttaccaaaaaagaacttaagaatagaataggtgaaggcggagaagtagttgaaagccaaaaagagtatatggaaatggtcaataaatacatttttggctttagttctatcgaggaatacgacgagctcataaaactgctgatacagcttagaagtccaaagctttccaaagacttcaggcctactgtgatatatgaaattatgaaggcttcactgccttcactcacagatgatgatttgaggcctctttcagaaaccatagaaaatatggaccagattaagatgcaccttgatgttctttacaggaatatggctgcagtaaaaaagcttaaaaatgagtacgacaactataacagatacattctttatgaaaaggctggggatttagtaaaggcatacagcgatttatacgcatcaaaaaaagaatacgataatttaactaaagatattgaaaattacagaagtacaatagcaaacttaggaaatgacatcatttctcttgaaagtgaaagagaagccttaaagaaaaaggaagaacagctttcaagtggtgatgctaaaagaacccaaaaggagttattagaagaagaggatcgatataagcagtatttggaggataagtctaaaaaagaagaagaactccggaataaacaagataaatattatggtttagaaagaaagataaaaaacactgaggaacaaaaatacaaactggataaagaactacaggataaattagagaatatatcttcaattgcacaggatatagatttcatggaacatgagttttctgtaagtgaacttaaaaaagtgtatggaaaagaatttgattttacttattggaaaaatgaattaaaaaagcataaagataaaataaagcgtgcaatgagtgcattgagagaagaaatagaagcaaataaaaggtatgatgccgcacttaaagagcaggaaaggcttaaaaaagaaagagaagacagggctaaaaagcttaatgaggcagaaaggctttttgacgaacaaaaaagagaatacgttgaaagagtttatagttggtcgcagggcaatgcagaacttaagcttttaagtagccaactggaaggcttaagccgtgtcatactggcgtatggagaggataaaggatttgacgatattttggcttttgtgagaaaaccctatgaggaaatactaaatggaattcagcaagaaattttaagattacaaaatcaaagagaggtaaaagaaaatcagcttcatgagaaagaaaagttattggaggaatggaaaaacaaaaaagatcctgagcctgaaagagatgaacaagtcataaacaacagaaaaaggcttaaagaagctggaattccttacattcctctttacatggcgattgattttaaagaggatgtggatgaagagacaagaggcaatatagaagctgcgatagaagacatggggcttttggatgctcttatcgttcccaaagaatattttgaaaaagctcttcaaatggacagcaatatggcggataaatatgttatgcctggaagctttaatatgatgttaaatgtatctcaatattttaaagtagttgacaatgaagaaggagtttcaccagaagatatttcggatgctttaagcaatatatttgtatccgaagaaagcgggacaacctatattgattcaaatggcacatatggaataggagtaataaaagggaaagcgcgggataaagttaaatcaaagtacatcgggagtgagtctagaaagcgctacagagaagagcttattaaatctatacaagaagaaatacaggctataaaagctgaaatatctgcaatcgatgaggaaataaatgcaaaaaaatcaaggatacagaggctggattacgaatattcggcatttcccgggaaagaagatattgaagaagcatatagatatttaaaaacggcaaaggctgattacgaatacacctctcataaactggatgaacagctttttacagttaaaaactgttttgaggaccttcagaaaaagaaagctgttgtaagagaattgacatctggcataaacatacatccagatattgatacctattcttctgcgtatgaatatgcggaagaatacgcttcagggcttaatgaagtagaaatactatacaacaaatatgttttgcacatttcaaacgaagaaatgttattgcagcaaaaacaagatttagaatacgatattgataacttaaagtacgaaatagacgtactggaaaacaaaatacagagttctgttaagaaaattgagatgctaaaagagacattaaaagaacttggacttgaagaaattgaaaaagaactggagatttgcctaaaaaggctggaggaaatacctaaagagattacaaataaatcagccgaaaaagcaaaacttgaggagcggctacagagaagcttaaaagaccttttaaacattgaagaagagattcatcttaaagaggaaatttacaatattgttgaagagggtttaaaaaaggaattagcacttggctttgtcaagcaagacgttgaaatggaggatatgttaaaattaagtaaaagcattctttctgaatacaaaggcttttttgacaaagcgggctttgacagagaaaagtttacagagagacttcaaaatgtgtattttgaaactcgcaacgaacttttagaatatggactttcaattggcaatatctttgacgaagcttgtgagggagacaatgaaagaataaaagaagcaaagagtaagcagagaagacttaatattacggcaaatataaatggtaaagttgtttcattatatacgctttattctaatattgaagaggatataatggcgaatgaaagccttttaagagagacggataagattctttttgaagagattataatgcacaatgtgggaattaagataagggcaaagatttttaaagcagaagaatgggtaaagaaaatgaacaaactcatgtctgaaagggatacttccagcggacttaagttctctattgagtggagaagcattcctgcttccaatgaagaagaacttgatacaaaggaacttgtagatattttaaaatctgatgctgatatgctgaaaaaggaagtcttcgataaagttgtaaatcattttaggtcaaaagtagaaagagccaggagggcaatggaggaaaaaaacaatacagaaacttttcacaagattatgaaagaaatattagattacagagattggtttgagtttaagctttactacagaaaagaaggggaaagtcgcaaggagcttactgataatgcctttaataagttgagcggtggagaaaaggcgatggccatgtatatacctttgttttccgcggtttactcaaggtatgagggagcacccccgactgcacctcgcataatatctctagatgaagcatttgcaggggttgatgacacaaacataagggatatgtttaaactgattgaagatctaagatttaattatataatgaattcgcaggttttgtggggagattatgacactgtccccaagctttcaatttatgaacttataaggccaaaaaatgcaaaggctgtattggtcatgaagtatttgtgggatggaaaggtaaagcatcttatacttcctgaaaaagaggaggttgccgctcttgaggtgggtgctgtaaatgaataa

SEQ ID NO: 51536 - DNA, 1296 bp, Caldanaerobacter subterraneus
atgaataaagaagaacttaaatattttaaagaaaaaaagggatacaagaggatttttaaaggtataagggaaaagtacagaagtttaggacgtcttggaggcgttgtaaagcttgataatcttacggaagatgaaaaagaagtacttacaaaccattttaaaaaagactataggacaaaaaaatctgcatccattgatgtggcaaagtttgaagagtcgctaaaaaatacgcgatttgaggagtatacgctaaaagacatactggaatactattttggcgaaaaactcaccagcaaaaaagaggatatggaaatattggcaaaagaaagagaagagttctttaaagagctcttctctaaataccaggaatgtaagtgcattgattggctaaaaagtttgtatgagggaaccgctgtaggggtaaggacagtaaatcagaggtatttaaatgatagaaatgggctaaaaaaagatataatgtatgtatgtgatgccataaacaatttgcctgtttataaaggggaaaagaaaagactgccggtgttttcttcccagattgcacgtaatcctcactattttgattcaaatacagaagctggaagtatgtttataaacgctttatgcactttaatggggcttaatgaagtgaaaggaagtgaagaaatatcagaactttattacaacgttggtattttgatagatgaaatatccaattatgtcacactctcaggacttttggcatatgagggcgatacggaaaatcaagtatttaaggctgcttatgaaagtaatcaagtcttgcaagttcctcttttaaatttgagcaaaattgagagagtcgtaagcccttctaagaaagtgtatgttgtagagaatccttcagtttttacatctttaatagatgccacaagcaaagtatttcctcttgtatgcacatatggccagccaaaactttcttctctcctgcttttagatatgctttataaagaagggacagagatatattactcgggagattttgacccagaggggcttatgatagcagatagattatacaaaaggtataaagacaagtttcattttttaaggtacgatgtagaagattatttaaaatctctttcaaatgaagtcataaatgatgtaaggcttagtaagctaaataagattgaatcacctttactctttgatgtggcaaaggagatgaaaataataaaaaaagcagggtatcaggagcttataatagatgatattataaatgatataaaattgattgaagatggtaaggggaagtggtaa

SEQ ID NO: 51537 - DNA, 1578 bp, Actinoplanes awajinensis subsp. mycoplanecinus
atggccgggcagcggagtgggtcgttcggtctcgacgacttcggggtcgatgatcggctgcggctgttcagctacgtcaacgcggacaaccggctcgcctacctctggctgttgcgcgccttcgaggccgcccgcaccagctaccaggtcgtgctgcacacctccgatgtgcacgccgccctggccgggctcagcgcggcccacgccgaatgccccgatccggccactctggagctcgcccggctgctggacgcgctcgtcgactggggtgtgctcgaccgcggtcaggacggcacccgggccgcgaccctcgccgagtaccgcaaccggcactccgtctaccagttcaccgaggccggctaccgcgcgcaccgggccgtcgagagtgtcctggccgccgggatcgaggacagcaccctctcccggctggtcttcgcggacctgctcgccgacctcaaagcgctcaaggacgccaacgagagcggcgacgccgaagaggtctaccgcaagctcaaccgcctcgaccgggcgctcgccgacgtcgccgaacgggccgcgcggttctatcacatgctcggtgacctaggccggacccacgacatccggcccgaggtgttcctcgcccacaaggatgcgctgctggtgcacctgcgggacttccacgacgagttgcagcggtacacgccgcggctgcgcgaggccgtgcacgaggtcgaggcgaccggtctcgaccggatgatcgaggcggccgcggaggccgacgagcggctgttcgcgacgccggccgagcggatcagcgactgggcgcggcgatggcaggggctgcggtcgtggctcgcgccgagcaccgacgtgccgagcgaggcggagcggctgtccggggcgacgatggcggcgatcggggacgtcctcgcgctgctgcgccgggtgaccgaggcgcgccggggcggggtgagccgggagtcgcagctgcggcacctggccgcctggttcaccggcgccgggtcggcggaggccgcgcacgcgctgttcgaggtggtgttcgggctgggcgcgccccggcacgccggggtggcgtacccggacccggaggcggtcgcgagccggttgtcctggtgggaggcgccggccgtggagttgtcccggtcgctggtgcagtccgggcggatgcccgggcagggcaacgggcgaccggcccggatcgaccggtccgaggcgccgcggcgggtgctgcgggagcggcagctggccgacgaacgccgccagaccgaggccgcggcgggcctggtcgaacaccagggattgaccggggagaaggacagcaacctgagcgacgaccagaccgccgcgctgcgccggctgctggacatcgccctctcggcgcgggcggccggccgccgggatgcgccgttggccgcggcggctttcggcgtacgcctgacgttgcacccgtgcccgggccgcttcagcacggtcaccaccgacgcgggccgcctgcacctggacggctacgaactgacggtgaccatcgccgggcacaccacggcccgtcgcccggcggaagccgtcaccgcatga

SEQ ID NO: 51538 - DNA, 1326 bp, Actinoplanes awajinensis subsp. mycoplanecinus
atgaggttcgccgccgacgtcgccgacctggagatcgccgactaccagcgcgccgtccgcctggtgctgcgccacccgctgatcaccgccacgttcccggacgagaaggccctcccccgcgtccgccggttcgccgccgacctgcgcaccgacctgtccgaggcgttcggctaccggctggaactgcacggcgccaccgcccgcctggtccgcaccgccgaccggctcgacccggaccgcggcgcggtgtcccggaccggccgcccgttcgaccgccagcgctacgcgtacctgtcgttgtgcctgggcacgctgggccgggcgggcatccagatcaccctgagcgagctcgccgagtcggtcggcggtgacgcgaaccggatcaccgggctgggcctggacccggacgtcggcgcggaccggcgcgcgttcgtcgacgcggtcgcctggctcgaggaacgcggcgtgctgcggctcgccgacgggtccagctcgtcctgggccagtgacccgggcgccggcgaggcgctctacgacgtcgcccgcgacgcggtgttcgcgctgttccgcccgccgcgcgtgctgcagcacatcgactcggtcggcgcgctgctggaacggtcgccgatcagcagcggcaacgccgagcggcgggccgcggcgcaggccgcccggcgggccgtgctggagcgcccggtggtctacttcgacgacgtgccggccgaggtcggcaaccatctgcgcgggcagacgctcgccgccgacctgcagcggctgaccggcctgcgcctggaacgccgggccgagggtgtgctgctcgtcgacacggccggctggtcgtccgaacggttcccgggcaccgggtcggtggcgcaggccgcggtgctgctcgcggtcgcgatcgccgagcgggtgtccgacccggacggtcgcaaggcgcgccggatgccgatgccggacccgggtgaggcgcgggccaagctggccgggcagatcgacgcgggtctgccggccggcgtcccgctgctgctcgacgagccggacccggtggacccggccggcgatccggacgagaccgatcagcggagactgcccctgatcaccgacagtttcctgcgggaggcgacggccgaggtgctgtcggcgtacgggtcggctttcggtacggcctggcacgcggatccggagcgcctgcgcaccgaggcggtggccctgctcgtccgtttcgacgcggtcgtggtggtccccggcggggtgctggcccgcccgttgatcggccggtaccgcagcacggtcgcgcaggtcaaacagcgcacgctcttctga

SEQ ID NO: 51539 - DNA, 4146 bp, Actinoplanes awajinensis subsp. mycoplanecinus
gtggcacgcttcgcacccacccgggccgggatcatcaacctgtgggactaccgggacgaggagttcctgttcgtcgacggctggctggtgctgcgcgggccgaacggctccggcaagacgaaggccctcgaggtgctgttcccgttcgtgctggacgggcggatcgagccgcgccggctgaacccgttcgccggcgaggaccggacgatgaagtcgaacctgctctaccgggggcaggactccgcgtacgcgtacgtgtggatggagttcggcgacggcgcgtcgttcgtgacgatcgggatcgggctgcgggcgcaccggcacaacgaccgggtgacccgctggcacttcgtcgcggacggccgggtcggcgtggacctgtcgctgctggacgcggacgaccggccggtgtcccgccgtgacctgatcgaccggctcggcgcggaggcggtccgcgactcggccgaggagtaccggcacctggtcgacgcgcggctgttccagctcggcccggcccgctacgagcagctgctggacctggtgctgacgttgcgcaagccgcagctggcgaaggatctcaacccggtggagctgtcccgcaccctgcagcggggcctgcggccggtggaggaccagctgctggtcgaggcggcgcgctcgttcgacgacatggaggcggtggcccgtaccctcgaggggttgatcgcggcggacgccgcgaccggcgcgttcctcggggtctacgccacctacctgcggacccacgcgcggtccgccgcggacgcgctcaccgcacgccgggacgcggccgcggaacgccgcgcgaccctggaagcggcccggcatgcggcggagggcgcgcagcagcgggccggcgaggccaccgagcggctgcgcaccgccgagggggaacccggccggctgcgcgcgcacctggaacggctcaagggctcggccgcctaccgctcgcacgagcagctcgccgacctggagcggcacgtcaccgacctggcgaaggccgcccgcgacgcggacgagctggccgacggcgaacgggcgaccgccgggaaacgacagtcggaatcggtcaaggcggcgacagcggcgcaggacggccgggcccggaccgggcggatcgccgccgccctcgcggccgaggcggagtccggcggcctcgactggcacaccgcggacgccgcgccggacgggctggccacccgcctggccgcccggtccgagacccgccgcgccgacgtgcgggcggtgcgcgggctcgcggatcggctcgccgaggcggagcgggaccacgtgcggtccgccgacgcggaccgcgacgcccgggccgccgtggacgacgcgatcaccgcggagcggggcgcggccgaggcgctgggcgtggcccggcgggaaaccgccgccgcggtgcgtgcctggggcgtccagcacaccgccctgctgaccgagctggacctgccacatctgccggagcggctggcggcgacgctcaccgaaccggacaccgccccggaaccggcgcacccggccgggccggacgacagccggaccggcgacgcgatctcgctgcgcgatctctacaccgagcaggtcgcggtcccggtcgcggcgatccgcgacgaggtcgccgcgctcggcgccgaggcggaccggcggggccgcgagcgggacgaggtggcggcggagcgggccgcgatcgccgccgaacacgacgacgccccgccggcctcaccgacccggccggcgccgcgcaccggccgctccggcgcgccgttctggcgattggtccggttcgccgacggcattccggacgccgaggcggcgggcatcgaagccgctctgcacgcggcgggcctgctcgacgcctgggttcacccggcggacaccgacaccgagaccgcgctcggccggggcgcacaggacgcgttcctgcgcacgaccggcgggcagcccacacctccggccgggggaaagaccgcgggccaggaggcggacccgccgatcggcggcgccacgctcgcgaccgtgctggtcccggaggatcaggagatggtgccggccgcgcggatcaccgagatcctgagcgggatcgcgctcggcgcgctcaccggggcgtccggggtggccggtgacggccggtgggcgcagggcagcggcgtcggccggttcgtcaaggaccgctgcgagtacatcggcgcgaccgcccgggccgcccggcgcgcggcccggatcgccgcctgcgacgagcggatcgccgccctggacaccgagatcgcgcgggtcgaggcggtccggcaggcgcggcggaccgtgctggccgaggtcgccgccgcgggcgcggcgttgccgccacgcaccgcgatccatcaggccgagaggctggtggaccgggccgcgacactgctccgggtacgacgggaagccgcgtccgaggcagccggccgcctcgacggcgcggtcgccgagcaggcgtcggccggagccgcgctgcgccgggcggtcgccgaacgatcacttccggtcgaccgggtcgagcagaccgcggcggcactggaccggttcgaccggttcggcctcgagctcacgcacgcctacgagaccgcggagcgggcggccgtcctcgccgacgaggccgccgagcgccacgccgaggccgaggagcgggccgagtccgccgcgcggaccgcccgggagagccggcagcggcacggcgagaaggacgaggagctgcgcaccctcgcggcggcgatcggcgccgaggcgacccagatcctggccgaggtcaaggacaccgagcaggccgtgacggtggccgagtccgcactgcgggacgcgcaggccgcacagagcgtggcgctgcaggagaaggccggcgcgaccgcccgggtggagctcggtgagcaggccgtggcggaggcggccgcggagacggcacgggaggcggtgcggctgcgcccgtacgctcaagcagatcttctggggctgatgcgctgcccgccgcacctgcggtggcccaccgccggcctcgcggatctggatcttgatccggcggtggtggcgctgcacgaggcggtgctgaccgcgacccgcgagctgagcccgaccgagtcctcgctgaagcagtccgcgacccggctgaccagcgcgctcaccgagttgcaggcgcagctgccggcggccgggctcgaccaccggccggagtgggacaccgacgagggcgtgatcgtggtccgggtcgccgacgagcaggggatgaccccggtcgcgcacttcgcggaacggatcgcgggtgaacgccgcgaccaggagcagttgctgaccgcagcggaacagcgggtcttcgaggacgcgctgctcggtcagctggccgggcagatccaccgccggacgatcgaggcacgggacctggtcgacgcgatggacacgcagatgcgggcccggcggatgtcgtccgggctgaccgtcggggtcggctggcggctcgccgacgacctcgacccggaccagcgcgaggtctgcaagctgctggaacgggacccggcgcggctcggcccggtgcagctgaccatgctgcggcggcacttcgcgacccggatcaaggcggcccgggcgcaggcggcggagaagccgtaccgggagttgctggccgaggtgctcgactaccggcagtggcgggtgttcgcgttcaccctgcaccgcccgggtggcaccaccgagccgctgacccgggcccggcacagccagctctccggtggcgagcagtcggtgtcgctgcacctgccgctgttcgccgccgcgaacgcgctgttcggctcggcccgcccggacgcgccgcggctgctcggcctggacgaggcgttcgcgggcgtcgacgacaacggacgcggcgagctgatgtccctcgcgaagcagttcgacctggacctgttcatgaccgggtacgacctgtgggccacccatcccgcggtgaccggttgcgcccactacgacctgtcgcactccactgtcgagcacaccgtctccacggtgctgctggtctgggacggcacgatgaacgtcgccgacttcgacggcaccctggcccgcgcgctcggttcgccggagacccgccgggtgcccgccgatgcctga

SEQ ID NO: 51540 - DNA, 1194 bp, Actinoplanes awajinensis subsp. mycoplanecinus
atgcctgacccgggcgccgaaccgggctggcagcggttgctcgccgcggcccggcgcagcctggaacgcaccggcggcagcctggccggctcggtctcgctcgccgcgcccgacgaggccgaacgccgcgtcgtcatcggggtgaccggggtgcaccggccggccggggtcgcccgggtcaccgtgcggctcgccgaactggacgcgttcctgcgcgcggcacacggcgccggcctggcggagacggtcggcccgttccgggaccggccgggggaacgcgcccgcgaggcggtcggccgggacgcggcgctgtcactcgcgggggagagccggcacgccacccagccctggtatctcgacttcgtggcatcgctgcgccgggacggcacgctgacccggatcgtccgggccggactgccgctgcccgccgtggtgacggtactggacgcgctgccggcagccggcgagccgatgccggtcttcgccgaacgggtgctcggcgacaccaaggccctcaccgacggcccggtacgcggactggtgttgcgcgcgctggccggctggcaccaggtgccggtcccggccggcgcggagcaggaacgggcgctgtgggagctggccggggtggtgcccgacgacctggccagtcaggtgctggtgctgaacctgccggccggcggcggcctgctcggcgagtggctgaccggggccgcggcggcgcacgtgccgttccgggtcaccctgcaccagttgcggctgacaccgccggtgctggccgtaccggagatcttcgtctgtgagaacccggcggtgctgcgcgcggtgaccgggcgggccaccgcgccgctggtctgcaccgagggtgtgccgtcggcggcggtgcacctgctgctcggcgccgccgggccgggcacggtgatccgctggcgcaacgacttcgactggaccggggtgcggctgaccgggtcggcgctggcccggtacccgtcggcggtgccgtggcggatgggcgccgccgactacgcgggcgccgcgggtacgggtccggggctgctcggcgccgccgcggcgacatcgtgggaccccgaactgggcgagctgatgacccgggagggacggtcggtgatggaggagcggctgatcgacacgctcgcggacgacctgtgcgggtacccgggacgggcggtcgcgtaa

SEQ ID NO: 51541 - DNA, 1629 bp, Streptomyces violaceusniger
atgggagcatcagcatccggtgcaggtcaggacggtgacgaggaggcgtggcggcggctgaatgcgtatacctacctcagcgcgcccgagcggctggagcatgtcgcgatcatgcgggtcttctgcggaacgctgctggcggatctggccgtcccggacatcatggcgaagctacgccagagcggtggttccgccgcggggctcgacgccgacactctcacggtccggctggaacagctggtgacctggggaaacctgctgcgcagcagccacaccgtgaaggcgtccagcatcagcgagtaccagcgttcccgctcgcgctaccagctgtcgaaactaggcgaacgcatccagcgggacgccgacggggtcctggccgaggccgacgccgcccgcgaggtgagcagcgaactgctggccctggtcgagcgcggcctgcgggagctggccgacctcgtgaccgcgccgggcggcatcgagccgcaggacgggctggagcggatcagcacgctgttcgtgcagttcagcgagttcgcggactccatacgcgacttctacgcctacctcggccaggtgctgtcccgctacgacctggacagcgccgagtaccagggcttcaaggaactgcttctggactacgtcgaggcgatcaccgaggacgtggcgttccgcgcgccccggatctcggcggcgctggacaccctgtggccgcacatcccggctctgctggaccggctggacgcccacgcccaggggctcaccgggctgtcggcgcagggcgaaggccccctggaggtccgggtgcagcgcagccggggacgcgagctcgcggactgggagggcctgcgcggctggttcagagacaccgacggtcagggcagccaggtcgagcagttgcgggacgccaccctgcgagcgttgcagtcgctgctcgccaacgccaagcggatgctgcggtcggccaccggggagatgtcccggcgcaaggatctgctgcggctggcccgctggttcgacgaagcggcaccgcaggacgcacacgacatcgccgtcgccgccttcggactgtacggcgcccgccatctgggcatacccccggccaccgacgaggtggtacccgcctacacgagctggtggaccggtccggtggttgaggtgccggtggccctgcgggagaggggcagccgcgcgcagcggggccgggcctccgcggtggaggaccactccgcgcagaaggagcggctgcgggaggccgcccggcagcgggcgacggccagggcagcggcggcggacgaactgcgcagcgcatcgggtcggttcgccgacgtacgactcacctcggctgcgctcgggctgctcctggagctgctggcgacggcactaggaaacgctcagctcaggaggcgcgccggcgcggacggggaggggtcagcggggttcgacctggactcggcgagcagcgaggacgctgaactgggtatccgactcaccgtgcgacggacggagggcacccggacggtgctggactcggcagacggcgacctgctgctggacgacttggagttgaaaatcggtcgtatctcggcgacggccgatggtgaagcgaaggcggaggtgagcgtgtcatga

SEQ ID NO: 51542 - DNA, 1326 bp, Streptomyces violaceusniger
atgacccttccctccacccacgacgtagccctggcagccgagcgtcgaaccgccgcccggctgctgctcgcccatcccctagtctcggccgacggcccgcatgccgacctcttccctctgatccgcaggcacgccgactggctgggcaaacggttccagcaggtgctcggctaccgcctgctggtcgacagctccttcgcccggctgttcaaggcggggctgggggcgggatcgggacaccggctggagcgctccaccggcacacccttcaccccgcacacgtacgcctgcctcgcgctggccctctccgtgctggtgaccgcgcccgagcagatgctgctgtcgcacctggtcaccgacatcagggcggctgccgccgacgcggggatcgaactggaggagacgggccgggcggccgggaagcgaaccctggtagcggctctgcgccagctcgtcgagtggggcgtcctcatcgagaccgagggccaggtggccgcgatcgcgcaggaggcgggcggggaggccctgatcacggtggaccgggagctggcgcgcgtggtcgtcgccggcccgctcgcacaggcccgggacggcgccgacctggtccgacgggcagcggacccggggttcagcgggccgcgtacctatgtgcgccgaatgcttgtcgagacacctgtcgtccacctcgacgagctgaccgacgccgagcgcgactggctgcgcacccggcagcgccgggaaggccaggctttctccgaactcctgggcctggagatggagatccgcgccgaaggcgtagcgctggtggaccccgaggaggagctgacggatctgcacctgccgggcaccgggaccgtcgcacaggccgcgctactgctggtggaacggctcgtggagcggcttcggccgcaggagccggggcatccggcgaccggcgggacgctcgtcatcggggtggctgtcccggacggcctggtggacgaggtgctcgccgggctcatcgccgagtacgggcagcgcagcaactggcagcgcggctacctggaggacctccccgccctgcgggaggccgtgctggacatgctggtccgtatgcggctgatggcccgcgccgggcggctgcgcgccgagggcgaaggactgccggaggggtacgtcgaagatgtgtcggaaggacgcacggtgaccgatgtccatggcgcacggcccggcggcgacggctgggtgctgctggccgcggcggcgcgctacgccaccctcgtgaccgtgcgccccgctgcgacagcgcgccaaggaaccgatgtgcaggaggagttgccgctatga

SEQ ID NO: 51543 - DNA, 4266 bp, Streptomyces violaceusniger
atgaccaccgacgcgcgtggcctcgttccgctgccgcgttccggccccgcgacaaccgccgcccccgcgacgaccaccggcacccgtttccggctgcaccgggcgggcatccagaacgtctggcagtacgacactcaggagttctccttcggcgacggacggctgcttctgcgcggcaagaacggcgcgggcaagtccaaggccctggagatgctgctcccgtatcttctggacggcgactcccgggcactggacgcgaccggcaccggccgcaccactctcgcctggctgatgctggacgggttcgagcagaccaaccgtctcgggtacctgtgggtggagttccggggcacgaccgacgacggcagccaccgttttctgacgctcggtgtcgccatccgtgcctcgaagtcgacgcagaaggcgctgccgacgttcttcgtcaccttcctgcgggtcggtgaggacctgcacctggtcgagggcggaaagccgctgccggtcgaccggctcaaggcgattgtcggctccgacaacacgaccgagcgggcggtcaggcaccgctcccgagtggcgcgggacctgttcggcatcaccgacgcgacgcgctaccgcaacctcacccagctcctccaccggctgcggcgccccacggtcggggaccgcatcgagcacgggggcctggcctccctgctcagcgagaccctgccggggctcgacgaggacgtggtcgagcaggtggcacgcaacctccacgacctcgacgccgtacgagacgaactcggccgcctggaacgcaccgacacagcactgcgcacgttcctcaccagttaccgcggctacctggccggcgtcctgcgcgcctccgcgcagcgagtgagccacgagctgggcgtcctcgcccagcggcgccgggcggccggagacgccgcacagcggacgagcgacctgcggacgcaggagcacgagtcaaggggccggttggagaccctgcgcgacgaggaacaggctgcccggaccgacctggccgccctgcacgtcagtcacgcctaccgcagcctgcgcgaactgtcagagcgccgcggcacggtggaggcgctgcacaccgccgccgtggccgcgttcaccaccctgcgcaacgcccacgacacggaggagagcacggcggaacggctggccgaaggggtcgaccacctcgggagtcggctggccgaacttggcacagaaaacagggagttgctgacgcacgcggagaaggctgggcttcccaccggccatctcggcgagacggtggccctgtcacgcacggtcctcgccccggccaccgagacggagctgacgactccggatggggagacgcgcaccgtacggcaccggtcggcggcccgggcggacacggccaccacacaggaaggactgcggtcctggcagaaccaactggagggtgccgagacggtcgcgaaaaaccgggcccggatggtccaggaagtgacccgcctcatctcacgggccgacgcggcccgcgccggagcggctcaggccgatgccgagcgggaacggctggagggcgaggcggaagaggccgccggccgtctcgacgtcagccgccagaaggtcgccgaggagagcggcacctatgcccgccgcgtcgctgagtgggcggcgcacacgcgggccgcgttggggcccgactgcccgccgctggacgccgtccattccacggtcggccacgagacctccgccgacgcgccgttcgcggaccgcacgctgccacccgacatcgacagccaggcgtggcgaaccgctcaggccgcactcgaaccgtacggcgaggaactcaccggacgccgggacgcactggcgctcagcgtcggccggctcgatgaggaactcgaccgcctgacggagcagaagcgggactgggagcaacgtaccgaccctgagccgtcggccccgcaccatcgcgtcgccgagaggacgccgggcagcggagcccccttctaccgcctcgtggacttcgcggacgacctggcgccggctgaccgggccggtctcgaaggggcgctggaagcgagcggaatcctggacgcgtgggtaagcgcggacggcgtccttctcgacccccgcacccgggacaccctcctccaacccggtcccgtgctgtcggatggaccgactctcgcctcggccctgcgcccagcccctgaaccggggtgcggcgtgacgtccgcgcgcgtggagcgtctgctggcctcgatcgcgctcacaccggcagcgcagaactccgcacacaacgcggtctaccacgacggcagttggcgtctgggcgtgctcagcggccgtcacgacaagggcgacaccgagtacgtgggggccgccgtacgcgccgagacccggcggcgcatcctcgccgagctggagcagcggatcacgcagacggaacagcggctggccgacgtccgcgaggaactcgccgtaaccgatgccatgcgccgggctctcacacgcgcggaacgggacttcccccgggcgcaaaatctcgcgaacgcatggagcaggaccgaatcagccgagaggaccctacgtgacctgaccacaaaggcgacccgggcggcacggcaggccgaggaagcccgtgctctcgcggtatcggcgcgtgccgaggcggactccaccgcgaccgctcacgacctgcccatcgaccccgatgccttggaccgcgttcgcaccgcactggctgccctgctcagcggtgtcgggcatctacgcagggcggtcggcggcacgggcgagcggctcggcgcgaatcagacggacgccgaacggtacgaacgtgcccgagaggatcgcctggccgcggaggagagctaccgggtccacctcaccggactgcgcaccgctgagcaggacctgcggacccgcgaggaggccatcgggtcgtccgaggaggaaatcctgacccgcgagcaggaaaccaagcagcgcatcgcgaacgccgtccgcgccctgcctggggcgcaacgagccctcgatgacctccacgacctgcgcgtgcgcgcggaagaggacgagaagcgtctgcgcgggacgctggcggaccaggagacggcggtcatcgacaccggcagcgctcttcgcggtgctctcggccgaccggaggtggtgctcggcgccggccttgaccggtcctcgctgcccgagtacgtgtcggacgaccccagcgtggacgtccgcagccgtctgcgcgcgctgcgggccctcgccggggccgtggagcaggcactcggccgcccgaagggcgaggtatcggacagcaccctgctcaaccggcacaccgatctgcgcgaccaactggccggcgggtttgacgcgcagctggaggaacgcgacgggatcaaggtctgccgactggtcgacgaccacgggtcccatgacgtcgcggccgtcggcgagcggatcgcggtccaggccgcggaggcccggggacggctcaccgaacgcgagcgtgaggtgttccagcggttcctgaccggcgaactcggcgaccacctctcggcacaggtcatcaccgcggcgaacctggtcgcggctctcaacgacaccctgcggaccgtgcgcacctcccacggtctcggtgtcgagctgctgtggaagctcaacgagtccgccgtggaagcggacgcggacgttcgggcagccgtggacctgctgcgcagtccgtcgagcctccggacgcgcgaggagaccgagcagctccgcgaagtactgcaacgccggatcgaggacgcccgacgcgccgacccgtcagccggttacgccgcccatctgcggaccgccctggactaccgcgactggttccgtttccacaccttcgtggttgaggacgcggcccctggccgccgtaggaagctgaccggcaggaccgggctcagccagggcgaacagcgtgtcctctcctacctcgtgctcttcgccgcggccgccgcccacttcacgagcctcgccgagtcggcaccgcacgcgccacgcctgatcctcctggacgacgccttcgccaaggtcgacgagccgacccatggccgactgggccgtatcctcgtcgacctcgatctcgacttcgtcctcaccagcgaacggctcatgggcaactggcccgaggtgccgtccctgcacatctacgagtgcctccgcgacccccatgtgcgcggggtggccaccctgcactacacctggaacggtcggcaccggcgtctggtgtccgtatga

SEQ ID NO: 51544 - DNA, 1275 bp, Streptomyces violaceusniger
atgagcgggctgccccccgcgacgcgcgactggctgacgggaccgggactcacccggctctgggagggcatacgcaaacgcctggagagcaacggtgtacaggccaccggttcgctccggctggccgcgctgaacacccaggaacgcaacgacctgtccctcctcctgggcaagcctctcaccggtgccgtcgtgaccgtacggctcgacgtgctcgacgcacggctgcgcgcctcggccgccggactcggcctcagggacaccctggaggaactcggcccgcccctcaccgaccgccgtgccgcccgcgcggacgcgacggcacggcgggagcaggtgtggtcatccctcgcgtcgtccctggacgcctccccgctcgccggccaggaatggcccaggcggtggtacgacctgttgcgccgggccggggttccgaggggagtgacgcccgatgcggcgatccggacactccagcaggcggtccaagtcctcaccgttctcctcggtcctgaacgtagcggcaacgccctcggccgaggagaactcgccgccatgacgaccggctcggcgcacggcctggacgacggcacttggctcgcacgcctcgtccaacgcggtgtcgccctcgcccatggcaccgagttccccgacgacgcggccggccgacgcgctctgtggcggctggtgtccgtaacaccggacgaggtctccagcacagtgctgacctacgggctgcgccccgccggcgagggctggcgggagtgtgccctgcgggagcgggccaagcatcacgctgaaacacacctgacgccgcgcgacctgcactccctgcggctgcgtctccccgccggaacgctcatccacatctgtgagaatccgcgcgtggtggaagccgcggcagacgcggcctgcgtccgccccctcgtgtgcacgtccggcagcgccgccacagtggtcgtcacgcttcttgacgccctcgccaccacaggctgtcgcttcgcctaccacggcgacttcgactggccagggatcgttctggccaaccgggtcatccgccgctacgacgccgtgccgtggcgcatgggcaccgcggattacgagcacctggccgctcgcagccagactgagggcatccctcaactggcgctcgacggccagccggtcagcgcggactgggacccggatctcgcccctgccatgacggccctcggcgtcgcactccatgaggaggccactctcgaccttttggtggacgacctgtcacgtcagatgtag

SEQ ID NO: 51545 - DNA, 1617 bp, Streptomyces ciscaucasicus
atggagggggacgaactgcacaggtcgccgagctatgacgaaaccggtcgggacagtcgagacagtggcagcgacgcctggcagcggctgagtgcgtatgcctatctgagcgcacccgagcggctggagtacgtcgcggtgatgcgggtgttctgcggcacgttgctcgcggacctcgccgcaccggatgtgttggcgaagctggcgcagaccggcgggccgggggcggtgctggaagcggagacactgacggccaggctggaacagctcgtgcggtggggcaatctgctgcgcagtacgcacaccgtcacggccaccagcattgccgagtaccagcgctcccggtcgcgctatcagctctccaagctgggcgagcgggtgcaacgtgacgcggacgaggtgctcgccgatgcggatgccgcgcgcgaggtcagcagtgaactgctcacgctcgtcgaccgggggctgggtgacatcgccgtcatggtcgccgcaccaggcggtgcggacccgcggcaggcactggagaagatcagcacactcttcgtgcagttcgccgagttcgccgagtccgtgagggacttctacgcgtatctgggtcaggtgctcgcccgctacgacctcgacggagccgaataccagggattcaaggaactgctgctcgattacgtgcaggcgatcaccgaggacgtgtccttccgcgcgccccgtatcgccgcgcacctgcagaagatctggccccacttggctgccctgctgagcagtatcgacgcgcacgcggcgggtctcggagccctctccgaggcgctgccagagacgcgggtacagcgcagccgggggcggcaactcgccgactgggaggggctgcgtgactggttcgccgacaccgacgggcacggcagccaggtggaccagctgcgggacgccaccctgcgcgccctgcagtcactgctcgccaacgccaagcggatgctgcgttcggcgtccggggagatgtcccggcgcaaggacctgctcaggctcgccgcctggttcgacgcggcgcagcccgacgaggcccacgacatcgcggtcgcagccttcgggctctacggagcacggcatctgggggtggcgcccgatcccgacgcgtccgtgccggcgtacgtgagctggtggaccgggccggtcgtggacgtgcccgtggcactgcgcgagcgcgggagccgggccccgcgcggtcgggccgcgatcgtcgaggaccacagcgagcagaaacgccgtctcatggagcatgcgcgtgaacaggccgccgcccgacaggaggcggccgccgaactgcgcagcgcgtcaggccggttcgaccaggtgaggttgggctccgcggcgctgcggctgctgctggaactcctcgctgccgctctcggcaacagccaactacgcaaggacgagggtgatttccggctcgacggcgcgcaggcgggcgatgcggatctgggcatcaggttgatggcgtggcgtaccccgggtcgccacacactcctgcgatccgtcgacggcgagctgctggtggacgatctcaccctggcggtcgagagcgcctccgcaccaaccgccgccgaggaggcgagcgcctga

SEQ ID NO: 51546 - DNA, 1344 bp, Streptomyces ciscaucasicus
atgccgttgccctccgcccacgacgtggcactggccgccgaacgccgttccgccgcccgtctgttgctggcccacccgctggtcacgagcaacgggccacacagcgacaccttcccactgatccgacgccatgccgactggctcgcccagcgtttccagcaggtgttcggctaccggctcctcgttgaggcgtcgtacgcccgtctgttcaaggcgggcctgggacccggctccggccaccgtctggagcggccgtccaccggaacgccgttcacgccacggacgtacgcctacctgacccttgccctctcggtcctggtcaccgcaccggagcagctgctgctctcccagctcgtcgccgacctcagggccgccgccgtggacgccgggatcgaggtcggcgacatcggtcggcaggcggagcggcgtactctcgccgccgcgctgcgccaactcgtcgactggggcgcgctggtggagaccgagggccaggtcgcggccgttgccgaggagcggggtggcgaggcgctgctgaccgtggaccgtgagatcgcccgcgcgatcgtcgccggaccgctgacacagagccgcgacggagcggatctcgtacgccgggccgccgaccccggcttcgggggtccgcgtacgtacgtccgcagacgtctcgtcgagacacctgccgtccacctcgacgacctcaccggcgcagagcgcgaatggctgcggacccgacagcgacgtgagtcccaggctttctccgaactactgggcctggaagccgagatccgcgccgagggcatcgccctcgtcgacccggacggcgatctgaccgacctgcatctccctggcaccggcactgtcgcccaagcggcgctgctgctcgtgggacggctcgtcgaccggctacgccccgaggaccccggccacccggcggtgggcgggcggctggtcatcggcgtacccgtcccggacaaactgctgccccaactgctcgatgaactcgtcgaggagtacggcggacgcagcaactggcagcgtggcctggtggaggatcgggacgccttgctcgccgccgttctcgacctgctggtccgcatgcgcctgatggcgcccgccggaccggtgcgtgccgacggccacgatctgcccgagggatatgaggacgcggcgctggacggccggtccgtcacggacgtctcgggtgcgcgtagccggcacggtacaggtggctgggtgctgcccgccgcggccgcccgcttcgccaccaccgtggccgtcgcctcccgtacccaaccgccctcggtgaacgacacctcccagcagccccaggagccgacccggtga

SEQ ID NO: 51547 - DNA, 4188 bp, Streptomyces ciscaucasicus
gtgaaccgctccccttcgccgcaccgttaccgcctgcaccgcgccggcatccgcaacgtctggcagtacgacgagcaggagttctccttcggcgacggtcgcctgctgctgcgcggcaagaacggcgcgggcaagtccaaggcgctggaaatgctgctgccctacctcctcgacggggacgcccgagctctggacgccaccggcaccggccggaccacgctcttgtggctgatgctcgacggcttcgagcagaccaaccggctgggctatctgtgggtggagttcgcgcgcacggacgaggaagacagcgagcagcacctcaccctcggcgtggccatccgtgcctcccagtcgacccggacggccaagccgttcttcttcgtcaccccgctacgggtgggacacgacctggacctggcccccgccggtcagcccctgcccgtcgaccggctcaagtcgctcgtcggcccagagaacgtcaccgaccgtgccgtggaacaccgggccagggccgcccgccgtttgttcggcctcggcgacccggcccgctaccgcaacctgctccacctgctgcaccggctgcgccgccccaccatcggcgaccgcatcgactccggtggcctggtgtccgtcctcgcggagacgcttcccgcgctcgacgacgaggtcgtggagaaggtggcccggggcctcgacgacctggacgccgtacggaccgacctgggacgcctggagcggaccgacgaggcgctgcggaccttcctgaccggttaccgcagctacctgcacggcgctttgcgccgccgggccgaagacgtgcatgacgaactggaacggctggcggagtaccggcgttcggccggcgaggcggtgaagaatgcggcgcggctccgcgcccacgaggaggaactcgcagcccgcctcgacgccctcaaggcggaggaggaggcagccgagacggacctggccgccctgtatgccagcgccgcctatcgcagcctgcgcgaactcggcgacaaacgagccacggtgaccgctctgcacagtgccgcggcgaccgccttcaaagccctgcgccaggcccacggcagccaggaggagacaggacggcggctgaccgaggaagccgacaggctcggcgccgacctgatcgacctcagcacggcacacggcgagatgctgcgcgaggccgagcgcgccgggctcgaccccgcccacctgggcgagcccgcgcaggcaaccgccatcccggtcacgcaggcggcgtcagcccaactgacctccccagaaggggacttgcacctcgtgcggcacagcgaagtgctcgccgtcgacacgcgggcctgcgccgaggcactgcacacctgggcggcccaactgggcgccgccggaccggtgatcaggaaccgcacccggaccgtgaccgaactgaccgcactcatccacacgacacaccgggcccaacgggaggcgcaggaggccgatgccgcccgggaacgactggaggaacaggcggacgacgcacgtgagcgggccgggcgccgacgggcggagacggcacgcgcaggggtggcctacgcggacgctgtacggacctggaccgaacggctgcacagtctcaccggcgtggccctcgacgccgtagacgccctgatggcccacgacccggcggagggcccgttgcccgcccatgcccccgacgaggtcgccgacaccgcccggtcggtcgtcgagccatggctggcggaactggccgagcagcgtgacgcgcgggccgtggcgatccgcgaagtgaccgccgaacgcgaccgcctgcggaaccagcgcgacgactgggaggcccgcaccgaccccgagcccacgcctccgccccaccgatcggcacctcgcacacccggcaccggcgcacccctgtaccggctcgtggacttcgccgacggtctggagccgacggaccgggcgaacctggaggcaggcctcgaagcgagcgggctgctcgacgcctgggtgtgcgccgacggcaccgtcctggacccggccacccgggacatcctcctcgcccctggcgctccacccgccggacccacgctcaccgaagtgctacgtccagtcgtggcgacggacagcggggtgacggcaggacaggtcgagcgcgtgctccgcgcggtggcgctggtcacggacgcgaccgcggccgggactgccgaatccgcgctcggcacggacggcttctggaaactcggcgtcgcccggggccgtcacaccaagcagaccgccgagtacgtcggcgcggaggtgcgcgccgagacccgccgccgggcactggccgaacttgacctccaactcgcagataaagaccaggagttggatgatcagcaacggcggctgcaaaccctcacggcacaccgcacgcaagtggccgacaccctgagccaccctcccacaggccgcacgctgaccgacgcatgggcacgcaccaccgaggccgagcgcgcagcacaggtcctagccggcaaggcctccacggccgcccgccaggccgagcaggcacgtgcccgcgcggtcgccgcccggcgcgaggccgaggcgaccgcgggcgcgcacgacctccccgtcgacccgacggccctcgactccgtacgcctgtgcctggaccgtcttgccacaggcaccgagcggctacgcgggcgactgcgcgcggtggactcctccgccgacgcccaccgccaggaccgcgaaggctatgagcgcgccctgacgtccacccgggaagcggagtccgactatgccggaccgctcacccgcctggaggccgcccgtcgcacgatccggggcctggaggaagcactggacgcgccggaacaagagatcctcgcccgcgaggacgcggcgaagcggcgcctggacgcggtgggacgtcaacttcccggagcagagcgggacgtgaacgccgtacacgacgaacgcgtgcgcgcggaggaggacgagcgggtacggcgggaggcgctggcccagcaggagagcgtggcggtccaaagcggcgggcgactgcgtgcggcactggcactgccaggcgtgaccagaggcgcgggcctcgacatgccggtgaccgacacggccgaagcgacctccgcggtggactccgacgaacaaatcgaggtacacgaccgcgccaaagccctgcgccgactcgtgacggccgtacgagaacgcctggacgccgagcgacgcgacctctccgacaccgcccttctcaaccgccacaccgacctgcgcgaccagctctccggagggtacgacgccacgctggaggagcacgacggcatcaaggtctgccgtctcgtcgacgaccacggaccgcaggacatcgccacagtcggcgagcgcatcgccgcccaggcggccgaggcgtgtgaacggctgacggaacgcgagcgggaggtcttccagcggttcctgaccggcgaactcggcgaccacctctcctcccaggtgctggccgcaggcgccctggtggccgccctgaacggcaccctgtccacggtccgcacgtcacacggcctgggcgtcacactcgactggaagctggccgacggagtggaagccgacgtcaaagcggcggtcgacctcctccgcagcccgtccggcatgcgcacccgcgaccagtccgagcagctgcgcgacgtgctccagcgccgtatcgaggacgcccgccgcgcagacccgggcgcgggctacgcggcccatctgcgcaccgccctcgactaccgcgactggttcaccttcacgccctgggtggtcaacgacgccgcccccaccagccgccgcaagctgtccggccgcacaggcctgagccagggcgagcagcgcgtgctgtcctacctggtcctgttcgccgccgcagcagcccacttcaccagtctcgccgacacggccccgcacgcaccccggctgatcctgctcgacgacgccttcgccaaggtcgacgaacccacccacgcccgcctcggccgcatcctggtcgacctggacctggacttcgtcctcaccagcgaacgcctgatcggcaactggcccgacgtgccttccctgcacatctacgagtgcctgcgcgacccgcacgtcagaggagtggcgaccctccactacacctggaacggacggcagcgtcggctggtgtcggtatga

SEQ ID NO: 51548 - DNA, 1299 bp, Streptomyces ciscaucasicus
atgacggaccctcgtgcgcgggacgcgaaacccctgaacgccgagacgcttgcctttctgacccggcccggcctcgcccgcctctggacggccgcccgaacccgtctggaacgcaacggcctgcaaccgaacggcacgatcaggcttcagcgtctcaccgcacaggaacgcgaggacctctccctgctccttgcgaaaccactctccacggaagccgcctcgatccgtctttcggacctggacgcccgcctgcgcacaagcgcggtcggccgcggcctggcgcagacgctggcggcactgggccccgccctcaccgaccgcagagcggcccgggacgcggcgacggcgcaacgcgccggcctgtggtccggggcggaggcggctctcgtcagaacaccattggcctcccaaccctgggcgttcggctggctggaggagacacgccgtgccggtacggtcgcccgccaggacccgcacaccgccgccacgatcctcgaccaggcgatccgagccctggccacactctttcccggcccggacgcacagcccacccctgctgtctggggccgcggcgaactggccacccgtaccaccggctcggcccatggcctggacgacggcactctgctgtcccgcctggtcctgcgcggcatcgccctcgcatgtcgcgcagacttccccgccgacgctccgggccgccgggccctgtggcgtctcgcctcggtcactcccgacgaggtgtccagcacggtgctcacgtatggattgcgcccgatcggcgcgacctggggcgagagaaccctgagagaacgtgcggaccactgcatggagacccacctcacgctgcgtgaactgcgcgctctgcaaatggagttgccgtaccgcacccgaatccacgtctgtgagaatccacgagtcgtcgaggccgccgccgacgccggttgcagcgaaccgctgatctgcacctcgggcagcgcgacgacagtcgtcctcaccctgctcgacgcactggccgccgccggatgcgccttcgtctaccacggcgatttcgactggccggggatcacgctcgccaaccgtgtcgtggagcggtacggcgcggagccatggcgtatggggacagaggactacgagtacctcgcgacccgagcccaggcccacggcacgccgcagctactgctcagcggaccgtgtgcggaggcggtgtgggacgcggaactggccccgaccatggaggcattgggaatcgccctgcacgaggaggcggcactcgacctgcttttggaggatctcggctga

SEQ ID NO: 51549 - DNA, 1590 bp, Streptomyces avermitilis
atggaggggaacgaagggaagccggtacgcggtgcggaagccgatgccgaggcctggcagcggctgagtgcgtactcctacctcagcgcgcccgagcgcctggagtacgtcgcggtgatgcgggtgttctgcggcacgctgctcgcggacctgtccgtacccgacctcctcgcgaagctggccgagaagggcgggccgggagcagcgctggacgcggagacgctcacccgcaggctcgaagagctcgtgcgctggggcaatctgctgcgtagcacgcacacggtcagggcgacgagcatcgccgaatatcagcgctcgcggtcccgctaccagctgtcgaagctgggggagcgcgtacagcgcgacgcggacgaggtactggccggggccgacgcggcacgcgaggtgagcagcgagctgctggccctcgtcgaccgcggcctgcgggagatcgccgccatggccgcggcaccgggcggtgccgatccgcagcaggccctggagcggatcagcacgctcttcgtgcagttcgccgaattcgccgagtccgtccgggacttctacgcctacctgggccaggtgctggcgcgctacgacctcgactcggccgagtaccaggggttcaaggaactgctgctcgactacgtggaggccatcaccgaggacgtctccttccgggccccgcgcatcgcggcccacctggacgccgtccggccgcacctgcccgcgctgctcgaccgtgtcgacgcacatgcggcgggcatcggagcgctcgcccacgggctgaccgagacgcgggtgcagcgcagccgcgggcgggacctcgcggactgggagggtctgcgcgactggttcaccgacaccggagggcacggaagccaggtcgaccagctcagggacgccaccctccgcgcactggagtcgctgctcgccaacgccaagcggatgctgcgttcggcctccggtgagatgtcccgccgcaaggacctgctgcggctcgcggcctggttcgacgccgcggagccggaagaggcccacgacctggcggtcgccgccttcgggctgtacggcgcgcgtcatctcggtgtggcgccggaccccgaccggtccgtgccggcgtacgtgagttggtggaccggacccgtggtggacgtgccggtggcgctgcgcgagcgcggcagcagggctccgcgcgggcgtgccgcggcggccgaggaccattccgagcagaaacgccgcctcatggagcgggcgcggcagcaggccgaggcccgacaggccgcggccgacgaactgcgcagcgcctcgggcaggttcgagcaggtgcgcctcagcgccccggccatgcgactgctgctggagctcctcacgaccgcactcggcaacgcccagctgcacaaggacgcccacgacttcctgctcgacggcgcgcaggcgcacgacgcggacctcgacatccggctgaccgcctggcgcacgcccggcaggtccacggtcctgcggtccgtggacggcgacctgacggcggacgatctcaccgtggccgtcgagagcgcgtccgcgcccgcggtgggggaggcgagcgcctga

SEQ ID NO: 51550 - DNA, 1338 bp, Streptomyces avermitilis; identical to SEQ ID NO: 49772

SEQ ID NO: 51551 - DNA, 4200 bp, Streptomyces avermitilis; identical to SEQ ID NO: 49773

SEQ ID NO: 51552 - DNA, 1338 bp, Streptomyces avermitilis; identical to SEQ ID NO: 49774

SEQ ID NO: 51553 - DNA, 1578 bp, Streptomyces griseoruber
atgacatcccagacctcggcaccctctgagccggcagagccccccgccccacctcccgtcgactacacccctttcacccacctcaccgtccccaacgcccccctctaccgccaggtgacgcgcgcgttcctcgtcgccaaagagcggttcgcggtgcatctgcggccggaggacgtgcacgccgccctggatgcggacacgcggccggccgacatcgaagccgtggtcaaggcactggacagcctggtcgcctgggggaatctgcgggccgatccggaccacgcccgcgtgacagccgtcgaggacttctaccgcagacggttcatctaccagctcacgcgggccggagaggcggcggaggcggcgctcgggacgtacgacgaggcgctgggacggcgcggggagctccaggccgtcgcgctgcatgacatcgtcacgcagctgcgggctctgctggtgatcgtggcggaggacgagccggatccggcgaaggcgtacgtcgccctgtccgtgctgaccgcgcgcttcaccgacctcgcggacaacgcccgcgccttcatgggatcgctgcagcgcaccatcgacctgcacgacatcgaggtcgaggcgttcctcgcgtacaaggaccggctgatccagtatctggagcgcttcatccaggacctgatcaccgtcggcgggcggatcgccctgctcataggggagttggagcaacaggggcgggtgggaccgctgctgcggctcgccgccgtacgagaagccgccgacgcctcgcccgaggacgccgagcacgcggaggcggtggcgtacgagaggtgggccggacggtggtccgggctcgcgcagtggttcgtgtcgggggaggggcgggagtcgcaggcccggctgctgcgggggcgggccctcggggcgattccgcagctgctggccgtcgtacggcagttgaacgagcggcgggccgggcgctccgaccgctccgccgacttccgcacgctggcgcgctggttcgccgaggcgcccgatgacgaggcgcggcaccggctgtggcgggtggcgttcgggctgtactcctcccggcatctcaccgtcgacggggacaccctcaccgagcggacggccgcgcccgagccggcctcgactccgtggggccggtcgcgtccgctgcggatcagtcctcagctgcgccgtaccggcagctatgaacggcggggcaagccgcgccgggtggccgaccggggcgaggcgaggcgcaggctcgccgagatcgccgcccggcaggcgggggaggtcaaggaggcgcgcgagcggctcgcgacgggtggcccggtgcggctgtcccggctgggcgaactcgacccgatcgctttccagttgtttctgcgcctgctcggcgatgccctcgcgacctggcggccgggtatgaccactaccgcggcgaccagcggggacggctcgatggaggtccggctgaccgcgctcgacgacggttcgatggccgaagtgcgcacgccggacggggtgttccgggggcccgaccatctgatcgacatcgtggacctgacggcggagatccggtga

SEQ ID NO: 51554 - DNA, 1200 bp, Streptomyces griseoruber
gtgaccggccctctgaccgagattctcgacggccagcgcgaggccgatctccagcgggccgcgcgagccctgctgaaggagccgctgctcaccgccgacgggccgtacgccgacgagttccggctggtgcgccggcacgccgccgcgctgcgcgagtggttcgagcgcaacgtcggctggacgctgcgcacggacgccgacgccgcacggctgcgcaagaccccgggcaccctggccgacgtcacgcaccccgcccgcgaggccgcccggaccgccctgccgttcaaccgccgccgttacgttctgctctgcctggcgctggccgcgctggagcggggcgaggcacaggtggcactcggccggctcgccgagcaggtggtgctggccgcggccgatcccggactcgtcgccgccggaatcacgttcaccctggaacggcgtgacgagcgcgtcgacctcgcagccgtcgtacgactcctgctgcggctgggcgtcctgcggcgggtggcaggcgacgaggaggcgtacgtcagcgggtcgggggacgtgctgtacgacgtacggcggcgcgtgctggccgggatgccggccaccctgcgcggcccctccctcgtcgaggccggggacttcgaggaacgcctggtggagatgacggcgcagaccgcgctcgacagcgacgagctgaggttccgcgcgatccgctggaagctgacccgcctcctcctcgacgacccggtgctctactacgacgacctggccgacgacgaactggcctacctcacccggcagcgcggcttcatcaccgcgcggatcagcgagctgaccgggctggtggccgaggtgcgcgccgaaggcatcgccatggtcgacccgctggacgacctcaccgacgtacgcatgcccgagcagggtacgcacggccatgtcaccctgctgctcgcgcagcatctggcgcgtgccgcccgacccgtcacggcggcggagctggcgctgcgcgtgcgtgaactcgccgtggagcacggcggtttctggtccaggtcggccagggaaccgggagccgagcccgcactggtggaacaggccctggcgaagctggaggccctgggactcgccgagcgcaccgaacggggtgtcgtgccgcgaccggctctcgcgcggtacgccgtcggtgaacccgtcctcaaggaatcaggaaggtga

SEQ ID NO: 51555 - DNA, 4173 bp, Streptomyces griseoruber
gtgaccgcgctcccggctcccgtgcttccccgccccgcccccggccggtggcggcccctgcgcatcgggctcgtcgacctgttccactacgacatcgaggagttctggttccgcgacggccgcctgctgctgcgcggcaacaacggcaccggcaagtccaaggtgctcgccctcaccctgccgttcctgctggacggggacctctccgcccgccgtgtcgagcccgacggcgacccgggcaagcggatggagtggaatctgctgctcggtggcgaacacccgcatcccgaacggctcggctacacctggatcgagttcggacggctcgacgagaccaccggcgagccgtacttccgtacgctgctctgcgggctgaaggccgtcaccggccgcggcatcgcccgccactggttcgccgtcaccgaccagcggatcggcgcgggactggacctgctcgacgccaccggcaccgccctgtcccgggaccggctcgccgaggccgtcggcagccacggcatggtgtacgacaccgccaggacctaccgccgagcggtcgacgaggctctgttcgggctgggggagcggcgctacggggcgcttgtcgacctcctgatccagctgcgccagccccagctgtccaagcgccccaacgaggccgccctgtcccgggcgttgacggaggcactgccgccgatggaccaggcggtcgtcgccgacgcggcggaggcgttcaggtcgctggacgaggagaaggaggagctgcgggcggcgcgcgaggccgaacaggcgtcgtcgggattcctcgaccactaccggcgctacgcccgcgtcgcctcccgtcgccgggcccggctgccccgcacggaacacgcccgctacgaacacatccagcgggaactcctcaaggcacagggcgaccgcgaacaggccgtgacggaccgcgcggaggcccaggagagggcgacggcgctcgacgagcgggccgcgcggctggccgctgaggacgcggctctgagaaccgggcccgagatgcgtgacgcccgcgcactcgaccaggcggcggtcgacgcctctcgtacggcagccgagctgacgcggtccgaggcggatcggcagacagcttcgggggcccatacccgggccctgggacggctcaccaccgcgacgaaccgcctgaccgccgcgcaggagaccctggacgaccttcagggccgcgtggcggagagcgccgaggccgcccggctccacgccccccggaccgagggagcccccgccgctgtcctgcgccgcgcggcggacgaggcgacggcgggcagacggcgcgccgtcgagcacgtggaggcactcgccacgcgggccgagcgggccgaggagaaacgcggggccgcccggctgcgtgccgacgaggccgacgaggaggccgtgcacagcggggtacggctggccgaggccgaggagggagcggcgggggcggggcatgcactggtcgcggcagtcagagatcgtctcacccggtgcgtggagttgcgggtgaccgggctgccggggatcctcgacgcgctgcagggctgggtgagcagcctggacggtccgcacccggcaagggcggccgcgaccgcggcccacagcgccctcgcctctcacctggccgaccaggccgccgccctcgcccaccgcgaggcggcgacggcggaacggcagcggctggtggagcaggaactggccgctctggaaacgggcggccagcgaggcccgtcggccccgtacacccgcacgtccgatgtgcgggcccgcggcctcggggcaccgctgtggcggctcgtcgacttccgcccgcagctcaccgaggccgaacgcgccggactggaggccgcgctggaggcgtcggggctgctcgacgcctgggtgcggccggacggtaccgcggtcgcggccgacgggcacgatgtgctgctcgaccccttggacccgccggcccctcggtctgggggcggtctcgaccgtgcgctgtgtccggcggtcaaccacgcggacgtgggggccgccgccgtgggggaacagacggtccagcgcctgctcacctcgatcgggctggccgggaagaacgacgacgcgccgacggaggacgccccggggaccggcggccaccgcacatgggtctccatggacggacgcttccggatcggcgcactgaccggaagctgggccaaggacagcgcccagtacgtgggtgaaggggcgcgggaacaggctcgccgcgcccggatcggcgaactgcggatcgagcgggaggcgtgggaaaccgagcgggagcagctggccgaggcgctgcgcgcggtggccgggcgccgtggcgtgctcgacgccgagctcgcggccgtaccgggtgacgacgacctgcgccacgcccacgcccgggtcacagccgcggccgacgcgatgcagcgggccctcacccggcagcgggagcgggccgccgaactggacagggcgtcggacgacgccgaccgggccgcggccgaactcggcgagacggccgccgccatgaacctccccaccgaccgggaggaactgggcaaggtgcggcaggcgctcgccgatcacaccgcccacctcgcggcactgtggcccgccctgcgcgagcgcgcggacgccgggcacgcggttgccggggagcaggccgagacgggccgggccgaactcctggtctccgcactcgcggagcgcgcgaccgaggcggcccggctcgccgcagccgcggaccagcacctgcggacgctccgctccaccgtcggagcggccgtcgccgaactccagcggcaacttgaggagacggcggccgccgcacgtgtctgccagaccgagcaacagcgtgcccaggcggacatccgcgacgccgaccggcgcgccggacacgccgaggggcgcatcgagcggctcgccgaggacgtcacggacgccaccgccgcgcgggagggtgccatcgcggcgctccagcggttcgtcgccaccgggctgctcgccgtcgccctccccgacatcgccgtaccggacgacgacagcggtgcatgggcggcgactcccgccgtgagcctcgcccgtgtcatcgaggcccggctctcggccaccgacgattcggacgcggcctgggaacgcgttcagaagcgggtgagcgaggagctcggccggctgcaggacgcgctgtcccggcacggccacaccgccacggcccggccgagcgaggacggcatgcgggtcgacatcgtctaccagggccgggagcgggccgttcccgaactcgccgaggcgctggccaccgaagtcgccgaactgacgcgcatcctgtcggcgcacgagcgggagatcctggagacgcatctgatcaccgaggtcgccgggaccctccaggagctgatcggcgccgccgaacgccaggtacaggccatgaacagggaactggaggagcgtccgacctcgacggggatgaaactccgcctggtctggcgggcctcccgccgggcgccacaggggctggccccggcccgtgagcggttgcgccagtccgccgacgcctggtcgccgcaggacagggccgcggtcggggcgttcctccaggagcagatcgcgcgccgtcaggccgacgacagtgcgggcagctggctggaggacctcaccgccgccctggactaccgggcctggcacgagttcggcgtcgaacgacaccagcacggcaagtgggtaccggccaccggacccgcatcgggcggcgagcgcgtcctggcggcgtccgtgcccctcttcgctgccgcgtcctcccactacgcgagcgcgagcggggcacacgcaccgcgtctggtcaccctggacgaggcgttcgccggagtggacgacgactcccgtgccaagtgcctcggtctgctgcgcgccttcgacctcgacgtcgtcatgaccagcgaacgggaatgggcctgctacccccaggtgcccggcatcgcgatcgcgcagctcgcccgcgtcgacgacatcgacgccgttctcgtgacccggtgggagtgggacggcagcgaccggcggcgcggccccgaacccggctcgaccgcgttcgcgagggtgcctgcccagagtgctgccgcacgggacgctccgggagaacaggagtccctgtggacatga

SEQ ID NO: 51556 - DNA, 1554 bp, Streptomyces resistomycificus; identical to SEQ ID NO: 51276

SEQ ID NO: 51557 - DNA, 1287 bp, Streptomyces resistomycificus; identical to SEQ ID NO: 51277

SEQ ID NO: 51558 - DNA, 4149 bp, Streptomyces resistomycificus; identical to SEQ ID NO: 51278

SEQ ID NO: 51559 - DNA, 1263 bp, Streptomyces resistomycificus; identical to SEQ ID NO: 51279

SEQ ID NO: 51560 - DNA, 1512 bp, Streptomyces sp. RV15
gtggaccctgtcgacgatgccgcgttcggtatcgacgcgttctccctcgacgaccggctgcggctgttccacttcgccgccgccgagaagcggcacgagtacctgtggctgctgcgggccttcgaccgcggacgcgccaactaccaggtactgctgcacgcctcggacgcggtgggactgctggagcggctcgccgccgaccatcccgccgcgggcgttgtcggcgggtcggccggtgtgcagccgttgctcgacgcgctcgcggagtggcaggtcctggaccggtcgtacgacgggacgcgcgccgcgaacctcgccgagtaccgcaaccggcactacgtgtaccagttcacccaggccggataccgggcgtaccgggccgtggaggatgtgctcggggcgagtctggaggacgcccagctctcgcgtctcgtcttcccggacattctcggcgacctgcacgcgctggccgaggcgaacaccgcgggcgacggggaagaggtgtaccgcaagctcggccggctcgactcggtgctgaacgagatggcgcagcgcgccgcccgtttctacctcatgctgggcgacctggcgcgcaccaacgacacccggcccgaggtgttcctcgcccacaaggacaccctcctcgcgcacatgcgggagttcaccgccgaactcgggcgctacgcaccgctgttggccgaggcggtcgagaaggccgcggccaccggcgtggaccgcatgatcgagtacgcggccgaggccgacgagcggctcttccgcagccccgccgagcgcctggcggactggcggcaccggtgggacggcatcgtccactggttcgcggagcgcgagcacagcgagaccgagcggctgcaggacgccaccgtcaccgcgatccgctccgtcctcgccctgctgcgccgggtcaccgaggcccgccggggcggggtgagccgggagagtcaactgcgccatctcgcccagtggttcacctcctgcgagagcgacgaggacgcgcacgccctgttccaggcggtcttcgggctcggcgcgccccgccacatcgccgtcccgtacgccgaccccgagcggatcccgtcccgtacgtcctggtgggaggccgagccggtcgaactcgcccgcaccctcgtccagtccggccgcaccccagccctgcacggccccggccgcatcgaacgcgacgacgaccggcgggccctgctgcgcgccgggcagatcaaggagcaggccgagcgccgcggtgccgcgaactccctcgcgtcggacggcgtgtacggccggacgctcgacgagccggagacgcgggccctgctcgccctgctggacgtgacgctcgccgcccgtgtccccgccagccgccgtgtcaccgccgcctccggctccgcccacggggtacgactcaccctcacccccgccgagggcttcaccaccgtcgacaccgtgcgcggccgtctccatctcgacgggctgcgcctggaggtcaccccatga

SEQ ID NO: 51561 - DNA, 1425 bp, Streptomyces sp. RV15
atgagccgtgttgccgagggcgtctccccgctcgaactcgccgactaccagaaggcggtacggctcgtactgcggcaccccctggtcacgtccgggtacccggacagggcggcgctggcgaccgtgcgccgctgggccgatcagctgcgcaccgacctgatggaggtgctcggctaccggctcgtcacgaccgccgacaccgcccgcctccagcgcgcccaggacggtctggacgccacccgcccggccctcacccgagcgggccgccccttcgaccgccgccgctacgcctacctcgtcctcactctcgcggccctcggccgccacggcgcgcaggtggcgctgggagaactggccgacgcggtcgccgccgacgccgtgcgcatcgacgggctcggcctcgacaccgcccgcaaacccgaccgtgacgccttcgtcgacgccgtcacctggctcaccgaacgcggcgcgctcaccctcgccgacggttccgccaccgcctgggcaggcgatcccgagcgcgccgaggccctgtacgacatcgaccgcgagatcctcctcgccgtccaccacccgacccgcgtcctgcagcacctgacctccgtcaccgcgctgctggactcctccggcgcgctgggcctgtcagcaggccgagccgctcagcgccgcgaccaggcccgccgcgcccgccgactggtgctggagaacccggtcgcctactacgccgacgccgacaccgaactcctgggccagttgcgggcccccgcactcgccgaggacctggagcggctgaccgggctgtcggtggagcggcgggcggagggcgtggcgctcatcgacacctccggcaggctgtccgacgtccgtttccccggcggcggtacggtcgcgcaggccgcgctgttgctcgccgcccggatcagcgccgccgtgcagcgttccggacgacacgccctcgaactgctgcccgcacccacggccgccgaacgcctcgcggcccgcgcccggcggatcgacggcgcgctgccgtcgcgtgggacggtcgccgaactcaccgaactcgccgagcccgatgaggagtcggcgtacgagaccgtcgtcgacgcggatcacgagccgggcgagacccggtaccccttcgtcacggactcatggctccggggcaggctcaaggagatcatcggcgagtacggcgcgggcttcgccgccgatctgcgcggcgacccggaccggctgctcggccaggctctcgacctgctggccgccatgtcgctgatcgtccgggtcgacggcggggccctcgcgctgcctctgcttgcccgttaccgaggggtcaccgcccgggtgaagacccgtacggccccccaaccacccgcccagaccgccctgttcgacgacgaaaccgccaaggacccgactccgtga

SEQ ID NO: 51562 - DNA, 4098 bp, Streptomyces sp. RV15
gtgagcactcccgctcccacaccggcagcccgctacgtccccacccgtgccgggatcatcaacctgtgggactaccgggacgaggagttctccttcgcgggcggctggctggtgctgcgcggtcccaacgggtccggcaagaccaaggcgctggaggtgctgttcccgttcgtcctcgacgggcgcatcgaccccaagcggctcaacccgttcgccgccgaggaccgcacgatgaagtccaacctgctcttccgcgggcaggacagcgcgctcggctacgtctggatcgagttcacccaccgggagaccggcgaggccgtcacctgcggcatcgggctgcacgcccagcggcaccgcgacacacccgcccggtggcacttcgtcgccgagggccgcgtgggcgaggacttctccctcctcaccgacgacgaccggccgatgacgaggaagcagctcgccgccgaactcggacgcgagctgatcgcctccacggccgactaccgcgccgccgtcgaccagcgcctgttcggcctcggccgggagcggtacgagcaactgctcaccctgatccttacgttgcgccgcccgcagctggccaagaacctcgatcccgccaagctctccgacaccctcaccgcgggcctgcgcccgctcgacgacgacctgatcgccgaggcggcccgctccttcgacgacatggagtccgtgcagcgcaccctggaggggctggccgccgccgacgacgccacccgcgccttcctcgcgagctactccacctatctgcgggtccacgcccgcaccgccgcggaccggctcaccgcccgccgcgatgagaccgccgagcgcgccgcagccctgcgcgccgccgccgcggacctggcggcggcccgcgaggcgcaggccgccgccgagacacgcgccgagtcggccgacgcctcgctcgccgcccagcgcgcccgcctggaccagctgcgctcctccgccgcctaccaggccgtcgagcaactggccgacctggaacgcctggtgcgtacctgcgagcagaccgcccggcaggcgaccgccgagcgtgagcgccgtacggcagccaccggccgcgcccgcgccgaggccgaacacgccgcccggatcgccgccgaactcgacgccgccgtctcccgcgatgccgccaccgtcgccgaccacgcccacaccgccggactcccctggaccccggccgacgccgagcccgcccggctcgccgaccgctccgccgcgctcgccgccgcccgacacgagggcgtccgggccgtgcgcgccgcccagcaggcggcacgcggcgccgagcagacccgtgacctcgcccggggctcgctcgaccgtgcgcaggaggccgtcgccgcggccgagaccgccgaaaccgctgccgaggcggccctcgaatccgcccgcgaagaggcccgcacagtgctcggccggtggacggaagcacacggcacgctcctggccgaggagggtgcccgccggctcgccgaagccctcgaactcaccggcgaggccgacgcggtcacgctcgccgacgccttcaccgatgccaccgctcccgccgtacaggaactgcgcgacaccctcgccgccctgcgcgcccagcgcacggacgtcgagcgccgccgcgccgaggcggaggccgaacgcgaccggatcgccgccgagcacgacgacgccccacccccggcccgaggccgaacctccgacagggcgtccggtgacggtgtgccgctgtggcaactcgtcgatttcggcagcgatctgacggatcatcagcgagcggacctggaagcggccatggaggcgtccggtcttctcgacgccctcgtcaccgccgaggacacccccgtggcggccggccacagcgagggctacctccgggccggtgccccggtgggcggaccgagcctcgcggacctcctgaagcccgaggcgcccgaggacctcgacggcgacgccgcgatcccggccgcccgcgtcaccgccgtactgcgctccgtcgccgtcaccggtgacctcggcaccgggaccccgcagatcggcccggacggccggtacgcggccggtgtcctggtcggtgcccacaccaaggagcacgccgagtacgtcggcgccaccgcccgcgcccgccggcgcgccgcccggatcgccgcctgcgaggcgctgctggccgaactggccgccgaactcgacgagttggggcgcgtgcaggcccgtacggacgccgccctcgacgcgtacgccgccgcccgcgccgcgctgccccgcaccaccggcatcacgcaggccctgcgcgaactcgaccgggccgccgcgcggctgcgcgccacccgtgacgccgccgacgccgcccaggcctcgtacgacgagagcgtggccgcctgttcggtcgccgagcgcgccctgcgccgtaccgcggccgagcacggcatcgagaccgagcgtgtcgacgccgtggagaccgccacccgcgccttcgaggcggcggtccgcgaactcaccgcccgccgccgcgaacacgcccgccagaccgaggccgcccaggcgggcgccgaccggctcaccgccgccgccgaggacgaggaggcggcggcggacaccgagcgcgcggcgcgccgccggcacgccgaggaggccgcggggctggaggccctccaagcggccgtcggggccgaggcccaggaggtgatgcgccaggtgcaggaggccgaggacgggatcgacgccctggcccgggaggccgaggcggcccgcacggcccagcacgccgcgatcgcgggcaccgcctcggccgaggcccgccgtacggccgccgccgaggccggggcggtcgccgcggcggaggagaaggacaccgcccgcggcctgcgcccgtacgccgcccgcgaactcctcgacatcctgcgctgcccgcccggcctcgcctggcccgcccaggaggccgactgggccggcgaggcactcccgccggccgtggtcgccgtacacgaggcgatcctggccgcgacccgcgacctcacccccaccgagaccagcctcaagcagtccgtcacccgtctcaccaaggccctggacgacctgcaggcgcaactcgccgccgccggacaggactaccggcccgaatgggacggctccgacgggatcatcgtcgtacgcgtggccgacgaggagggtccgctgcccgtcgccgccttcgcccagaagatctcctcccaccgccgtgaccaggccgaactgctctccgagtccgagcagcgcatcctggaggacgccctgctcacccggctcgcccagcagatccacgaccgcaccgtcgacgcccgcgacctgatcaggcggatgaactccgacatgcgccggcgcaccatgtcctcggggacgacggtcggggtgagctggctgctcgccgaccacctcgacgacgaacagcgtgccgtctgcgccctcctcgacgccgacgccgcccgcctcggccccgacgggctcacccgggtgcgcacccactttgccgcgcagatcaagaccgcccgcgcccgccaccgcgaccagccctaccgcgaactgctcgccgaggtcctcgactaccggcgctggcggcagttcgcgttccagctcgtacgccccgacaagagcgaggagaggctcacccgcgcccggcacagccggctgtcgggcggtgagcagtccgtgtcactgcacctgccgctgttcgccgccgcgcacgccatgctcaactccgccgaccctcacgcgccccgcctgctcgccctcgacgaggccttcgcgggcgtggacgacaccgggcgcggcgaactcatgtcgctggccgcgcagttcgacctcgacctgttcatgaccggctacgacctgtgggccgcccacgcctccgtgtccgccgccgcccactacgacctcgcgcacaccgccgtcgaccacacggtctccgccctgctcctcgtctgggacggcgaccggctcctcgccgacgacaccggggacctcaccgccgccctcggctcgccgggcacccggcgcgtcccgacgcccgaggaggccgcggttgtcgactga

SEQ ID NO: 51563 - DNA, 1293 bp, Streptomyces sp. RV15
ttgtcgactgaggagcgtgaaggccacgggtacgacgagttgcgggacgaaggatgggggcggctgctcgccgccgcccgccgcaggctggagcgcaccggaggcgcgctcgacggcgacatcgggctcacgaggcccagcgaggccgagcgccgtaccgtcatcgggatcaccggccgctaccggcccgagaccgccaagcgcctcgctgtacccctgagtgatctggacgggtatctgtacggccgctacggcaccggtctcctccagaccctcggccgtctccacgggccgctgcgtgaccggcccgccgaacgggccgaagaggaagcacgccgcgacgacgccctgaagtcggcccactccagtcggctcgccgggcagggatggttcgccgcctggctggagcggatcgccgccgacggcacgctcacccgtctcgtacgccggggagacgcgccgctcctcgacgcggcggtacgtgtcctggaaaggctgaccggtgacggggaccgctccgcgggctccccgaagcgggtccccggcgtcctgccgctcccggtcctcgccgagtgggccaccggcgacaccaaggccctcgtgcccggcgccccgctggagcagctcgtcctgcgggccctcgcccagcgcaccggcggcggctcggaggtaccgcctgaccgggccgggcggcgcgctctgtgggagagctccggcgccatcgcggacgacctcgccagccaggtcctcgtcctcaacatcggcgccaggggcgacaccgtcgtctgcgactggctgcgtgacgccgccggcttcggcatccccttccggctcaccctccaccagctcgccaccgaccccgtcgtccccgccgcccgcaccatcttcgtctgcgagaacccggccgtcctgcgcgccgcggccggcgaactgcggtccgccagccgcgtcgccgccctggtctgcaccgagggcgtcccgtccgccgcctgccacaaactgctcggcgacgccgtacgcgcgggagcccggctgcactggcgcgccgacttcgactgggccggcctgcggatcaccgcgaacgccatggcccgacacggcgcccgaccctggcggatgaccgccgccgactacacggcggcactcggcaagggcgggtccacaccgctcgcgggaccgcccgcggccagcccctgggaccccggactggccctcgcgatggaggcatcgggcagcacggtcatggaggaacgcctcctgcccgcactcctgtccgacctcactcgtgcctga

SEQ ID NO: 51564 - DNA, 1476 bp, Clostridium sp. C105KSO14
atggaatattttgaaccaattaatgagacatcttatttatccgttcccaatgcaccggtataccgtaaaattatgcggtgtttttaccgtgaatatgagaagatgcatttccagatatacaaagaagatattttccagctgcttaaacaggatgagacgtttacgggatataccatggaacagttgatgacagatctggaagctttagtcaagtggaaaaatcttactccgatccaggaccctggaagggtttataccatagcggattacaagaataagcagtatcgctataccatgtcagagtatgcggttgagattgaacgtctcactgtgcgtcttgaaaatctttttttggaatccggcaatttatccacgaatttttttgttcggctggaaaaaagcctgcaaaaggcagaagaaataaaagatagcagtctgaaggagattaatgagtggtggggattgctccaggaggattttaaaaggcttaaccagaattatcaggattatctgcgggatttctattccggaaaaacggaacagctcatgaagtcagtggaatttgtagtacataaggacaagtttattaagtatttgaatgaatttgtgcaggaattgcagcgtcattccaagcggatcgagcaaattttgtcagataatatgctggtgattgaagaatatattctgtcaaaagtgatacagagtgaattggatattccacatgcggttttgcagcttcatggaaatgcagagccaagcatacgtgaaaatgtgatggggaaatggaattctctgaaaaactggtttatagattcacagggaaatgagtgtgagtgcaaaaaagttttgaaaatcacgaatgatgtaataagaagtattattcagaatgcagcgctgatcgtacagctccagaatggcggaatcagcaggaaggatgattaccgcaagtttttggaactgtttctgcaatgtgaggatttggaagaggctcagaagctatcggctcatgtttttggagtacagaaaatacagcattttaagacattggaacctcgcgagggggagggtatcaatgacagtatttataaggacgagcctgctgtttttttgctgaaacctcatacaagagcttatcgggagaaaaaagaccggagaggatttacagataagtctttggagaaatacatgcagagggagaagtatctgcagaagatcaaacggcagaaagagattgttatgtattacatcaaggataacaagatcacattttcagaaatagaagaggttatttcggaggagacaaggattacatttttgcagtggatcacgcaggccaatatgaattcccggaaaacaggaaggacggaatatgggcaggaatatcgtttgacgcagacgaagggaaaatgtgtgttaaggtgcgaggatggagatctggttatgcccgcgtttgtattggagtttataacattatga

SEQ ID NO: 51565 - DNA, 1137 bp, Clostridium sp. C105KSO14
atgaatgaattcagaacactattagagaatttctggatctgtaaggatacagataaggaaacgtattacagagtgaagagggatattccgaattttcagcgctttatcagggagcagctgggctggaagcttgttcatacggaaaatttgttaaaactagagaaaagaccggctcatgcggaagcgtttatgggaatcggggaatttatggagatcagggactactgtattttgtgtgtagtgctgatgtatctggaggataaagaggaacaggagcagtttcttttgtcagagctgattgattatgttgaagcgcagctgaaatcttatgtatccatagattggacttcttttacacagagaaaatccctggttcgtgttctgcaatatatggagaaactacagatgctcctggtatatgagggacgcagcgaggcctttggctcggaggcaggacaggaagttttgtatgaaaataccggatattcaaagtattttgcaaccagctttccaactggcatctctatatttgaatcctgggaggattttgaaaagacagattttgaagaatttcaggaaaacagaggcgcattgcgcatcaaccgtgtgtataggcagttggcggtgtgtccgtctatgtactgggagaacagtgaggacgcagattcgctgtatttaaaaaatcagcgtcagtgggttgcaaaatatatcaatgataacatgggaggaaatctggatctatacaaaaatatggcatgtatctcattggacggggacgactgctatggttctgttcacccgagagacgccatgcttccggagattgttcttctggtctgtgggaggatacaaaaagaggtttcagaggggaatttagaaaagcaggaaaatgaatgtatttacatgacaaggaaacgcatttcagacgtgattttgtcctgccgcagagagtggagcagcgggtggagcaaagaatatcgggaaatggatgaggagctgcttgtggagcatgtgttaaaatatatgaaaacctggctgatgattcgaaatgacggaacgcagattgccttatttccgtctgtgggaaggacagcaggagtttatccggaggattttaagggaggtaccggggagtga

SEQ ID NO: 51566 - DNA, 4068 bp, Clostridium sp. C105KSO14
gtgaaagaccgctttaaaatgaaccgtatagggttcgtgaatttctggttatatgatgaagaagagtttgaatttgtggatggaaagcttctcctgcgtgggcaaaatgcgtctggtaaatccattacaacccagagcttcattccctttatattggacggtgaccgtacgccgagccggctggatccctttgggtccagcgacaggagaatggaatattatttcctgggggaagaaggaaaggatgaatccacaggatatttatttttggaattcaaaaaagagaggtcggaagaatatcgcaccattgccattggacagagggcaaaaagaggaaaacccatggacttttggggttttattattttggacgggcgaaggattggctatgatctgaagctgtacaaggagattggttcaagcaaaatcccttatgacagaagggaaatgaaaacagagcttggagatgacaatttttttacgacgagccagagtgaatataaaaaagcggtcaatcagtacatttttggattccggaaagcggagcagtatgagcagtttattaaattgcttgtgaaggtccgcgctcccaaactttccaaggaatttaaacccaccaaggtatatgagatcttgaatgattctttgcagacgctgacagatgaagatctgcgcgctatggtggatgctatggaaaaaatggatgagattcaggaaagcctggagattttgaagcgagcctttgatgatgtgaaaatcatacggaatgaatatacccggtataatcaatatatgcttgcgaaaaaggcacaggcttatattgcaatgaagcagaagatagagacagaacagtgccagcttgacatacaggagcagaagcggcaggagacagaggaggccagaaacagcaagagccggcgtctggctgacttagaggagcaaaaaaagctaaaaggaattgagcgggctggacttctggatgcggatctggagggaatcgaccgcaagttggagcaggccaggggagagaaagaagaagctgccgggaaggttgccgattgggagagtaagatccgggattatcaggaaatgatctggcggggagaacgcagaatgaaggagatcatggcctgcctggaacaaatacagcaggagattggggaagccaagttggaactgggagagcagcaggagattattcagtgggatcagcacgaggcggctcttcagatgatagacagaggcgaacatgagaaaagcggtgaaattgtaaaaagccttgattcgctgaaaaaactgctggctgaatgtaaaagggaaatacgtgagtatgaggagcgatccagacagtatgatgaacttgcggcgcagctggagaaacttcatactgaaaaagcagaggctcagcagaactttaaggctgcacaggaagatgttgtccgctgtgtggatcagtggatcacagatatctatgcagcagagaaaaaatcttctcagtggagtcctgacagcgggattcttccaatactggtggagaaaattcgggagtatcagtctgcagcagatgcagaaacagtacaggcgcttttgcgcaccgattatgagcgccagcgccagggactcatggatctaaaaagcagtctggaatatcagaagaaaatccaggaggaagaactggatcaggaaaaagaaaagcttacatgcctgcggaattcaggggaattggagccggagagggacgagagtatagagcgttcaagaaaggcgcttaagagggctggtatcaaagcagtacctttttataaaactgtggaattttctaagaatctggatgagacgtactgtgcaaggctggaggctcagctccagaaaatgggaattttagatgcacttgtagtatctgcggatgattttgagaatatcagaaagcggtgtcccggttttttggatacggttttgtatgtgaaagggaatggaggttccggcttttccgggctgactgtcagcgaagagctggaacctgctctgaaagagaccgttcagaggattctcagcaatatttatgaagataaagaggatggacaaggaatttaccttgggaaagacgggacttttaaacaggggattctggctggtaaagcaggcaaaaccggcagtgctgagtttgtgggagttctggcgagaaaaagacggaaggaacagaaaatccgcgagctggaaggccggatttctgaaattacagaaataattgtaagcttggaaaaagagattacagaggtgcaggagcatttggaaaagctgcaggaagaatatcagaagctccctggcttttcagagattaacgctgccttagaccaggaaagggaatgtgaatacaagctgcaaaggacatgtgaggaatgtgggaagaaagaggcgcaggagcggcagctgatatttaaaaagaaccagcaataccagacaatgctgcaaaagtgcaagccatttccctatggcagaacagaagaagcctatgaggaagccaatgatgcgctggaagaatatagccgcatctggcaggagatcaggcaggcaatgctgcagcttcggacggctcaggagaatctcagtacagagaaggacaggaacgttcaaagtgaacagctgatggatgatgcttttgcagagaaacgcagctggagtgcgaaagaaaaagagagcgagattcagattcggcagtttgaggagtacctaaaccgtccggaaattgcaaaaaaggctggccgcttaaagcagctgaagaaagagctggaagaaattggaacagagtgtgatactttaaaagaagatttggttattctgggggaaaggctacgggtgattctggaagatgggccaaaactaaaggaaagcctgcgccagaaaattatagcagaaacctgcctgaggaattattttgaagaggagcttgcgctaaaactggtatttgacagagaaagccagggaatctttgaatgtgctaagagagcggtgtcggtattgcgggaaagcgataagaacagagagccaacggacctgctgcaggcgctgcatcaggtatatcagcgccataacggaagtctggtcaattacggtacatctttggaggaatgttttgacacgccggtggaggcagctctggaaacagaggctgctggcgcaatacgaaagcgggtgcgggtcgtttcctcatggaatgggaaaagggtatatctggaggaattttacggcatcttgaaacagggcattgatgagacggagctgctgatccagaagaaggacagggagctgtttgaggatattttgtcccagaccatcagccggcagcttacggaccggattgcagaaagccggaaatgggtttcggatatgtcgcagctcatgcgggagatggatacctctatgggtctgatcttttcactggactggaaaccctgtaaagcagagaatgatatggagttagacaccgcggagcttgaacagattctgctcagagatcatatgcttctgaccatagaggatatagagaaggttgcggcgcattttagaagccgaatccgcatggagaagctgaaactggaagaaaaaggcgacatgatcaattacatggatcttgtcagggatgcgctggattatcgcaaatggtttgaatttcacatgtatttcaggcgtggagaaggagagcggaagctgttgaccaatgcggcgtttaaccgtttcagcggtggagaaaaggctatggccatgtatgttcctctttttgcagcagtcaacgcacagtataaaaaagcggagcaggaagaccatccgcgaatcattgctttggatgaggcatttgcaggagtggatgacaaaaatatcagtagtatgtttgaacttgtgcataagctggattttgattatatcatgaattcccaggctttatggggatgttttgagacggtaaaaggacttcggattgcagaactttcaaggccccaggattcgcagattgtttcagtgatccgttatacatggaatggacgtgagaagatattagatgtgcaataa

SEQ ID NO: 51567 - DNA, 1299 bp, Clostridium sp. C105KSO14
atgtgcaataataaagaatgtgcaaattactttaaaagtcagcgggcatatcacagatgctttgaagaatttagaaaaaaatggaaatcttacggaaaagctgcgggaagaattacgcttaaacagacttcggaggaagagcggcgggcagtgggcggcataatcggcaaagtattttatgaggaaacaattcggttttctttcttggaatttgaacagggactgcaaaaaacacgtttcgcgccggtggatatgaaagcggtgctggaggaatatttcggggagccgctgattaccactcaggggcggcagagagaagagcaggagagaagaaaaaagtttctggacagaagctgcggatattttgaagaaaatgccggaagagaagctgcggcgcttgcatggctgcggaaaatgatctctgagaaaaaatatggatatcagctgttgatgagggagtacgcaaaagatgagaagcaggcggaactgctggtgcggaatgtagggaacgcagtgatgaagctaaaagagctgacggataaggaagatgaatatccgttagccgtgctggctgctgagataacagataatccccattactttgaccgcagcacaacagccggattgctttttgtacatgcaatctgctgctgcgaaaatatggaattgcccgaagacgcacatcagtggcggaaactgctgacgcaggtttcgattgttccggacaatatatcttccatggttcatggttatggactccggctgcttactaaacagggatggcatggggcctatgatacgttctgtgagcgaaaggaaccctatgttattaccatggagaatatgaaagggattatcggtgtacaggcagtgggggagaaggcgtatatagttgagaatgagatggtcttcagctatttgattcataatttgaaaaattcggactacacccttctgtgtacttccggtcagccccgttctgtggcacaggtgctgattacctatattttggccagtgggtcaaaaatctactataatggagatattgatccggatgggctctgtattgcggatagactatggaagaaattcggggatcgtattcatatatggagaatgtcgccggaggattatgataaaagcctctcaaaagaaagaataggggatattggaagagcaaagctcgaaaatataggtcatcctatattgaagaaaacggcagagtgcatgaaagaaaagcagctggccggatatcaggaaaatatgctgaaagagttgctggaggatatgcaaaactga

SEQ ID NO: 51568 - DNA, 1494 bp, Thermobifida cellulosilytica TB100
ctgaccgcctacacctacctcaccgtgccggaacgggccgactacatcgctgtcatgcgggtcttcaccggcacgctgctggccgacctgtccgcgcacgaagtcgccgagaaactcgcgcacagcggggaccccaagcctgtcgacctggtcgcgctgcgccttgaccagctccgtgcctggggtgcgctgctgccgagcgcacggccggtgcgcgccgcgaccgtcaccgagtaccagcgcagtcggggccgctaccagctctcccccgcaggggagatggtgcagcggcacagcgacgaactcctcgccgccgactccgtccgcgaggtgagccgggaactgctggggctggtcgccgaggggctcaccgccctccgcgacctcgcccaggagcccggcggtgtcgccggacaggacgccctgggccgcgtctccacgatcttcgcccagttcgagcggttcgtggaatcggtccgcgagttctacgcctacctcggccacgtcctcaaccgcttcgacctcggcgacaccgagttccgcgtcttcaaggacgtgctgctcgactacgccgagaccatcaccgaggacgtggcccgccagaccccggtgatccgcgaagcgctcgacgggctgtggccggtgctgcccgacctgctggcccgcatcgacgccgccgaccaaggactgagcgctctcggcgactccgacgtccgcatccgccgcagcagcggacggcacctgcgcgactggcaggaactgcgcggctggttcatcgactccggcggacggggcagcggcgtcggccaactgcgcctggccaccatgaaggcgctgcagtcgctgctgggaaacgccaagcggatgctgcgctcctccgccatgggagaactgtctcgccgcaacgacctgctccggctcgcccggtgggtcgacgccgccgacgactcccaggctcacgacctcgtcgccgccgcgttcggcatgtacggggtccgccacctcggcggcgcccgcggtgaccgggacaccgccaccagctccaccagttggtggcacgacgaccccgtcgacgtccccgtcagcatccgcgaacgcggcgaccgcaggccccggggcgcggtgcggcgcgaaggcgaggactacacgcaagcacgccgggacctgctgcgcaccgcccgggaacgggaggagcggcgcgcggccggagccgccgaactggttgcggccgcgggccgggaggacacggtcgtcttctccgccgcagcgttcgaactcttcaacgaactgctcggacgcgccatggcccagccgtcgggagaaccgggttcccgcgtgttccgcaccgccgacgccggtctgcgcctcagcctggaagtgcgtgagcaggccgaccggaccacggtcgtgcacagccgcggcggcgacctcgtcctggagggctgcaccgtccacctcagctcctccagaacccgggaggcgaccggatcatga

SEQ ID NO: 51569 - DNA, 1338 bp, Thermobifida cellulosilytica TB100
atgaaaccactggccgacgaccgcgccgccaaggtcgagatccgcgaagcgatgcggctgctgctgcgcaccccgctcctcaccgcgcggcgcgaccccgaggggttctccctggtccgcaggtatgccgacgaactcaaaagcgagttccaccagttcctcggctaccggctggtcgtcgaaggccgcttcgcccgcctgcacaagcccggtctgggcccggactgcggccgcaggctcacccgcgccaccaccggaaccgtcttctccccgcgcacctacacctacctggtgctcgcgctcgcagccaccgtcaccgcccccgagcagatgctgctgtccgaactcgtcgccgagatccgactcgccgcggccgacgccgcgatcgacctcggcgaccccgacggcgcccagaaacggcacctgaccgccgcgctgcgcacgctcatcgaatgggacgtgctgaccgagaccgagggcagcgtcgacgcactgctcgccgacgacgagcgcgaagccctgctcaccatcgacaccgacctcgcacgccgcatcgtcagcggcccgctcggcgcttcccgcactcccgaggagttcctccgcgccgccgaacgtccggaccgcgacagcccccggctcgcggtgcggcggcgcatcgtggaaacccccgtcgtctacctggacgacctcgacgagaccgaacgcgcctggctgcgccggaaccagcgccgcgaacagctcaacttccacgagatcctcggcgccgacctggagatccgcgccgagggggtcgccctggtccgtgaccaggacgacttcagcgacatcgacttccccggaacgggcacggtcgcccaggccgcgctgctgctcgtcgaacggctgctggagaccgagcgccccgaacaggccggccatcccgccacgggcggcacactcgtcatcggggtggccgtccccaccgaacgcctcgacgcgatcctgaccgacctcgcggccgagtacgcctcggcctgggccaaaagctacgtcaccgacgtgagcacgctccgcgccgacgtgtgccgcctgctgtgcgacatgcggctcatggcccccgtggcccccacccgggccgaacgcgccgctcgcgagcgggacaccgccgcggaacaccccaatcgccaggtcaccgacgtgagcaacgcacgcggacagctcgccacaccaccgccccggcccgaggcaggccactgggtgctcctcgccgccgcggcacgctaccgccccaccacgtccggccgcaccgaccggccacgccgacacaccaccccctccccgaaaggcggtgcccgatga

SEQ ID NO: 51570 - DNA, 4212 bp, Thermobifida cellulosilytica TB100
atgagcgacaccggagccgtccgcccactgcccgccccgcgcccgctcggcttcccgcaccggttccgcctgcaccgggccggtatccacaacgtgtggcagtacgaccaggtgttccacttcggcacgggacggctgctgctgcgcggcaccaacggcgcgggcaagtccaaggcgctggagatgctgctgccgttcctgctggacggccgtacccggtccatcgactccaccggaagcggcaagaccacgctgaagtggctgatgctcgacggttaccgggacagcgtcaaccgcctcggctacctgtgggtggagttccaccgcaccgaccccgagggccgggagcacctgctgaccctcggcgcagcgatcaccgcgtcgcagagcgcgaaacgcgccgacgccgagtacttcatcaccgacatccccgtcggcccccgactgcccctgcacgaccgcacccgcaggcccaccgtccgggaactccgggagaccgtcggcgagggctgccacttcacccaggcgagcgcctaccgcgccgaggtgatgcgccgcctgttcggtgtgcaggacagcggcaagtaccacaatctcctgcacctgctctaccagttgcgcaagccgacggtcggcgaccgggtgctcgccggagaactcaccaagatcctcgacgaatcccttcccccgctcgacgacgagatcatcgacaccgtcgcccgcaacctcaacgacctggacagcgtccgcgacgaactggcccggctggagcagaccaccacggccgtggcacagttcctccgcgactaccgccgctacctgcatggagtgctgcgcgggcgggtcgacgacgtccgcggcttcctcggggagctggcgcagcgacggcgcgcggcaggagatcggcaacgcgaacacgccgaactggtcgagcgggaacgggaggctgcggccgaggcggaaacggtcgccgcccaactggaaacggcccgcggcgacctggccaccctggtcaacagttcggcctaccaggccctcggcgacctgcgcgagaagcaggaaaccgtgcgggcgctgcacaccggcgcggtgaacacctggcagggactgcaccgcaccctcaccaccgaacatggccaggccgagcggctcaccgaggaattcaccacgatcgccaaggcccttgtcgacctccgggaccggcagcgcggcctccgtgacgccgcgcaccactgcggcatcgacgggacgctgctgggcactctcccccaaccggtccgcgacacgtccaccgccgtccccagcaccccgctgacttcgcccgacggcgaacgggtcgagatcgcccgtcctcggctcgccgccctgcctgacaggctggccggacacctgcgggacacggccgccaagctgcacggtgtggagcagatcagacgcaaccacgtccgcaccgtcgccgacgtccgcagtctcttccaacaggccgagcaggcctggcacgtggcccgtggcgccgaggccgaagccgaccgctgcgaggacgaactggcgcgggcccacgaacggcacaccgaacacgccgccgcgctgctggagcacgccgagcggtacgccgaagccgtccgctcctgggccgaggcgctccccgagaccccgtcgcaggagagccgccccgtcgtggccctcgccgcggtcggcgcagagaccgaaggcagcgtcgccgaccgcgtccccggccccgaaacgcccgaacaggtcgccgaggccgcccgcctcctgctggccccgcgcctggccgagctcgacaccgaacgcgaccgggtcggcgccgcaggtcaggcggcagcgcagcgggccgccgacctggaacgggaactcgccgagtggcagcggcgcgccgacccggaaccaccccgcccggactgggccgtggcaccacgccccgaggacgcaggggccgcgctgtaccgtctggtcgacttcgccgaccacctcgatgcggccgaacgcgccgggctcgaagcggctctccaggcgagcggactgctgtccgcgtggttggatccggcggggcggctgcgcgactcccgcacccgcgatctcctcgccgtcccggggcggccggtggacggtcccagtctcgccgacgtgcttcgccccgtcgccaccgaaacggtgtccgagaccgccgtcgccgacgtgctgcgcacgatcgcgctcgccggcaccgagacggccgctgagcactgggtggctctggacggccgctggcgactgggcccgctgcgtgggacgcacggcaaacagcaggccgagtacgtcggcgcgggagtgcgcgccgaaacccgccgccgccggatcgccgacctcaccgcgcggctggaggaggcccgggccgcagccgaggcgttcgctgaccagttggccgcgatcgatgaacgccgggaaggactgcggcgggcgctgggcgctctgccgtccagccgcgcgttcgtcagcgcctgggaggcccaccggctcaccgaggacgacatcgcaacagccgccgaaaagctgcgcacggcccgccgtcgggctgagaccacccgggccgaggccaccgccgcacacgccagagcgcgcgccaaggcgagctctgaacggctccccgaggaggcggacggactggaccgcctggctgtggcgctggagagattccaggggacactggcccgtttcgtcgacgacgtggaacgcctggccggggcggtcgagaagttcgaggtgtcccgctccgccctggccgcaaccggtgagacggtgcagcacgccgtggacgactacacctccgcgttcgaccgcctcaccaccgaacagcggaagctcgctcttctccgcgattccctgggcgcgggcgaggaggagctgcggcagcgggaagccgagttgcgcaggcgcatcggcgccgccgagcagcacctgccccggctgaccaggcacgtccaggaccttcacgaccgccggatcgccgccgaggtcgaacaccgtcgcgccaccgaggcccgcgcgcagcaggaggctgccaccgttgaggcggccggtcgcctgctcggccccctcggttcgcccggcctggccgccgccgcgggcatcaccggtgcggccgacatggtcgaccggttcgacgccgcccaggaggggccggtacgcgaccgcatcgcagcactggcacgactcgccggcgaggtcgccgcggcactcggcccgcccaagtccgacgtctccgcgaacacgctgctcaatcggggcaacgaactcaaggaccggctcgccggcggttatgacgccacgttccgcctggcgcacggcgacatccagatgtgggagctggccgacgacaccggaacccacgacatcgcgaccgtgggacagcggctcgaagccaacctcgcagccgaccgggaccgcgtctccgcccgggaacaggaggtgttccagcggtacctgctcggcgaactgggtgaccatctgacccaccaactgctccaggcccgccaggcggtgcagcggatgaaccggaccctgcaggacgtgcgttcctcgcacggcatgggagccaccgtggagtggaagctctctcctggcgcctcccccgacgtccaactcgccgtcgcactgctcgacgagacctccgccacccgccacccggacgacgccgcacggctgcgcgacgcgctgcggcggcacatcgagacgatccgccgcgacgatcccaccgccggatacggggtgcacctgcgggcggccctggactaccgcacctggttcgagttccacccctacgtactcggcgcggacggcaagagccgccgcgcattcaaccaccgcatcgcgctcagccagggggaacagcgggtgatcagctacctgctgctgttcgcggcggcggcgtcgcacttcacctcgctggccgagaccgcgccgcacgccccccggctcatcctgctcgacgacgccttcgccaaggtcgacgagcccacccacgcccgcctgctggggctgctcatcgacttcgacctcgacttcgtcatcaccagcgaacgcctgtggggcacttttcccaacgtccccgacctgcacatctacgagtgcctgcgcgacccggcccggcgcggggtcgccaccgtccacttcacctggaacggcagggaacggaggctggtctccacatga

SEQ ID NO: 51571 - DNA, 1272 bp, Thermobifida cellulosilytica TB100
atgaccgacggtctgcccccgcagatccgacgccacctcgaccggccgcaactgtcgcggctgtgggacctgctgcacgaccggctgcgccgcaacgggctggcggtgcggggacggctgcgcgtgcccgaaacgactccggaggaacgcgaggcgctgtccttgctgatgcgacgcactctcacggccgagaacgtgaccgtggacctggcggacctcgacgcccggttgcgggccagcgccgcccggcgcggtctggtggacgtggtggccgaactacgcggcacgatcaccgaccgcccccgtgagctgcgcgatcaaagagacgcgcgacagcatctgcgcgagtccgcccagtcgagtgccgcacgcctgggggcggacccttgggtgcagcagtggctggacgaactcttccggtcgggaatcctgggccgtctgaccccgacggaggcagccgacctcgtcgatcgggccgtacgtgtgctggagggaatccccgcactctccgggaacggcacggggaccgtgggacgccacgaactcgccgagcgggtcaccggcaccgcgcacggcctcgacgacacctcgctgctggcacggaccgtacagcgtgccctcgccctggccctggaccttccactgcctgccgacgccgcgcaacgccgctggctgtgggccgaggccggggtgagcacggacaacgtgtccagcaccgtgctgacgtacggtctgcgccccgccggcccggactggctcgcccgacaactccgcgaacgggccgaacaccatgccgagacccatctgagcctgcgggacctccgccggctgcggtgggacttccccggaaccgatccggtggtgtacgtctgcgagaatcctcggatcgtggaggccgccgcagaccacggctgcgcggcaccggtcgtgtgcacctcgggcaacgccacgacggtggttctcaccctgctggacgcgctctgcgcggccggagcggtgctgcacggacgctgcgacttcgactggcccggggtggcgatgatgaaccgcctggtgacccgctacaacgtccaaccgtggcggatgcgcgccggtgactacgaggagcacgtcacccgcgcccggcagcggaggactccgctgaatccgctctccggtcccgcccgcgaggctgactgggaccccgaactggcggcggccatgcactccctgggagtggccgtccacgaggagtccgctctggacctgctggtttccgacctgagcgggtga

SEQ ID NO: 51572 - DNA, 1533 bp, Burkholderia oklahomensis EO147; identical to SEQ ID NO: 50893

SEQ ID NO: 51573 - DNA, 1275 bp, Burkholderia oklahomensis EO147; identical to SEQ ID NO: 50894

SEQ ID NO: 51574 - DNA, 4182 bp, Burkholderia oklahomensis EO147; identical to SEQ ID NO: 50895

SEQ ID NO: 51575 - DNA, 1533 bp, Burkholderia sp. BDU8
gtgcagtcaaatgcaacggcagcagaacttttcaggcatttgagtgccgagaagtccacgttctatcgatgcatcatggatgtcttcgccgcagccaagcggcaatacaggcttcagcttcgccccgacgaagtccttgcggaggcgaactggccagaagggacgcctcgtatcgaggaagtcaacgctgcgctggttcagctgaccgaatgggggaatctcgaatcccagccggatacggcacgcgtttcctcgctcagcgacttttaccgcgcacgcttcctttaccggctgtctcatggaggcgaggccgtggaagcgagcctcgccgtgttcttccaaacgctacagcgacgggccgaactgcaaaccgtagcactggaggacattgccagccgtctgcaggctctacgacagctgctcgacgacgatacgcctgaagatggactcgacgtcgccaagacacaccaactcctgcgcgacctagtcggcgtgttccgcgacctcgccgagaacgcacaggctttcatggcaggtgtcgcgcgaagcctggaacttcagcaagccgaagcgagcgctgtcgttgcgtacaagcgccgcctcatcgattacctcgatcgcttcctgggagatctggtacgacgctccgactccatcgcccggctcatccagcaactggccccgcgcatcgattcagtcttcctccaggtggcggagcgagaagcccgggatgcggctccggaagacatgcagaatcaagccgacgaaaagttgaggcgctggcgggcctggcgcgaacgttggaaaggccttcgcggctggtttttatcgacgggactggaaccgcctcaggccgagttgctgcgtgcacgcgcacgcgccgcgattccgcttctcttgggcgccattgccacgttgaacgagcgccgcagcggacgtagtgaccgctctgccgactttcgcatgctcgcccactggttcgccgcgtgcggcagcgacagcgacgcccatcggatggcgcgggcggccttcgcgctccatcccgcccggcactattccctgaatccccaggccgacgacgaccagccggccagcacgccgtgggcagatgcgcccccgctccaaatcaacccgcgcttgcgcgagtatggcgaggccgcaccccgcggaccactcgcgcgggtgcgcgaccgcagcgcggagcgcgcgctcatggccgagcagttggcagaagaatcgcgccaggtcgatgcggctcgacaacgcttggccaccgggcgtccagtccgcctttccgagttgggtgaactggacgttcacgccttcggcctgtttctcaatctcttgggagaagcgttgaccgaacaggcacatcccgatcagaccgtcgagcgccagacaggcgacggtttgctctacatccggatggaaccgctcgacgtcaccatggaggcacgtatcacgacccctgccggcgtctttgcgggccgggatcaccttctcacgatcgcatttacacaggagccaacatga

SEQ ID NO: 51576 - DNA, 1275 bp, Burkholderia sp. BDU8
atgactgcacgctcatcatggaagcacgacagtcagcgaatcggcgagctccaacgtgtccagcagcaagacgagttccgtcgagcgctgcgtgccctgctgttgcagccgctgatggcgccggatcacgacgccttcccggcagtacgccgccaggccgaacgattgcgcgactggtttgcgcgagaagccggctggcctctgcatgtcgagcgcgagggcgccaggctcttcaagcgacccgcgaaccttgccgacgatacgcgagggctgccgaactatgaccggcagcgctatgccttgctctgccttgcatgtgccgtgctcgagcgagccgatccacagatcaccctgcagttgctcggcgaacgcctgatgcagttggcatccgacccggcgctggtctcttgtggcttccagttcacgctcggcagcgctgccgaacggcgtgacctggtcgccgtgtgtcgcacactgctcgacttcggcgtcttgcaacgcgtcgccggcgacgaggagaatttcgtccacgaaaacggctggacccaatcggacgcgctctacgatgtccagcgacgcatgctggccggcatacttgcggcggtgcgtgggccgtcaacgtggcgtgtcgaagatgcaccgatcgatttcgaggaccgattgcgctcattggtggcggagcacgttgccgacagcgaacagggacgccgcgatgccctgcgtcaccatctggcgcgccggcttctggacgatcccgtgatctacagcgcctccctggattccgagtatctggcctatttcgtcaatcaacgcggcgcgatggcggcccgcctttgcgaagccaccggattgaccgccgagcagcgagccgaaggactggcactcaccgacgaatcgggggaacttacagacatctcgatgcccgcagaagggacggaggcacacgctacgctcctggtcgccgaatttctggccgcgcgcctgcgagaagcgccggagatcgcattgaccgcccaggacgctgtcgccgccttcctgcgcggcgctgcggagcagtacggtcgctactggcgcaaatcggcgcgcgaaccaggcgctgaaattgagctggcagaaatcgcactcgacaggttggaacggctgcaactcatcgcccgaatccatcgcgagattcgaccactgccggccatcgcccgtttcgcgctcggcgaccccgaagttcgttcgaaaacagccggtgccgttgctcccgaatcatcgcttatcgacgcatga

SEQ ID NO: 51577 - DNA, 4182 bp, Burkholderia sp. BDU8
atgaccgacattctcttcgattcgcctcaaacgccgcgcccggtattgccggagcctcgacgcgagcggtggcaacccttgcggatcggcctcgtggaactttttcactatgacagtgaagaattctggttccgtgacggccacttgctgctacgcggcaacaacggcactggcaagtccaaagtgctgtctctcaccttgccctttctcttcgatgcacaactgcgtccgtcgcgtatcgaaccggacggggacaacggcaagaagatggcctggaacctgctgatggatggctacaaacgccgcatcggctacacatggatcgagttcggcagacggcaagccgatggcacggcacgctacttgaccctgggggccgggttgtcggccgtgaccggcaaaacgcaggtcgacagctggttcttcttgatcgaaggcacgtccggagagcaggatccgcgcatcggccaagacctgtggctcacgagcgaacagcgggtcgcgttaacccgcgagcgtctgcgcgagcgcttggaagagcgcggccagggcacggttttcgagaatgcccgcaactatcgccgggctgtggatgaacggctcttccacctcggcgagaagcggtacgaggcgctaatggacaccttgatccagttgcgccagcctcaattgtcgaagaagcccgacgaagcgggcctttctcacgcgctgacggaagcgctgcctcccatgccgcaggaattgttggccgacgtggcggaggcgctgaatcagctggaggaggaccgcgagcagttgaacagcactcgtcagctcgagcaggcggtcaggcatttcgaacaaagatacagggcgtacgccggcacattgacacggcgccaggcgcgcgagcttcgtcaggcacagaccgcattcgacaacgccagcgacgaccgcaacaaggcacagaacgcattgcgcacggcgaaggaagaagaggccgcggcgatctgcacacttgaggccgcgaagcgtgcgcagaccactgcgcgagagcgcttggagacgctgcaaagtgatccggccaaccaggacgccaaccgcctgagccaagccgagagagatgccaaggatcgaaaggaggaagcggctagggctgcggaacaacgcgagggtgctcggcggcacctgaagcgcgaagaggagcgcagccgcgagtccaatcaacggaccgaggcagctcgaagcgagatcgcatccgcacgcacgcaatgcacgtccgacgcgcaatccgcgggcacgaccttcgccttgtccggcaacccgctcgtcgcactccccctcgacgagctcgccgagctgccggcagaggagctcacgtctgccgttgccgagttgcgcgatgcggcgaacaagcgccgcgagaacatccggtacctggaacagcgccacgtcgccgtggccgctaaacagtcgacgctccaggcacggcaggcagcccaacgggatcgccatgcggaactcgaggaagcgaccgagcggcgtgccgaggccgacctggaggctgaaacggaaggcaatgcgctgattgacgcctggacggactattgcgccggtctggaacaactgcgcttcgaatcggaggacgcactatccgagctcacaggctggacagcccgtcccaaaggcgccgatccggttcactcggcactgaccgcggcctactcgcggacattggcgcaacatgccactcgccaaaccgagcttgcaacgcgtcgacgcgacctggatcaggaacgccgtgcgctggtcgaagaacaggagcagctcgccgcaggccaagacgccaccccgcccgttcccgctaccaggggcgcgaacgttcgcgagggacggataggcgccccgctctggcaactgatcgactttcacccccatgtaacgccgcaacagcgtgcgggtttggagggatcactggaggcgtgcggcctgctggacgcatgggtcacgccgaacggcaacgtgagcgatgcggcgggaagaccgatttgggatacgcactggcggcgacgccccgccgtcgcgggcgagagtctgctgagcctgctgtcgccggcgacaccggatggttgcgcggtcgatccggcgctggtggaggccttgcttgccagcgtcgcctgcgggccggaaaacgatctcgtcgtcgaatcctggatcgctgcggatgggcgcttccggttgggcgcactcacgggtgcgtggcacaagcctgaagccatctacatcgggcacacggctcgcgcccaggcccggcagcgccggatgcaggaaatcgccctacggcttcggcaactggatgcggaaaccgccattctgtcgcaggcctttgaagcgcttgccgccgaccgcgcgaaagccaaggaagagttggatggtgcgccttccgacacatcgcttcgtcaagcgattctggccaccaccagcgccgagcgcgaggtgctgcaagctcgcgctcgactcgatcaagccgacaaccaatgccgggtggcggagaccgaactctacgcggcccgcgaagtgctcgagaacgatgccatcgacctgcaactgcccctcgcccaggctgacctcgccccgattgccaacgcggtggaccgattcaccgatgcgcgccacacattggcccaggccagccgggaatggcgcagtgcctggccggaccacctgcagcagcgggagcgtgaggccgaagcccacgtcgcgctggaacaacgagaggaagagctcggtactgcaaatgaacgtgcagagaaagcctcggcgcgctacgcagtcctgcaggaatcgatcggcgctaaagtagaaacgttgcgccaacaactgaacgaggcaacccagaacgcaagcctggccgcagcggacgccgaacacaaacagattgccttgaccgcagcagctgaagcgcgagccgtagcggatactcaagcgaccagcgcggatcgtgtgctggccgagcgcacggacatccgcgcgcaagccatcgagcggctgcgacgcttcaccgagagcaccctgctggcctccgcgctgcccgacctgctcatcccatctgccggcgtgccctggaccatcgatcccgcactgcaactggcgcgacgggcagaacaggcactcgcgcacatcgaggtcgacgacgccagctggggccgcatccagcgccaggtttcagaagacctgaccgagctgcaacgctcgctcagcgcgctcggccaccaagccgcctccgagcccaacgattggggcttcacggtccacgtcacctatcagaatcgctcggagcgaccggacacgctggccgctcaccttgccgacgacattgcacagcgcagcgaactgctgtcggccagggaacgggagattctggagaaccacctgcaagcggagatcgccgcggagatccagcgcttgatgcgtgcggcggacaagcaggtcgacgccatcaacgaagagttgaacaagcgtcccaccacgaccggcgttcgctaccgcttgcaatggcagccccttccaccggaagaaggcggccccttgggccttgagatcgcgcgcgaacggctgctcaatacgagttcggacctttggtccgccgaagatcgtcgcgcggtgggcaccatgttgcagcagcaaatcgtcatggaacgagcccgtgccgaaaacgatgccacggcgtccggcttcagcctgaacgatcaattggcgcgggcgctggactaccgtcggtggcatcggtttcgcgtgcagcgtcaaagagacaagagcagcaactggcaaaagctctccggaccagcgtccagcggggaacgcgcgcttggattgactgtcccgcttttcgcggccatcgccagcttctatggtcgaggaggcaacccgcacgcaccccgcccgatgttgctggacgaagccttcgcgggcatcgatgatgcagctcgcgcacattgcatggggctcatccgcgaattcgacctggatttcgtcatcaccagcgaacgcgaatgggcgtgttacgcagaactgcccggcgtgtcgatttgccagttgcaacggcgcgaaggcgtggatgccgtcttcgtttcgcgctggacatgggacgggcgcgccaagcggcgcgaaaacgatcccgaccggagatttcacgatacatga

SEQ ID NO: 51578 - DNA, 1296 bp, Burkholderia sp. BDU8
atgacgcggaccgacacgcttaccaatcctgacgcccggctccaacgcttgctcggtggtgccgagctcggctcgcttcgccaacgcatgcgacgctacttcgagcgcgtcgacaacggcaccgccggcagtagcctgctattgacccagctcagccccgcggaacacgaagctttggggctgctcatcggccggccatctcgcacgtcccgatccgtacggatcgacatcgaacgactggatatcgcgctgcgagatgccggcattgccgattcactgcgagcagcgctggaacgcatcgatggtccgatcgtgagccgcgcgatcgtcagggcaagtacccacgcggagtggacccgcctggccgcacttgactcccgacatgccatgctgcgcgcttggctcaatgtccctacggcgctgggcttgctcaagcgcttgtcccgacaggatccagcgacggggcagcaattgctcgaacgggcggaggccacgctgcaacggctgccggcccagggtatcacacgctctcaactggccgcggagaccctaggcaacgcacacgcgctcgacagcggcgaacccacggccacgatcgtgctggccgcctggcggaacatggaacgcacggcggcctgcgaagacggcttgcgtgacgcggacggcaatccggataactcgccgcaacccgacgatcgcgttcgggacatctgggctcgggcgggtgtgctggtcaacgagctggctcgtcctgccctgttcttgaatcttccggtcgtcggtggcgactcggcaggaggaacacccggcgagccggactacgcatcgttgcgcagactgctgcgaacaccgcctgcatgggccgtacatggcaccacggtgttcgtctgcgaaaaccccaacttcgtagccatcgcggccgatcgactgggcgcggcaagtgcgccgctagtctgtacggatggcatgccggctgccgcgcagcgaacactgttgacccagttggtacatgcgggagcacacttgatgtaccacggggatttcgactggccaggtttgcagatcgggaatcaggtgattggcacatggcatgcgcatccttggcgattcgctgcccgggactatgaggccgccgcggcgaattcacctcccgtacgatacgagttatatggcgcttgggtgtcggcctcatgggatgcaacgctggccacggtgatgcaacgctatggcatcgccattgccgaggaggcagtggcagcagcgttgctcgaagacctgagccgaaggtgccagtag

SEQ ID NO: 51579 - DNA, 1533 bp, Burkholderia ubonensis
gtgcagtcaaatgcgacgacagcagaacttttcaagcatttgagcgccgagaagtccacgttctatcgatgcatcatggatgtcttcgccgcagccaagcggcaatacaggcttcagcttcgtcccgacgaagtactcgcggaggcgaactggcccgatgggatacctcgtatcgaggaagtcaccgcagccttgacccagttgaccgactgggggaatctcgagtcccaaccggatacggcacgcgtttcctcgctcagcgacttctaccgcgcacgcttcctttaccggctgtctcatggtggagaagccgtggaggcaagcctcgccgtattctttcgaacgctacagcgacgggccgaattgcaaaccgtagcactggaggacattgccaatcgcctggaggccctacggcaactgatcgacgacgatacacctgaaaatggactcgacgtcgccaaaacgcaccaactcctgcgcgacctcgtcagcgtgtttcatgacctcgccgaaaacgcacaggccttcatggcaggcgtcgcgcgaagcctggagcttcagcaggccgaagcgaacgctgtcgttgcgtacaagcgtcgcctcatcgattacctcgaccgctttctgggagatctgatacggcgctccgactcgatcgcccgactcatcgaggaactggccccgcgcatcgattccgtcttcctccaagtggccgagcgagaagcgcaggatgccgctccggacgacatgcaaagccaagccgacgaaaagctgaggcgctggcgggcctggcgcgaacgctggaaaggtctgcgcggctggtttttgtcgacgggaatggagccgcctcaggccgagttgctgcgcgcacgcgcacgcgctgcaatacccctcctcttgggcgccatcgccacgttgaacgagcgccgcagcggacgcagcgaccgctctgccgacttccgcatgctcgcccactggttcgccgcgtgcggcagcgacggtgaagcgcatcggatggcgcgggcggccttcgcgctcaatcccgcccggcactattctctgaacccccaggccgacgacgacttgcccgccagcacgccgtgggcagacgccccaccgctccagatcaaccctcgcttgcgcgagtacggcgaagccgctccccgcggcccgctcccgcgagtgcgcgaccgcagcgcagagcgcgcgctcatggccgagcaactggcagaagaatcgcgccaggtcgatgcggctcggcaacgcttggccaccgggcgtccaattcgactatccgaattgggtgaactggacgctcacgccttcggcctgtttctcaatctcttgggagaggcattgaccgaacaggcgcatcccgaccagaccgtcgagcgccagaccggcgacggcttgctctacatccgaatggaaccgctcgacatcaccacgagggcatgcatcacgacccctgccggtgtctttgcgggccgtgatcatcttctcacgatcgcgcttacacgaggcgcagcatga

SEQ ID NO: 51580 - DNA, 1275 bp, Burkholderia ubonensis
atgactgcacgttcgtcatggaggcacgacagccagcgaatcggcgaactccagcgtgcccagcaccaagaggagttccgccgagcgttgcgtgccctgttgttacaaccgctgatggcgccgaatcacgacgcctttccggcggtacgccgccaagccgaacgattgcgcgagtggtttgcacgagagaccggctggcctttacatgtcgagcgtgagagcgcccgactctacaagcgacccgcggaccttgccaacgataagcgggggctgccgaactacgaccgacggcgctatgcgttgctctgcctcgcgtgtgccgtgctcgagcgagccgatccacagatcaccctgcagttgctgggcgaacgcctgatgcaactggcgttcgacccggcgctggtttcttgtggctttcacttcacgctcagcaccgctactgaacggcgcgacctggtcgccgtgtgtcgcacactactcgacttcggcatcttgcagcgcgtcgccggcgacgaagaaaatttcgtccacgaaaacggctggatgcaatcggacgcgctctatgatgtccagcgacgcatgctggccggcatgctagcagccgtgcgcgggccgtcgacgtggcgtgtcgaagatgcaccgatcgatttcgaggaccgattgcgctcgttggtggcggagcatgtggccgacagcgagcaagggcaccgcgacgcgctgcgtcactatctggcgcgccgactgctggacgatcccgtgatctacagcgcctccctggatcccgagtatctggcctacttcgtgaatcaacgcggcgcgatggcagcgcgtctgtgcgaagccaccgggctgactgccgagcagcgagccgaaggactggcactaaccgatgagtcgggggaacttaccgacatcgcgatgcctgcagaagggacggaggcgcacgcaacgctcctggtcgccgaatttctggccgctcgcctgcgagaagcgccagagatcgcattgacttcccacggcgctgtcgccgccttcctgcgcgacgccgcggagcagtacggtcgctactggcgcaaatcggcgcgcgaacctggcgccgaaatagagctggccgaaatcgcactcgacaggttggaacggttgcaactcatcgcccgaagccatcgcgagatccgacctctgccagccatcacccgcttcgctctcggcgatcccgaggttcgttcgaaaacaactgacgccgcggctcctgaattaacgcttatcgacgcatga

SEQ ID NO: 51581 - DNA, 4182 bp, Burkholderia ubonensis
atgaccgacaccctcttcgatgcgcctcaaaccccgcgcccagtattgccggagcctcaacgcgagcggtggcaacctctgcggatcggcctcgtggaactttttcactacgacagtgaggaattctggttccgtgacggccacttgctgctacgtggcaacaacggcaccggcaagtccaaggtgctgtccctcacgttgccctttctcttcgatgcgcaactgcgtccgtcgcgtatagaaccagacggcgacaacagcaagaagatggcctggaacctgctgatggatggctacaaacgccgcatcggctacacgtggatcgagttcggcagaaggcaagccgatggcgccgcgcgctacttgacgctgggcgccgggttgtcggccgtgaccggcaaaacacaggtcgacagctggttcttcgtgatcgaaggcaaatccggagaacaggatccacggatcggtcaggatctgtggctcacgaacgaacagcggatcgtgttgacccgcgagcgtttgcgcgatctcctggaagaacgtggtcaaggcacggttttcgagaatgcccgcaactatcgccgggctgtggatgaacgactcttccacctcggcgagaaacggtacgaggcgctaatggacacgttgatccaactgcgccagcctcaattgtcgaagaagcccgacgaagcgggcctttctcacgcgctaacggaagcgctgcctcccatgccacaggaattgttgaccgacgtggcagaggcgctgaaccagctcgaggaggaccgcgagcagttgaacaacactcgtcagctcgaacaagcggtcaaacatttcgaacaaagataccgggcgtacgcaggcacattgacgcggcgccaggcgcgcgagcttcgtcaggcgcagaccgcgttcgacaatgccagcgaggaccgcaacaaggcacagagcgcgttgcgcacggcggaggaggcagaagtcacggcgatcggcgctctggacgctgcgaagcgtacgctcaagaccgcccgagagcgcttggagacgctgcaaagtgatccggccaaccaggacgccaatcgtctgggccaagccgagagagatgcaagagaacgcaaggaggaagcggtcagggccgcggaacaacacaagtcggctcaactgcacctggaacgcgaacaggagcgcagccgggaatccggtcatcggaccgacgcggctcgaagcgagatcgcatccgcacgcgcgcaatgcgcgtccgacgcacagttcgcgggcacggccttcgccttgtccggcaacccgctcgtcacactccccctcgacgagctcgcacaactgtcggcagcacggctcacgtctgccatggtcgagttacgcgatgccgcaaacaaacgccgcgcgaacatccggcacctcgaacaacgccacgccgccatggccgccaaacagtcagcactccataccttgcaggcggcccaacgagatcgccatgcggaacttgaagaagcgaccgagcggcgtgccgaggccgatctggaggcggaaacggcaagcaacgcgctgatagacgcctggacggactattgcgccggcctggagcaattgcacctcgaatcggagaacgcactgtccgagctcgcaggctgggcagcccgtccccaaggcgccaatccggttcactcggcattgactgaagcctactcgcggacattggcgcaacatgccgctcgccagaccgagcttgatacgagtcggcgcgacctggatcgggaacgccgcgcgctgaccgacgaacaggagcggctcgccgcaggccaagacgcggccccgcccgttcccgccgcccggggcgaaaacgtccgcgtgggacgcataggcgccccactttggcaattgatcgattttcgccctcatgtaacgtcgcaacagcgtgcaggcttggaggcatcgctggaggcgtgcggcctgctggacgcatgggttgcaccggacggcaacgtaagcgatgcggcaggaaagccggtttgggatacgtactggcgacaacgtcccgctgccgcgggcgacagtctgctgagcctgctgtcgccgacgacgccggatggctgtacggtcgatccggcactagtggaggcattgcttgccagcgtcgcctgcgggcaggaagacgatctcgccgtcgagtcctggatcgccgccgatggacggttcaggttgggcgcactcacgggtgcgtggcacaagccggaagccgtctacattgggcataaagcgcgctcccaggcccggcagcgcaggatgcaggaaatcgccgtgcggcttcggcaactggatgcggaaaccgccagcctgtcgctggcctttgaaaggctggccaccggccgcgcgaaagccaaggaagagttggacggtgcgccttccgacacgtcgctccgtcaggcgattctggccgctgccagcgccggacgcgaggtgctgcaagctcgcactcggctcgagcaggccgacaaccaatgccgagcggcggaagatgaactctacacagcacgcgaagtactcgagaacgacgcaatcgacctgcaactacctctcgcccaggccgacctcgccatgattgccggcgcagtggagcgattcaccgatgcgagccacacgttggcccaggccggccgggaatggcgtagcgcctggcccgctcaccagcagcagcaaggacgcgaagccgaagtccggatcgcgctcgagcaacgaggagaagaactcagtaccgcaaacgaacgtgcggagaatgcccaggaacgctactcagtgcttcaggaagcaatcggcatgaaagttgaaacgttgcgtatgcaacttgatgaggcggcccggaatgcgcgcgattccgcgacggacgtcgaacacaaacaaacagccttgaccgcggctgccgaagcgcgcgccgtcgccgatactcaggcagccagcgcggatcgcgcgctagcagagcgaacggagatccgcgcgcaagccattgagcgattgcaacgcttcgccgagagcaccctgctggcctccgcgctgcccgacctgcctatcccaccagccggcgtgccctggactatcgatcccgcactgcagctcgcgcgccgggcagaacaggcgctggcgcatatcgaggacgacgacgcaaactggggccgcatccaacgtcaggtttcggaagacttgaccgagctgcaacgctcgctcagcgcactcggccaccacgccgcttccgagcccaacgattggggcttcacggtccacgtcacctatcagaatcgctcggaacgaccggacacgttagccgctcacttggccgacgacattgcgcagcgtagcgaactcctgtcggccagggagcgggagattctggagaaccatctgcaagcggagatcgccgcggagatccagcgcttgatgcgtgcagcggacaaacaggtcaacgcgatcaacgaagagttgtacaaacgtccgaccacgaccggcgtccgctaccgcttgcaatggctgcccattccgcccgaagaaggtggacccttgggcctagacattgcgcgtgaacggctgctcaatacgagttcggatctttggtccgccgaagatcgtcgcgtggtgggcgccatgttgcagcagcagatcgtcatagaacgagcccgtgcagaagacgatgcagccgcgtccggcttcagcctgaatgatcaattggcccgggcgctggactaccgtcggtggcatcggtttcgcgtgcagcgtcaacgagacaagagcagcaactggcaaaagctctccggaccagcgtccagcggggaacgtgcgcttggattgactgttccgcttttcgcggccatcgccagcttctacggccggggaggcaacccgcatgcgccccgcccgatgttgctcgacgaagccttcgcaggcatcgatgacgcagctcgcgcacattgcatggggctcatccgcgaattcgacctggatttcgtcatcacgagtgaacgcgaatgggcatgctacgcagaactgcccggcgtgtcgatctgccagttgcaacggcgcgagggtatagatgccgtcttcgtttcgcgctggacatgggatgggcatgccaagcggcgcgaagacgatcccgaccggagatttcccgatacatga

SEQ ID NO: 51582 - DNA, 1296 bp, Burkholderia ubonensis
atgactcagaccgacacgcccaccagtcctgacgctcggctccaacgcttgctcggcggcgccgagctcggctcgcttcgccaacgcatgcgacgctacttcgagcgagtcgacaacggtaccgccggcggcagtctgctattgactcaactcagccccgcggagcacgaggctttggggctgctcatcggccgacaatctcgcacttcccgatcgatacgtatcgatatcgaacgattggatatcacgctgcgagatgccggcatcgccaattcactgcgagcagcgctggaacgcatcgatggtccgatcgtgagccgcgcgctcgtcagggcaagcgcccacgcggagtgggctcgcgtggccgcacttggcccttggcatgacatgctgcacgcttggctcaaggcccctaccgcgctgggcttactcaagcgcctgtcgcgacaggatcctgcgacggggcaacaattgcttgaacgagcgagtgcaacactgcggcggttgccggcccagggcatcactcgctctcaactggcggcagaaaccctaggcaacgcacacgcgctcgacagtggcgagcccacggccacgatcgtattggccgcttggcggcacttggaacgcacggcagcccgcgaagacggctcgcgtgatgcgaacgagaatccggatgacgcgcagcagcccgacgatcgcgttcgggacatctgggcccgagcgggtgtgctggtcaacgagctggctcgtcctgccctgttcctgaatcttccggtcgccgatggcgactgggcgggaggcgcacgcggcgaaccgaactacgcatcgttgcgccagctgctgcgaacaccgccggcatgggccgtacgcgacaagacggtattcgtctgcgaaaaccctaacttcgtagccatcgcggctgatcacctgggcgctgcaagtgcgccgctggtctgtacggatggcatgccggctgcagcgcaacgaacgctgctgacccaattggtgcgagctggagctcacttgatgtaccacggagatttcgactggccaggagtgcagatcgggaaccaggtgatgggcacctggcatgccaacccttggcgatttgccgcccgtgactatgaggctgccgcagcgaatccgtctccagtacgacacgagttgagtagcgcttcggtgtcggcatcatgggacgcgacactagccacggtaatgcagcgccatggcatcgccattgccgaggaagcagtagcggcggcgttgcttgaggacctggggcgaaggcggcagtag

SEQ ID NO: 51583 - DNA, 1533 bp, Burkholderia ubonensis; identical to SEQ ID NO: 51579

SEQ ID NO: 51584 - DNA, 1275 bp, Burkholderia ubonensis
atgactgcacgttcgtcatggaggcacgacagccagcgaatcggcgaactccagcgtgcccagcaccaagaggagttccgccgagcgttgcgtgccctgttgttacaaccgctgatggcgccgaatcacgacgcctttccggcggtacgccgccaagccgaacgattgcgcgagtggtttgcacgagagaccggctggcctttacatgtcgagcgtgagagcgcccgactctacaagcgacccgcggaccttgccaacgataagcgggggctgccgaactacgaccgacggcgctatgcgttgctctgcctcgcgtgtgccgtgctcgagcgagccgatccacagatcaccctgcagttgctgggcgaacgcctgatgcaactggcgtccgacccggcgctggtttcttgtggctttcacttcacgctcagcaccgctactgaacggcgcgacctggtcgccgtgtgtcgcacactactcgacttcggcatcttgcagcgcgtcgccggcgacgaagaaaatttcgtccacgaaaacggctggatgcaatcggacgcgctctacgatgtccagcgacgcatgctggccggcatgctagcagccgtgcgcgggccgtcgacgtggcgtgtcgaagatgcaccgatcgatttcgaggaccgattgcgctcgttggtggcggagcatgtggccgacagcgagcaagggcaccgcgacgcgctgcgtcactatctggcgcgccgactgctggacgatcccgtgatctacagcgcctccctggatcccgagtatctggcctacttcgtgaatcaacgcggcgcgatggcagcgcgtctgtgcgaagccaccgggctgactgccgagcagcgagccgaaggactggcactaaccgatgagtcgggggaactcaccgacatcgcgatgcctgcagaagggacggaggcgcacgcaacgctcctggtcgccgaatttctggccgctcgcctgcgagaagcgccagagatcgcattgacttcccacggcgctgtcgccgccttcctgcgcgacgccgcggagcagtacggtcgctactggcgcaaatcggcgcgcgaacctggcgccgaaatagagctggccgaaatcgcactcgacaggttggaacggttgcaactcatcgcccgaagccatcgcgagatccgacctctgccagccatcacccgcttcgctctcggcgatcccgaggttcgttcgaaaacaactgacgccgcggctcctgaattaacgcttatcgacgcatga

SEQ ID NO: 51585 - DNA, 4182 bp, Burkholderia ubonensis
atgaccgacaccctcttcgatgcgcctcaaaccccgcgcccagtattgccggagcctcaacgcgagcggtggcaacctctgcggatcggcctcgtggaactttttcactacgacagtgaggaattctggttccgtgacggccacttgctgctacgtggcaacaacggcaccggcaagtccaaggtgctgtccctcacgttgccctttctcttcgatgcgcaactgcgtccgtcgcgtatagaaccagacggcgacaacagcaagaagatggcctggaacctgctgatggatggctacaaacgccgcatcggctacacgtggatcgagttcggcagaaggcaagccgatggcgccgcgcgctacttgacgctgggcgccgggttgtcggccgtgaccggcaaaacacaggtcgacagctggttcttcgtgatcgaaggcaaatccggagaacaggatccacggatcggtcaggatctgtggctcacgaacgaacagcggatcgtgttgacccgcgagcgtttgcgcgatctcctggaagaacgtggtcaaggcacggttttcgagaatgcccgcaactatcgccgggctgtggatgaacgactcttccacctcggcgagaaacggtacgaggcgctaatggacacgttgatccaactgcgccagcctcaattgtcgaagaagcccgacgaagcgggcctttctcacgcgctaacggaagcgctgcctcccatgccacaggaattgttgaccgacgtggcagaggcgctgaaccagctcgaggaggaccgcgagcagttgaacaacactcgtcagctcgaacaagcggtcaaacatttcgaacaaagataccgggcgtacgcaggcacattgacgcggcgccaggcgcgcgagcttcgtcaggcgcagaccgcgttcgacaatgccagcgaggaccgcaacaaggcacagagcgcgttgcgcacggcggaggaggcagaagtcacggcgatcggcgctctggacgctgcgaagcgtacgctcaagaccgcccgagagcgcttggagacgctgcaaagtgatccggccaaccaggacgccaatcgtctgggccaagccgagagagatgcaagagaacgcaaggaggaagcggtcagggccgcggaacaacacaaatcggctcaactgcacctggaacgcgaacaggagcgcagccgggaatccggtcatcggaccgacgcggctcgaagcgagatcgcatccgcacgcgcgcaatgcgcgtccgacgcacagttcgcgggcacggccttcgccttgtccggcaacccgctcgtcacactccccctcgacgagctcgcacaactgtcggcagcacggctcacgtctgccatggtcgagttacgcgatgccgcaaacaaacgccgcgcgaacatccggcacctcgaacaacgccacgccgccatggccgccaaacagtcagcactccataccttgcaggcggcccaacgagatcgccatgcggaacttgaagaagcgaccgagcggcgtgccgaggccgatctggaggcggaaacggcaagcaacgcgctgatagacgcctggacggactattgcgccggcctggagcaattgcacctcgaatcggagaacgcactgtccgagctcgcaggctgggcagcccgtccccaaggcgccaatccggttcactcggcattgactgaagcctactcgcggacattggcgcaacatgccgctcgccagaccgagcttgatacgagtcggcgcgacctggatcgggaacgccgcgcgctgaccgacgaacaggagcggctcgccgcaggccaagacgcgaccccgcccgttcccgccgcccggggcgaaaacgtccgcgtgggacgcataggcgccccactttggcaattgatcgattttcgccctcatgtaacgtcgcaacagcgtgcaggcttggaggcgtcgctggaggcgtgcggcctgctggacgcatgggttgcaccggacggcaacgtaagcgatgcggcaggaaagccggtttgggatacgtactggcgacaacgtcccgctgccgcgggcgacagtctgctgagcctgctgtcgccgacgacgccggatggctgtacggtcgatccggcactagtggaggcattgcttgccagcgtcgcctgcgggcaggaagacgatctcgccgtcgaatcctggatcgccgccgatggacggttcaggttgggcgcactcacgggtgcgtggcacaagccggaagccgtctacattgggcataaagcgcgctcccaggcccggcagcgcaggatgcaggaaatcgccgtgcggcttcggcaactggatgcggaaaccgccagcctgtcgctggcctttgaaaggctggccaccggccgcgcgaaagccaaggaagagttggacggtgcgccttccgacacgtcgctccgtcaggcgattctggccgctgccagcgccggacgcgaggtgctgcaagctcgcactcggctcgagcaggccgacaaccaatgccgagcggcggaagatgaactctacacagcacgcgaagtactcgagaacgacgcaatcgacctgcaactacctctcgcccaggccgacctcgccatgattgccggcgcagtggagcgattcaccgatgcgagccacacgttggcccaggccggccgggaatggcgtagcgcctggcccgctcaccagcagcagcaaggacgcgaagccgaagtccggatcgcgctcgagcaacgaggagaagaactcagtaccgcaaacgaacgtgcggagaatgcccaggaacgctactcagtgcttcaggaagcgatcggcatgaaagttgaaacgttgcgtatgcaacttgatgaggcggcccggaatgcgcgcgattccgcgacggacgtcgaacacaaacaaacagccttgaccgcggctgccgaagcgcgcgccgtcgccgatactcaggcagccagcgcggatcgcgcgctagcagagcgaacggagatccgcgcgcaagccattgagcgattgcaacgcttcgccgagagcaccctgctggcctccgcgctgcccgacctgcctatcccaccagccggcgtgccctggactatcgatcccgcactgcagctcgcgcgccgggcagaacaggcgctggcgcatatcgaagacgacgacgcaaactggggccgcatccaacgtcaggtttcggaagacttgaccgagctgcaacgctcgctcagcgcactcggccaccacgccgcttccgagcccaacgattggggcttcacggtccacgtcacctatcagaatcgctcggaacgaccggacacgttagccgctcacttggccgacgacattgcgcagcgtagcgaactcctgtcggccagggagcgggagattctggagaaccatctgcaagcggagatcgccgcggagatccagcgcttgatgcgtgcagcggacaaacaggtcaacgcgatcaacgaagagttgtacaaacgtccgaccacgaccggcgtccgctaccgcttgcaatggctgcccattccgcccgaagaaggtggacccttgggcctagacattgcgcgtgaacggctgctcaatacgagttcggatctttggtccgccgaagatcgtcgcgtggtgggcgccatgttgcagcagcagatcgtcatagaacgagcccgtgcagaagacgatgcagccgcgtccggcttcagcctgaatgatcaattggcccgggcgctggactaccgtcggtggcatcggtttcgcgtgcagcgtcaacgagacaagagcagcaactggcaaaagctctccggaccagcgtccagcggggaacgtgcgcttggattgactgttccgcttttcgcggccatcgccagcttctacggccggggaggcaacccgcatgcgccccgcccgatgttgctcgacgaagccttcgcaggcatcgatgacgcagctcgcgcacattgcatggggctcatccgcgaattcgacctggatttcgtcatcacgagtgaacgcgaatgggcatgctacgcagaactgcccggcgtgtcgatctgccagttgcaacggcgcgagggtatagatgccgtcttcgtttcgcgctggacatgggatgggcatgccaagcggcgcgaagacgatcccgaccggagatttcccgatacatga

SEQ ID NO: 51586 - DNA, 1296 bp, Burkholderia ubonensis
atgactcagaccgacacgcccaccagtcctgacgctcggctccaacgcttgctcggcggcgccgagctcggctcgcttcgccaacgcatgcgacgctacttcgagcgagtcgacaacggtaccgccggcggcagtctgctattgactcaactcagccccgcggagcacgaggctttggggctgctcatcggccgacaatctcgcacttcccgatcgatacgtatcgatatcgaacgattggatatcacgctgcgagatgccggcatcgccaattcactgcgagcagcgctggaacgcatcgatggtccgatcgtgagccgcgcgctcgtcagggcaagcgcccacgcggagtgggctcgcgtggccgcacttggcccttggcatgacatgctgcacgcttggctcaaggcccctaccgcgctgggcttactcaagcgcctgtcgcgacaggatcctgcgacggggcaacaattgcttgaacgagcgagtgcaacactgcggcggttgccggcccagggcatcactcgctctcaactggcggcagaaaccctaggcaacgcacacgcgctcgacagtggcgagcccacggccacgatcgtattggccgcttggcggcacttggaacgcacggcagcccgcgaagacggctcgcgtgatgcgaacgagaatccggatgacgcgcagcagcccgacgatcgcgttcgggacatctgggcccgagcgggtgtgctggtcaacgagctggctcgtcctgccctgttcctgaatcttccggtcgccgatggcgactgggcgggaggcgcacgcggcgaaccgaactacgcatcgttgcgccggctgctgcgaacaccgccggcatgggccgtacgcgacaagacggtattcgtctgcgaaaaccctaacttcgtagccatcgcggctgatcacctgggcgctgcaagtgcgccgctggtctgtacggatggcatgccggctgcagcgcaacgaacgctgctgacccaattggtgcgagctggagctcacttgatgtaccacggagatttcgactggccaggagtgcagatcgggaaccaggtgatgggcacctggcatgccaacccttggcgatttgccgcccgtgactatgaggctgccgcagcgaatccgtctccagtacgacacgagttgagtagcgcttcggtgtcggcatcatgggacgcgacactagccacggtaatgcagcgccatggcatcgccattgccgaggaagcagtagcggcggcgttgcttgaggacctggggcgaaggcggcagtag

SEQ ID NO: 51587 - DNA, 1533 bp, Burkholderia ubonensis
gtgcagtcaaatgcgacgacagcagaacttttcaagcatttgagcgccgagaagtccacgttctatcgatgcatcatggatgtcttcgccgcagccaagcggcaatacaggcttcagcttcgtcccgacgaagtactcgcggaggcgaactggcccgatgggatacctcgtatcgaggaagtcaccgcagccttgacccagttgaccgactgggggaatctcgagtcccaaccggatacggcacgcgtttcctcgctcagcgacttctaccgcgcacgcttcctttaccggctgtctcatggtggagaagccgtggaggcaagcctcgccgtattctttcgaacgctacagcgacgggccgaattgcaaaccgtagcactggaggacattgccaatcgcctggaggccctacggcaactgatcgacgacgatacacctgaaaatggactcgacgtcgccaaaacgcaccaactcctgcgcgacctcgtcagcgtgtttcatgatctcgccgaaaacgcacaggccttcatggcaggcgtcgcgcgaagcctggagcttcagcaggccgaagcgaacgctgtcgttgcgtacaagcgtcgcctcatcgattacctcgaccgctttctgggagatctgatacggcgctccgactcgatcgcccgactcatcgaggaactggccccgcgcatcgattccgtcttcctccaagtggccgagcgagaagcgcaggatgccgctccggacgacatgcaaagccaagccgacgaaaagctgaggcgctggcgggcctggcgcgaacgctggaaaggtctgcgcggctggtttttgtcgacgggaatggagccgcctcaggccgagttgctgcgcgcacgcgcacgcgctgcaatacccctcctcttgggcgccatcgccacgttgaacgagcgccgcagcggacgcagcgaccgctctgccgacttccgcatgctcgcccactggttcgccgcgtgcggcagcgacggtgaagcgcatcggatggcgcgggcggccttcgcgctcaatcccgcccggcactattctctgaacccccaggccgacgacgacttgcccgccagcacgccgtgggcagacgccccaccgctccagatcaaccctcgcttgcgcgagtacggcgaagccgctccccgcggcccgctcccgcgagtgcgcgaccgcagcgcagagcgcgcgctcatggccgagcaactggcagaagaatcgcgccaggtcgatgcggctcggcaacgcttggccaccgggcgtccaattcgactatccgaattgggtgaactggacgctcacgccttcggcctgtttctcaatctcttgggagaggcattgaccgaacaggcgcatcccgaccagaccgtcgagcgccagaccggcgacggcttgctctacatccgaatggaaccgctcgacatcaccacgagggcatgcatcacgacccctgccggtgtctttgcgggccgtgatcatcttctcacgatcgcgcttacacgaggcgcagcatga

SEQ ID NO: 51588 - DNA, 1275 bp, Burkholderia ubonensis
atgactgcacgttcgtcatggaggcacgacagccagcgaatcggcgaactccagcgtgcccagcaccaagaggagttccgccgagcgttgcgtgccctgttgttacaaccgctgatggcgccgaatcacgacgcctttccggcggtacgccgccaagccgaacgattgcgcgagtggtttgcacgagagaccggctggcctttacatgtcgagcgtgagagcgcccgactctacaagcgacccgcggaccttgccaacgataagcgggggctgccgaactacgaccgacggcgctatgcgttgctctgcctcgcgtgtgccgtgctcgagcgagccgatccacagatcaccctgcagttgctgggcgaacgcctgatgcaactggcgtccgacccagcgctggtttcttgtggctttcacttcacgctcagcaccgctactgaacggcgcgacctggtcgccgtgtgtcgcacactactcgacttcggcatcttgcagcgcgtcgccggcgacgaagaaaatttcgtccacgaaaacggctggatgcaatcggacgcgctctacgatgtccagcgacgcatgctggccggcatgctagcagccgtgcgcgggccgtcgacgtggcgtgtcgaagatgcaccgatcgatttcgaggaccgattgcgctcgttggtggcggagcatgtggccgacagcgagcaagggcaccgcgacgcgctgcgtcactatctggcgcgccgactgctggacgatcccgtgatctacagcgcctccctggatcccgagtatctggcctacttcgtgaatcaacgcggcgcgatggcagcgcgtctgtgcgaagccaccgggctgactgccgagcagcgagccgaaggactggcactaaccgatgagtcgggggaacttaccgacatcgcgatgcctgcagaagggacggaggcgcacgcaacgctcctggtcgccgaatttctggccgctcgcctgcgagaagcgccagagatcgcattgacttcccacggcgctgtcgccgccttcctgcgcgacgccgcggagcagtacggtcgctactggcgcaaatcggcgcgcgaacctggcgccgaaatagagctggccgaaatcgcactcgacaggttggaacggttgcaactcatcgcccgaagccatcgcgagatccgacctctgccagccatcacccgcttcgctctcggcgatcccgaggttcgttcgaaaacaactgacgccgcggctcctgaattaacgcttatcgacgcatga

SEQ ID NO: 51589 - DNA, 4182 bp, Burkholderia ubonensis
atgaccgacaccctcttcgatgcgcctcaaaccccgcgcccagtattgccggagcctcaacgcgagcggtggcaacctctgcggatcggcctcgtggaactttttcactacgacagtgaggaattctggttccgtgacggccacttgctgctacgtggcaacaacggcaccggcaagtccaaggtgctgtccctcacgttgccctttctcttcgatgcgcaactgcgtccgtcgcgtatagaaccagacggcgacaacagcaagaagatggcctggaacctgctgatggatggctacaaacgccgcatcggctacacgtggatcgagttcggcagaaggcaagccgatggcgccgcgcgctacttgacgctgggcgccgggttgtcggccgtgaccggcaaaacacaggtcgacagctggttcttcgtgatcgaaggcaaatccggagaacaggatccacggatcggtcaggatctgtggctcacgaacgaacagcggatcgtgttgacccgcgagcgtttgcgcgatctcctggaagaacgtggtcaaggcacggttttcgagaatgcccgcaactatcgccgggctgtggatgaacgactcttccacctcggcgagaaacggtacgaggcgctaatggacacgttgatccaactgcgccagcctcaattgtcgaagaagcccgacgaagcgggcctttctcacgcgctaacggaagcgctgcctcccatgccacaggaattgttgaccgacgtggcagaggcgctgaaccagctcgaggaggaccgcgagcagttgaacaacactcgtcagctcgaacaagcggtcaaacatttcgaacaaagataccgggcgtacgcaggcacattgacgcggcgccaggcgcgcgagcttcgtcaggcgcagaccgcgttcgacaatgccagcgaggaccgcaacaaggcacagagcgcgttgcgcacggcggaggaggcagaagtcacggcgatcggcgctctggacgctgcgaagcgtacgctcaagaccgcccgagagcgcttggagacgctgcaaagtgatccggccaaccaggacgccaatcgtctgggccaagccgagagagatgcaagagaacgcaaggaggaagcggtcagggccgcggaacaacacaagtcggctcaactgcacctggaacgcgaacaggagcgcagccgggaatccggtcatcggaccgacgcggctcgaagcgagatcgcatccgcacgcgcgcaatgcgcgtccgacgcacagttcgcgggcacggccttcgccttgtccggcaacccgctcgtcacactccccctcgacgagctcgcacaactgtcggcagcacggctcacgtctgccatggtcgagttacgcgatgccgcaaacaaacgccgcgcgaacatccggcacctcgaacaacgccacgccgccatggccgccaaacagtcagcgctccataccttgcaggcggcccaacgagatcgccatgcggaacttgaagaagcgaccgagcggcgtgccgaggccgatctggaggcggaaacggcaagcaacgcgctgatagacgcctggacggactattgcgccggcctggagcaattgcacctcgaatcggagaacgcactgtccgagctcgcaggctgggcagcccgcccccaaggcgccaatccggttcactcggcattgactgaagcctactcgcggacattggcgcaacatgccgctcgccagaccgagcttgatacgagtcggcgcgacctggatcgggaacgccgcgcgctgaccgacgaacaggagcggctcgccgcaggccaagacgcgaccccgcccgttcccgccgcccggggcgaaaacgtccgcgtgggacgcataggcgccccactttggcaattgatcgattttcgccctcatgtaacgtcgcaacagcgtgcaggcttggaggcatcgctggaggcgtgcggcctgctggacgcatgggttgcaccggacggcaacgtaagcgatgcggcaggaaagccggtttgggatacgtactggcgacaacgtcccgctgccgcgggcgacagtctgctgagcctgctgtcgccgacgacgccggatggctgtacggtcgatccggcactagtggaggcattgcttgccagcgtcgcctgctggcaggaagacgatctcgccgtcgagtcctggatcgccgccgatggacggttcaggttgggcgcactcacgggtgcgtggcacaagccggaagccgtctacattgggcataaagcgcgctcccaggcccggcagcgcaggatgcaggaaatcgccgtgcggcttcggcaactggatgcggaaaccgccagcctgtcgctggcctttgaaaggctggccaccggccgcgcgaaagccaaggaagagttggacggtgcgccttccgacacgtcgctccgtcaggcgattctggccgctgccagcgccggacgcgaggtgctgcaagctcgcactcggctcgagcaggccgacaaccaatgccgagcggcggaagatgaactctacacagcacgcgaagtactcgagaacgacgcaatcgacctgcaactacctctcgcccaggccgacctcgccatgattgccggcgcagtggagcgattcaccgatgcgagccacacgttggcccaggccggccgggaatggcgtagcgcctggcccgctcaccagcagcagcaaggacgcgaagccgaagtccggattgcgctcgagcaacgaggagaagaactcagtaccgcaaacgaacgtgcggagaatgcccaggaacgctactcagtgcttcaggaagcgatcggcatgaaagttgaaacgttgcgtatgcaacttgatgaggcggcccggaatgcgcgcgattccgcgacggacgtcgaacacaaacaaacagccttgaccgcggctgccgaagcgcgcgccgtcgccgatactcaggcagccagcgcggatcgcgcgctagcagagcgaacggagatccgcgcgcaagccattgagcgattgcaacgcttcgccgagagcaccctgctggcctccgcgctgcccgacctgcctatcccaccagccggcgtgccctggactatcgatcccgcactgcagctcgcgcgccgggcagaacaggcgctggcgcatatcgaggacgacgacgcaaactggggccgcatccaacgtcaggtttcggaagacttgaccgagctgcaacgctcgctcagcgcactcggccaccacgccgcttccgagcccaacgattggggcttcacggtccacgtcacctatcagaatcgctcggaacgaccggacacgttagccgctcacttggccgacgacattgcgcagcgtagcgaactcctgtcggccagggagcgggagattctggagaaccatctgcaagcggagatcgccgcggagatccagcgcttgatgcgtgcagcggacaaacaggtcaacgcgatcaacgaagagttgtacaaacgtccgaccacgaccggcgtccgctaccgcttgcaatggctgcccattccgcccgaagaaggtggacccttgggcctagacattgcgcgtgaacggctgctcaatacgagttcggatctttggtccgccgaagatcgtcgcgtggtgggcgccatgttgcagcagcagatcgtcatagaacgagcccgtgcagaagacgatgcagccgcgtccggcttcagcctgaatgatcaattggcccgggcgctggactaccgtcggtggcatcggtttcgcgtgcagcgtcaacgagacaagagcagcaactggcaaaagctctccggaccagcgtccagcggggaacgtgcgcttggattgactgttccgcttttcgcggccatcgccagcttctacggccggggaggcaacccgcatgcgccccgcccgatgttgctcgacgaagccttcgcaggcatcgatgacgcagctcgcgcacattgcatggggctcatccgcgaattcgacctggatttcgtcatcacgagtgaacgcgaatgggcatgctacgcagaactgcccggcgtgtcgatctgccagttgcaacggcgcgagggtatagatgccgtcttcgtttcgcgctggacatgggatgggcatgccaagcggcgcgaagacgatcccgaccggagatttcccgatacatga

SEQ ID NO: 51590 - DNA, 1296 bp, Burkholderia ubonensis; identical to SEQ ID NO: 51586

SEQ ID NO: 51591 - DNA, 1554 bp, Frankia sp. DSM 45899
gtggaggagaacgggggcagcgcagcagagggcgaatccgctgtgcaggacacggcggccaggcgtgcgctgttcagctacctcaccgccgaggccgccgatgactacatggcggtgatgcggctcttcagcgagacgctgctggcggacctgtccgcggccgaggtcgccatgcagctggtcgaacgcggccgtgagctcgacgcggacaccgtcgagacccggtgccggcagttggtcatctggggcaaccttgtgccgtctgtacgtgagacacgcgtgcgcacagtcgccgcgtaccaccgttcccgatcccgataccaggtctcgaagctgggcggccggctccaccgcgaggccgaggagatcatgcgggccacggagggtgctcgggaggtcgcgcgcgaactgctcgcgcgtgtcgcggaaaccctgcggctgattcttctgcaggtctcctaccgcgaacgcccgatcgattccgagctgcttgccggccaggtcaccggtgtgttcaacgatcaccgcctgtttcacgagtccgtcacggacttctacgcctacctgtccggcgtcctgacccgttatgacctcgccggtgaggaatacgcccagttcaagaacctcctgctcgactacgttgacctgatcggtgccgacgtctcacggaacgcgccggagatcctcggccagctgaagacgctgcttgccccgtccctcatcgacaccctgctcgagaatctgcccgagccaccggcgacgggcgatgctctgatcgtcgttgaacgtctgccagggcgtacccgtgaggaatgggagcaactcgccgcgtggtacggggcgtcgagcgtccgttccggcccggaacagctgcgcgtcgcggctcgccaggcgctcggccagctgatcgcgaacgcgaagcggatgctcgccgcatccgggaccggagtttcgcgtcgtgccgacctgctcaaactcgccggctggttccacggcgcggacagcgagaccgcacacctccttttcgacgcggctttcggtgcgtatccggcgcgccacctgctgctcgggcccgaggaacaggacctgcgggctgggccgagcacgtcgtggtgggtagccgcgcccgttgacgtcccggtgtcgctgcgggagcgcggtgatcgcaccgtgcggggccgggcgtcccgggtacccgacacgaaggagcagaccgatctgctgatgaacgcggcgcgggaacgtgcgcaggcccgggaggcagcggccgcggagctgctcgcggccggctcgttgcatcgcagccggctcagccgagccgcccgtgacctgctgctcgagctgctacccccggtactcagcgccacggccggcggtgaggcggaggccgaccaccacgcctcggatctgaggcttgcgttgcgcggtgttccggcacgcggccagctgacggtgatcaacggtgacgacggaacactgacggttgacggccttctgctgtcggtcgtcccgctcgccggccccggccgggcgcgtacggcggcgagcgcatga

SEQ ID NO: 51592 - DNA, 1242 bp, Frankia sp. DSM 45899
atgaggcccacacccgagacgggcaccgcggccagctcggcgcgggaacgagtcgaggcggcccgcgcgctgctggcacacccggtgctgaccgccgcgtcgcatcccgacgagctgtcgttcgtccgcctgcacgcccccgcgctgcgcggcatgttcaaggcgcagctgggctatgtgctcgtcgtcgaggcgtcgttcgcccgcctgttcaaggcgccgctggcacccggcgcaccctcccggcccgcgcggcgccgcgacaacagtccgttcgctccggtcacctacacccatctggctctgctctgcgccgcgctgctcgctcccggaaccggcgagatgatcctcatctccgcgctgatcgagcaggtgcgtgcggacgcggcgaccatcggcgtgcccatcggcgacacgctgccggagcgccgtgccctggtcaccgccgtcgagctgctggtccgctggggagtgctgatcgaagccgatggcacggccatggcctggggcgaacggcagatcgaggaggctctgctccatgtcgcccgtaaccagctgccgcatctgctcgcccgctcgctgacgggtgttgccaccccggacgagctgctcgcacccgacccacaggcggctgagcaaccgcggcgctcgctgcgccgtcggctggtggaaagcccgctcgtccgtcgcgaggatctcaccgatgccgagcgcgacgtgctctcccgcgaacgctccgaactgacccgggcgctggccgagaacttcggcctcaccctggaggtacgcgcggagggcgcgctcgcctacgacgccaccggctcgctgacggacgagccctttcccggcacgggcacgatcaggcaggcggcgctgctcctggtcggcgcgctgctcgcggagctggagccgcggcccggtgacaccgccgtactgcgcgatgggcgcgcggtcgccggtctggtggtcggctggcccgacgtggaggccacgctggcccggttgtcgtcccagtacggcaaggcatggagctcggatgcgctcgacgacccccggctgctgcgggactcggtcgcggcgacgctcgcggaggtcggcctggcgtcgatcctgcccggcgggttggtgatccatgcggcagctgcccgctaccgcccccagccgatcatcgccccgccgacccgcgcggcccgccgcctggacaaggggcgggcggcctaccacccggagctggagctgtga

SEQ ID NO: 51593 - DNA, 4194 bp, Frankia sp. DSM 45899
atgcagcagactctcgccctcaccgagggcaccgaggacaggttcggcccgacaccgatcagacgtcatccctatcgctggcggctgtcccgcgccggtttcgtgaacgtgtggcactactacgacaacaccttcgacctctccggcggccggctgatcctccgcggcacgaacggttcgggcaagtcccgggcgctcgagatgctgctgccgttcctcctcgacgcggaccggcgcaacatgggcaccgggacggcggtccgcatggaggacctgatgaccgccggtgccggggagcagacgaaccgcctcggctacatgtggctcgaactgcgtcgggacgtcgaggccgacgaggacccggccagcggatacctgaccctgggagcccttgtccggttctcggcgagcacgaaggaagccaaggtctggtacttcacgacggcactgcgagtggggcacgagctgtcgctgctcaccgccgaccgcaagccgctcggccgcaaagaactgggccaggccgtcggcgaggaccggatcagcgacggacccgagccgcaccgcgaacgggtacgcgccgaggtcttcggcctgacgggcggcgatgccagcaaggaacgcttcaacgggctgatgaaactcctgcacaccctgcgttccccggacgtcggcaaccggatcgaggaaggcagactcccgcagatcgtctccgacgccctgccgccgctgtccgaggaggcactgacggacgccggtcagcagctcgacggcctgaccagcacccgtgacgagcagcaacggctcgaagccgcgcacgggcaggtcgtggcgttcctcgacagctaccgcaggtacgtggccggggtgctgacccggtcgctgaccggaaccaggcagcgtgcggcgagctgcctcgagaccgaggccgaggcggtgcgcaggcgcgcgatcgccaccggcctcgagtccgagctcctcgagacgctggaacggcgtcagtttttggccgaccaggtctccgaactcgcggcggcactggaggcgctcaaggagtcggactgttatcgcggtgcgaaggagctcaccgagctgagcgcgacggtcagttcgctcgccgagaccgcccgggccaagctggagttggcccagctgcgtcgagagggcgaggtggagctggtcggcgcggcgaacgccctgctcaccgacatgtcgaccgcggtcgacgagctttccgagcggatcgaccaggcccgcgaccagctgaccagggtgcggctcaccgcccatgagctgcccgcgtcggtcggtctggtccggacgcccccggagcgacggagcgaacttgttcgcgtctatcgggacgcaccgcccgtcccgacgctccggccggcggcggacgtgccgcgcctggtcccggcggatctgatcggcctgcgggccgcggcgggcagcttgcgggaggccgcggacctgcgggccgcgcgtgccaccagccgcgtcgcggacgcccggcagctgtccgacgaccgggccggcgttcaacgggccgtggagaccgcggacgacgcggccgtcgaggcggagaccgcggcgagccgcgccgagcagcaggccgacgagcgcgaccgagaggctgtcggcctggtcgagagctggcgggcctggctggggaaccccggaacgggagatctcctgggcgacgtggactggtccgcccagccgagcctcggcccgttgctgctggatcggctggtgctgtgcggcaccgaggcggacggcccggtcgacctctccgagctcgaccgggccgcggacgacgccgccgccggtgcccgggaccgactggcgggcgaactgcatcggctcgacgccgacgacacggcggaccggcgtgtggtcgagctgctcgtcaccgagcggcggcagcttgaggcgtcccgcgacgacccgccgctcgagccgttctgggtcaccgccgttcgaggcgccgccctgtggcagtgcgttgacttcgcacccggccagtccgcagacgagcaggccgggatcgaggcggcgctgctcgcctcgggcctgctgaccgccaccatcgacgcccgcggccagctgaccgccgccagcggccagctgctcgtctcgccgatcggcccccgggccgccgtctccgtggccgcaaagctggtgcccgacccggctggaccgatcgaacccggggtgatcagcgcgctgctgggacggatcggtctggccgacccgtccgccgccatgtgggtcgcgcccgacggcagctgggcgaacggcccgctgcgaggccgccacacggttccggccccacggcacatcggcgccgccgcccgggaggcccaccgggtccagcgcctgcgtgagatcggcgcggagctcgaggagctggccgcggcggcgcgggcgcgggtggaacggtgcgcccgcgtcgaggagcgcaagaaggcgatccggggccacctgcggtcggcaccgcggtcgaagccgctcagcgacgcccgggtccgggcggcctccgaggagcggcaggcgacccaggccgcgacgaaggccgccagactccgggcgaaggccgaccggctggccatcgcgctggccgagagtgagaaggcgcatcgcgccgcctgcgccgagttcggcctgcctgttgacgccgactcactggtcgacctggcgcgtgccgcgaccgttgcggccggcacctgcggggcggtgatcggccaggtcgacgtcctcaccggcctggcggagcgacaccagcgggcggtgggcgccctggcggccgcggccgagccgcgggggcgggccgagggcgacgcggagctcgcctggaacgagtggcacaccggcgacacccggatccaggcgctgcgtagggcgctgggggccgaccccgcacgggtcctcgaggagctcaaggccatcgaggctagccaggtcgcggcgaagcggaaactcggcgccgcggagacggccgtcggcgagctgcggaccaccgccgcgaccgcggccgcgcaagccgacaacgccgatcagaaggtccgcgacgagcaggccgccctcgccgagcaggtggacgccgtgcgggcgcagctcgggcaacccggtgtcgtcgcctccgcgttcacggcgaagcccgccgaaccgttcgccgaccacaccgcccgggccgtcgccgcggacgccgccgagctgctggccggcctgcgcaggtcgcggatcgaggagaacgcgctgatccgcgcccaacaggtgttcgaccgggagatcgcagccagctacgaggtgatcgtcaccaggcacagcgaggtcctgctctacgaactggccgacgcggacggccgccggccgctcgtcgaggccgccgccgacctggcgcggaagtgcgaccagggccgggaggcactgaccgaacgcgaacagcgggtgttcaccgagttcatcctcggtgaggtcggggaggagctccgcggccggctgtaccaggcggaggatctcatcaccgcgatgaaccgcagcctgcggtccatccagaccagccacggcatcggcgtccggctcacctggaagctcgccgcggacaacgacgccgctgtcagccggatcaggcagctcgtcatgaccgctgcgtcggttcgcagccaggctcaggacgccgagctgctcgagctgctgcgcgagagggtcgccgcggaggcgctcgccgaaccgaacgccggatacgccctgttcctacggaaggcgctggactaccgcacctggcacaccgtggaggtcatcatcaccgggccggagccgggccaggaacgccggatcagccggcgtgcgaagctctcccagggcgagacccggttcgtctcctacgtgacactgttcgccgcggtcgacgcgtacctgtcgggcctcgacgacaccgccaccgcactgcggctcatcctgctcgacgacgccttcgccaaggtcgacgatccgacgatcgccgagctgctcggtctcctggtccgcctcgacgtcgacttcgcgatgaccggccatgcgctgtggggatgcgtgccgcaggtgcctgccctggacatctacgagatctgccgccaggacggcggcggcccggccgcgacggtgcacgtgcgctgggacgggcgtaaccgccacttcctccactccgcatga

SEQ ID NO: 51594 - DNA, 1434 bp, Frankia sp. DSM 45899
atgacgtccccgcccacgggcgcgctgcccgcgcaggtacaggcctatctcgaagcgcccgtgctgcggcccctgtgggtcgcggcacggttccgactggaacgcaatggtctgcaggcgaccggaaccctcaaagtggacctggacgagaccgccgccgcgcagctgtccgggctgctgggcgtccgggtcacggccgggacgaagcgtcccgtcggactcgccgaactcgacgccgcactgcggtgttcgaaggcgggccggggcctggtgtcggttctggagcacctcgacggccgccccctgcacgaccggaccgccgcgcgccgcgccaccgacgagcagtgggcacaggcctggcgggggctcgacgaggcgctggccatcgcgggcctcgccggggtcccctgggtctcgggctggatcgcggatctgaggcgcaccggcattctgacgcgcgccggagcagacaccgcgggccgcgccctggcctgcgccgccagcaccctcggactgttggcccgcacgtcggcgacgggcctcaggacaggcttcaggacgggcctggagacgggccccgagacgatgtcggccggaccgttcggcggcgacgaccccgtgggctgggagatcgcctccctcgcgaccgcgacgacgggtgacgctcatggcctggacgactcgcggctgacggcggcggccgttcttcgggccgcggcgatcgcctcaggccgcccggcgccgttgacctctgcacaacggcgcgaactgtggcacgccctcggcgtcgccaccgacggcgtgtccggcacggtcctggtctggtcgcttcggccacctggcgacgacgcctggtcggcgatgatgcgccagcgccgggacctcggcctcgtcacccacctcacgctgcatgaactcgggcgcgccggtgaggtcgccctgggctcaccggaccagacggtgtcgatctgcgagaacccgcaggttctgcaggccgctgcccgggccggggcgccagctccgctgatctgcctctccggcagtccagcggaggtcgggacacagctggtacaggccctcgtccgtggcggtgtcccggtgcgctaccacggggacttcgactggccagggatcgccatcgcggggcgcgtcctcgcgctgggagcggttccgtggaggctgtccgcgagcgactacctgggggcggtggcaggcgtcgaagcctccgggggcgtcccgctcgcgggcagcccggccgcgactccgtgggatcccgacctggctacggcgatgggccgcacgggggtcgctgtccacgaggagtacctgctcgacatcctcatcgccgacctcatgcacgacacggacgccagagcggcggagtgtgacgtccatcctgccgccgcgccggctgcccttcctcgaacagggtga

SEQ ID NO: 51595 - DNA, 1521 bp, Bradyrhizobium sp. BR 10303
atgagcggtcaattcgagatcgccacgcatcaggaccttttccgtcacgtcaccgctgataatgcggcgctgtaccggtgcgtcctggatgtgtgcgcggcagcagagcgtcaactgctgctttacgtccggccttccgagattctcgcgcaagcaaagtggctgggcgaaccgccgaccacttccgaactggacgccatcctcgacaagctgaccgagtggggcaatctcgactgccaggccgacaattcgcgcgtaacctcgttgagcgggttctatcgccgccgcatgctctaccggctttcgaagggcggcgtctccgtcgagatggcgctcagcgccttcgcgaaggaaatgcagcgccgcggcgaactgcagacggtcgcgcttgaagacatcggcaagagcctcctcacgctgatccacctcggccgaagcaacgatcctgacgtcgccaagatctacgagaccctcaacggtctgatgaccgtgttcaacaacatggccgagaccgcgcgagccttcatggccggcgtcctccgcggtgtcgatttgcaggacggcgacgtggacgctgtgctgaactacaagcagcgtctcatcgagtacatccgccaattcgttggcgacttggtcagccgaagcggtgcgatttcggaagacatcaatgcccttcagttgcgtatcgacgcgatgctccagtcggtggcccgccgtcaggcacgcaacgcccctccgggcgaagagctggcggcctacgaagcggaactgaagatgtgggacgagcggtggcagggcttgcgtatgtggttcgtcggcgggtcgaacggcgagcggtcccagagcgaacagctcagaagtcgcgcccgcgccgcgattccgcaactgcttgcagcaatcatcgcgatcaacgaacgccgaagcggccgcagcgaccgctcggcggacttcaagagcctcgctcactggttcctcgactgcgacggtgacgaagacgcccaccgacttgcgcgagccgcgtttgcgctcaacccagcgcgtcactacgccgaaaacaccgccgctgctgacgttaccggtgtcattccgtggcataaggcgccgtccatcgtcgttccgctgcggctccgcgagaccggctacagcatgccccgcggacggctcccgcacgttcatgatcgaagcgccggacgcaagaagctcgaagcgcaggtcggtgaagagcatgcgcagatcgaagcagccagacaaaaatttgcaacagggtgccccctgctcctctcggagctctggcgtctaaactcgcacgagttccgatttttcctcgatctattgggcgaagccatcgcgaccaaggccgccggcgacgatggcgtcaccgagatccagtccaacgacggtctctatctcatccggcttgaaccgctcgacgcggacacggaagccgaaatcgtcaccgaagacggcgtgttttgtggccgtgaccaccgcatcaccatcacaccgacggatgccgcatga

SEQ ID NO: 51596 - DNA, 1242 bp, Bradyrhizobium sp. BR 10303
atcctgcgccagcaggagacgcaggaacacgccgagcgcagggaggccgttcgcgcgctcctgatgcgcccgttactgacgcccacaaccgccgaagcaagagaggctctccgtctggtgcgacgtcactccgcgtatctcagggagtggttcgcccgcgaggccggatggccgctgcgcgtagagcgcgactacgccagactgtggaaacgcccgagcgatacaagcgatccaacgcgaggatgggcaaatttcaaccgcaggcgctacgcgatcttctgtctggtgtgcgcggtgctcgcgcggagcgaaccacagatcaccctttctgccctgggtgatcaaatcctgtcccttgcaaaggataccgatctcctcaaccgcggtttcattctcgacatggcagacatccacgaccgacgcaatcttgcatcggcctgcgtcgcgctcggcgaactcggcgtactcaatgccatcgatggagacgccgagtcgttcgtcaagtccgggcagtcggaagatcggtcccgcgacgtcctctacgatgttaatcgcgggccgcttgcgagcattcttgcatgcgttcgtgggccatccacgtggcctgagaacgatgaaccgaggacaaccgtcgatcggatctccgccatcacggcagaaattcagccggagaccgacgagggccgccgcgatgtcagccggcaccgcatctcaaggcgccttctcgacgatcccgttgtgtacgacggcacagttgacgaggccgacatgcagtacttcatcaatcagcgcggcgcgatggccaaccgcctcgcgcttggcaccggccttgtcgtcgaactccgttccgagggcattgcactttgcgatccggacggcaattgcagcgacgtcgcgatgccggcggacggcaccgatgctcacgtcacgctccttgtggcagaccacctggcacatgccggcggcggcgttcccgatcgcctgcgaatcgaaaggttcgtggccgaatcggccgagcgatacggccgatattggcggcgcagcgcccagggcgaagccggcgcgcgggagctgacggcgattgccatctaccgtctcagccaactcaagctcatcaccatcgaaggcgaccgcatcggggttctgccggcgctttctcgctacaaactgggcgacccggacatcaagaatcgcgatgacaacgatcggctgcccgacgtttccgaggaggccgacgaatga

SEQ ID NO: 51597 - DNA, 4137 bp, Bradyrhizobium sp. BR 10303
  modified_base (1555)..(1559): a, c, t, g, unknown or other
atgaactccgttcttgctttcaacccacaaagcaccggccccgtcctgccgcttcccggaaaaaagcgctggcagcctttgcggaccggcgtcgtggagatatttttctatgacgtggaggaattctggttcatcgacggacacatcgtgtatcggggcaataacggcgccggcaagtccaaactcttggcactcacgctaccattcctcttcgacgccaatctgagcccgttccgcgtcgagccggatggcgatcgaaccaagaagatggcgtggaatctcctcatggggaggcacaagcgccgcgtcggatatgtatgggtcgagttcgggcgcgtcgacgaggaaggcaacaaccagttcgtcacgcttgcgtgcggactggaagcggtcgaagaccgcgcgaacgtggaaagctggttcttcatcatcgacggaagtcgtgtcggtcaggattgctcgttcatcacgcccgaaagagccgtgcttcgccgaacgcagctgaaggatgggctctccgacaaaggcggacacttcttcgaccgcgccgacgactaccgccgtgccgtggatcaaagacttttccaactcggagaggaacgttaccgcatcctggtcgacaccctcattcagcttcgccatccgcagcttacaaagacccccgacgagacgcgtctttccaacgccctgactgccgccctacctccggtcgcggccgaaatgatcgacaccatcgcggaagccatgagccgccttgaagaggatcgcagccagctcaaatcctatgaattggcccacgccgccattggaaaattcgagcaaacctaccgccgctacgcaggcgcgcggattcgcacatttgcgcgcgaggtccgtatcgcaagaaccaagtttgaagaagcaagcgcggaggtaaacaatgccgacgcgcaattggcctctgcgcttcatgaatcgacagcggctgaaactgctaacatcgccgcgaaacgccaggccgaggcggcggatgcggcatacaaaggcatccttcaacatcccgacggcctcaaggcggcagatcttgcgaccaaacggaacctggcggaagaggccgaggggcggctgactgcatccgagaaacgctccgcaacggcggctgcagatctgaagacggagtccgaacgccagcaaacggcaagggccgacctagaccgcgcgatggaaacgcttgccgtcaatcgaagcaaggcgctcgatctcgccagatccgtcggcatgatcgcacaatttgagcatgccaagtcctactccgcgtggccgaacgaacttgggcgcgatgggcagacctctctccaatccgagcgtggcagtctactgaccgcgatcaggggccgcagaagcagcatcgatgcggttgtcgagctgcttcgcgaagtcgacaacaagatttcggcgctggcgaacgcggagcgcgacgagaatactgcccgtggtctgcttgacgaagccggcaagactcttgttgccgccgagaatgcgctgaacggtgagatcgacgctctcggtacggcgnnnnngtggcgccgccatatcggcgcctgcggacatctcatggcaatagcgaccgaggacgcagtggatgccctcgtcgaatgggctcactcgctcgaaggcgaaaacccggccgcgcgcgagctcatagccgagtgccgacttgcatacaaacggctgaccgaggcgctcgccacgctgagacatcagaaggctgcggtgcgcgctgaactggaatccatggcaaagcagatcgcggatctgcaaaccggctcattcgagcgccctcacatcccgtacacacgcagggctgatcgcaaggaccgcaagggccaagccttgtggcaggccgttgactttgtatcggaggccgacgacggcgttcgggctggcctcgaagccgcacttgaggcatccggacttctcgacgcgtggatcctccccgacggcaggatgttcatcggcgagaccgagcatgacgtgtcgcttgtttcgaggcccttggtcaccggtaggaccctcgccgactggcttgtccactgtggagaaccgtcggtccaggatgccgtcgagacttttctgtgcgcagtctcctgcaccgacatcgacgatggcgccgagatgtgggtatcgccggccggccacttccgcctcggcgctctctcgggcacatgggagaaatcccgcgccacgtacattggccattccgctcgggagagagccagactgaaaaagatcgaagagcttgaggccaccgcggccgctctgggcgagcaacttgccgatctcgaaaccgccatcacgagcaatgccgccacgacggaggccatcgaacaggtcgagaggacctgcccgtcggacaccaatctccgcaagtcgcacgacaccgtgcgctcggcaaccaacgatctacaccgggccactgaaaacgtcgcagcaagggcaaacggtacagcggtcgcacgacaggctctgaaagcgtgcagtgagtccgccgagcaggccgcgctcgacaccgctcttccgtgcgacaagcgggctctcgaacaggcccggattgcctgcgatagcctcagcgaagcccacctcgtggtcgtcgaacattgctcgaattccatccgcgccgcgcaaaaccttcaagacaccaacgagcgtgcggaaaccgcccggagccgccatcgtgccgcagcagaagacgtcaaagccgcggcgatatcggcgacatcggcgcgcgccatatacgatgctctcaaggaaagtgtgggagcaacctccgaacagtgggaacgccgcctcattgacgcgcagaagcgtctcaatgatgccagggccgacgtggacagcacggacgggcgccgactctcggcggtggccgtccatacccaggcggtcggtgcgcacgaaactgcgacccaagctttggcgacgcgcgtagaggagcggcagcgagcggcaagcaatctgcaaacgctcgcagcaacaggcttgatggccgccggcgcccccaacgtagcgttccccgacaccggccggacatggacggtcgacgagacgcgggggcttgccgcagaactgaaccaagcgctcagcgacatccgcgataacgagtgggacggcctgcagtccaaaatctacggtgaattcgtcgatctccagaatgcactcgctcaactaggatacgtcccctacagtaacaatgtcgatggattcggcctggtggtcaccatcgcagtccagaacaagaccggactgtctcccgctgaggtccttgcccaggtcgacaccgagatcacgcagcgccgaacccttctcaccgaaagcgagacgaagattctggaggaccacctccagtcggagatgtccgtccaaatccggaatctcatccaggacgccgagcagtatgtggaccgtgtgaatgcggagattgaaaagcgcccgacctcaacgggcacctatttccgcctaaggtggatccctctcactgaagcgcaaggtgcccccgccgatctggaggacgcccgtaagcgtctcctcaagacgaacgcggatctgtggaccgagaatgacaggcaagccatcggggccatgctgcagcgacgcatcgagcaagagcggctcaaggccgaagagtcgggcggcagcagtctccgcgagcagctttcagctgccctcgactatcgccagtggcaccgcttcgtcgtcgagcgcaatgcaatgggtaggtggatttccatttctcagcctgcctccggcggcgaacgtgcgttgggtctcaccattcccatgttcgcagccgtcgcaagcttctacggcgacgagcacagcacccggccgcgccttgtcctgctggacgaagcgtacgccggcatcgacgacggcgtccgggcgcactgcatgggcctgatccacgagttcgatctggatttcgttatcacgagcgagcgcgaatgggcctgctacaagacgcttccgggcgtcgcgatctgccaactccagagacacgacaagttcgacgcaattcacgtctcccgctggcgatggaacggaaagacgcgctcaaggatggaagagccggcgcggctgatgttaaatcgtagcgcatga

SEQ ID NO: 51598 - DNA, 1098 bp, Bradyrhizobium sp. BR 10303
atccaggtgggcaagctgaacgaaacggaacgcaccgcactggcgtccctggtcggccgcagaggcggcgtggcagcctcaatctccatcgacgtcagcgcagtcgaccgagcgctttccgatgccggtatcgcaccatcccttcgaaccgcactcgaacttcttgacggtccgatcatccaccgcgaaaccgaattgaacaggattcgcgaaagttgggcggccgttctggccggctgctcgcacaccgatctgatcgcctatttggcctcgccgctcaactttggcgtcctgaagcgcctatcaggcaatcaaccggattccgcgtcccttatctgtagacaaaccgaagacatcctcagacggcttcccgctgcgggagtaccgcgggcccaaatcgcggcggagcatctgggagacgctcacggcctcgacagcgcccgcccggtcgccactctcacgctggccgtccttcgaagccgctcatcgaccgacacaggcgatgaccgcgatacatgggctgcggtcggcatcctggtgaacgaactggccaagcctgccctgttcttgaatgtgccgtgcagcggattgccagtctcacccggagaaccacaatacgcatcactgcggcttctcgctcggcggccgtcggaatggacggtggcgagaagatccattttggtgtgcgagaatccgaatctcgtcgcaatcctcgccgaccaactcgggaccgcctgccctccggtcgtttgcgtcgacggccatctcggtgcggctcagcggaccattctcaagcagctcaaggaatcgggagcagaccttcggtatcatggcgactatgattggccaggaattatgatcgccaactacgtaatagcgaaatacggcgccgtaccgtggcacttctcagcggcagactacgtcgccgcgtccaaaagcgttcctcagctcgcgataccactgagcggccggccagtcatcgcttcatgggatgcagatctcaccgcggccatgataaagaccggaatcaagatcgaagaagaggccattgccgagcggatcattgatcttttaggcaaagagtcgctacacgcctga

SEQ ID NO: 51599 - DNA, 1227 bp, Streptomyces thermoautotrophicus
atgagggacgccgccgacgggcacgaccagctcgtcgacgtactcgaccggcagcgggacgaggagcggcggcgggcggttcgcgccctgctgcgccacccgctgctcacgtcggcggagccggaggcgttcgtcctcgtccgccggcatgccgcctggctgcgcgagtggttcgcgcgggaagccggctggtcgctgcacgtggaggggagcgtcgcccggttgcgcaaggttcccggtgagcacggcgacgccacccgcgccgcgggaggtccgctcggcgcgaaggcgttcagccggcgccggtacgttctcacctgcctggctctcgccgcgctggagagagccgagtcgcaggtcaccctcggttggctcgtcgatcggatcctcgccttctcggccgatccggagctggtggcggccggcgtggagttcacgctggacagccgggaggaacgggccgatctggtcgcggtggcccggctgttgatggcgaccggagtcctcaccagggtggccggtgacgagcaggcgttcgtgaaccgtagcggggacgcgctgtacgacgtggaccgccgggtcctggcggtgctgctggtggcgcggcgcggcccctccacggtgagtacccgggacttcgccgagcggctccgggcgataacggaggatgtcgtgcccgacaccgaggacggccgcaaccgcgcgatccggcacgcgctgacccgacggctactggacgatcccgtcctgtactacgccgacctgaccgaggaggagcgggcgtacctgaccagccagcggacccacctgctgcgccggctcaccgaggcgaccggactcgttccggaggtccgggccgaagggatcgccctgctcgacccgaccggcgagacgaccgacctggggatgccggaagagggcaccgacgggcacgccgcgctcctgctcgccgagtacttggcggccgcgctgcgcgagcggcccggggagccggtcgccgtctcggacctgcgggagcacgtcgcccggctggcccggcgtcaccgtacccactggcgcaagaccgccaccgaaccaggggcggagcgcgagctgaccgagcagtcgctgcggcgcctggaggccctcgggctggtccggcgcgacggggacgcggtactcccgctgccggcgctggcccgcttcgcctacgcggagccgaacatcgtgggggagaccacggcatga

SEQ ID NO: 51600 - DNA, 4119 bp, Streptomyces thermoautotrophicus
atgagactgcacgccgtacgcacttccgtacccacgccgaaccgcgagcggtggcagccgctgagagccgggctcgtcgacctgttctactacgactaccaggagttctggttccgcgacggccgcctgatgctgcgcggcaacaacggcaccggcaagtccaaggtgctcgcgctcaccctgccgttcctgctcgacggggacatctcggcgcaccgggtggagccggacggcgatcccggcaaacgcatggagtggaacctcctgctcggcggcaagtacgaggagcggctcggctacacctggctggagttcggccggatcaccgaggacggcgggaccgcgtacctcacgatcggctgcggcctcaaggccgtcgccggacgggggatcgccgaccgctggtacttcgtcaccccgctgcgcgtcggggtggacctgttcctcatcggaccctccggcaccgcgctgacgaaggaccggctgacggatgcgatcggcaccgagggatacgtcacccagaaggtcgagctgtaccggcgcgccgtcgacgagcacctgttccacctcgggccggaacgctacgacgcgctggtcaacctgctgatccaactccgccagccgcaactgtcgaagcggcccgaccccgagcggctgtcccgagcgctgtcggaggcgctggcgccggttgacccggcggtgatcaccgacatcgccgccgcgttccacgatctggagcgccagcgggacgagctggccagcctgcgtgagacccgcaaccacgtggctcgcttcctggaccggtaccggcactacgcccgggtggccgcgcggcgtcaagcggaggagctgcggctcgcccagtcggcttacgagcggaccggccgcgacctgtccgccgtgcgtgaggagatcgaccaggcgcgggccgagcagcagcaggccgagacccgcctggaggagatcggcggcgcgctcgccgagctgaccgcgacccgcgaggagctggccgcacgccccgagctgaagagcctggaagacgcggagcggtacgcgaagctggccaccgaagcggcgggcagcgcagcgcggcgcgccgaggaagcggtcaggacccgggacagccgcaaagcgaagcgtgacgaggccgcgcggaaggccgaggcatcgcggaccagggtcaccgaacggctcggcacggcagcggacgcggcctccagagccggactggggcttgagcacgcggagctggtcgagcgcctgcgcctgccggacggcccggaggacgggttcgccgacgcggctctcgacgccgcccttcaggccgccgagcacgccgccggccggcgggaacgagcggccaagcacgtgctcgagctggctgaggcggcggcggaggccgacgaggcggtcacccacgcccggcggctgctgggggaacgcgaggccgaccgtgacgcggcggccggtcgcaagctggaggcggaggagcgggtcggcgcggaggcggcgcgactcgtcgccgcgtggcgcgagtacctggccggggtgaccgagctgcgtcccccgccgcctgatgatctcctccctgagctggcggcctgggcggaaaccctggacggggagaacccggcgcaggcggccatgcggtcggcggcgtcggcgagccacgtgtccctcgccgcggcccgtgcccgtgccgaagcgaagctgcgagcatgccgggacgacctgcgggatctgcgcgcggagcgggagcggctgcgctccggcgagcacgccgtaccgcccgccccgcacactcgcgccgaaggggtacgggacggacggcccggcgcgccgctgtggcaggtgaccgacttcgccgacggtttgtccgcggtcgagcgcgccggcctggaagcggcgttggaggcttccgggctgctggacgcctgggtgacgccggacggccggttgctcgaccccggcacgtacgacgtggtcgtcaccgcgacccggccggtggccgccaacctgggcgccgtgctgcgtccggcgatcgacgccgacgatccgcaggcgggcgctctgcgaccggaggccgtggccgccgtgctcgccgggatcggtctcggcgaggctggcgcgggcacctgggtggacgtgggcggccgctggcaggtggggccgctgcgcggggagtgggccaagccggacgccgagtacatcgggcacggggcgcgtgaggaagccaggcgccgccggctcgccctgctcgagcagcggatcagcgaggccgaggccgctgtccgggccgccgaggccgagctcgcggcggtcgagcagcggcagcgggtactcgcggacgaactggagcggcagcccggcgagcaggcgttgcgcgacgcgcacggcgcggccgtggccgcggctcgtgagctggagcgcgccgcgggccgtgtccagcgtcaggaggagaaggtgaaggaggccgagcaggcggctcggaaggccaggcgagacctggacgaggccgcctccgacctgcgcctgcccacggcgcgatcggcgctggcagaggtacgcggcgccgtcgtcgcctaccgcgcggaggtgctcgccctgatctccgaggtccgccagcacgccggccaggtggcgcacctcgccacctgggaggcggagtacctggtggctgaggaggcggtccggaccgccgaggagcaggcgcgcgaggcgaaggtcacggcgcgcgaggcggagggccgtctcgcgacgctgcaaggcgccatcggcgcgaccgtggaggagctgaggaaccggctcgccgcgaccaagcagcgcatcgaggagctgaacagggagtcgaagcgcctgaggaagcggaacgatgagctgattcacaagctcggccaagccgaggggcgcaaacaggagctggacggcaaactcggcgaggccaggcgacaccgcgaccgggcggcggccggcttccaccgtttcgcgacgacgggcctgctcgccgtggccgtgcccgaactcgacgtcccctcgaccccgtggtcgccggaccctgccgtacggctggcgcgccgcgtcgagcaggcgctcggcggcgtcgagcacggtgacggggcgtggaagcgcgtgcaggacgagatcacccgacggttccaggagctggccgagacgctcagccggcacggccaccacgccgcggcgggcatggaggaggactgtttcgtcgtcacggtcacgttccaggggcgggagcgcgccgtcgacgagctggccgggctgctcgacgccgaggtcgagtaccggcagcggatgctcaccgccaaggagcgtgagctgctcgaagagcacctggtcaacgatgtggcgagccacctgcaggagctgatcagcgaggccgaggcgcaggtcgcggagatgaacgcggagctggccgagcgcccgaccagcaccgggatgcggctgcgcctgcggtgggagccgcgtcccgacgggccggccgggctccccgaggcccgcaggcggctgctccgccaggaggccgagctgtggtcggcggaggaccgggcagctgtcagcgaattcctgcagcgccggatcgaggaggagcgcgcccgtgacgagcgcggcacctggcaggaccacctcgcccgcgccctggactaccggtcctggcaccgcttcacgatcgagcgctggcaggacggccgctggcgtccggccaccggtcccgcctccggcggcgagcgggtgctcacggtcacgctgccgctgttcgccgccgcctcggcgcactaccggtcggcccacctccacgcgccgcggctcgtcatgctcgacgaagccttcgccggcgtcgacgacgacgcccgggccaagtgcctgggactgctggtcaccttcgacctcgacgtggtgatgaccagcgagcgggagtggggcttctacgccaccgtgccgggcatcgccacccaccagctcgtccgccgcgacggcatcgacgccgtccacgtcaccgtttgggaatgggacggccggctcccgcagcaggtcgaacgggacttcgcaccccgggtcgaggaggaagaccaggaccggggggctgacgcgctgtggtga

SEQ ID NO: 51601 - DNA, 1242 bp, Streptomyces thermoautotrophicus
gtgagcacccctgacctggaccggctccgccgggtcctcggcggggaggacctgcgttggctcgtggaccggatgtggtccaggctggcgcgcgacctgcccctcgacggggacgtgacgttgcgcgccgccacccccgcacagcggcaggcggtggcccggttgctcgggcgagcgcccgggcgagggacctctctcacggtccccctgcccgccgtggcggagaccctgcgccgggctggcatcgcccccgacctgcgaaccgccgtggaagcgctgcgcggcccggtcgtgaaccgggtcgccgagcgggaggcagccgaacgcgcctgggcagcggcgatcgagcccgccgaggcggcggcccggctccgacccgcgttgcggtcctgggccgactggctgcggcagacggggatcgtgcggcggctggccggcgcggacgccgcacggggccgggcgctggtcgagaacgccgtggccgtcctggatcggctgccggcctccggggttccgctgtccgtactggccgcgaccgctaccggcgacgggcacgccctggaccacggccgcccactggcgaccctggtccttcgcgccgcggccgccctcggcggcatgccgcccggaggggacgccgagtggcggcgcgccgtgtgggcctcggtcggcgtgctgcacggggagttgaccaatccggtgctcgtcctcaacgtgcccggcgacgcgaagaccgccaccggccgcgcgctggccgtctgggcggaggccgggcagccggtccacctcaccgcccgccagttgctccgggacgcgcccgaacccccggtcgcgggccggcgggtgttcgtgtgcgagaacacctccgtcgtcgcggccgccgccgaccggctgggggccgcggccgccccgctcgtctgcgtggagagccaccccggcgccgcggcgaccctgctgctgcgcatcctgctcgcgcgcggggccaccctgcactaccacggggatttcgactgggccgggttggtgatcgccaacggggtgctggcccggttcgccgcccgcccgtggcggatgtcggccggcgactacctcgccgccgcagcccccggcgggcgccccctgcgcggcgaccccgtggtcgcgagctgggaccccgcgctgcacgaggccatgcaggcccggggggtggcggtcgaggaggaggtcgtcctcgacgacctgttacgcgatcttgcttcgtag

SEQ ID NO: 51602 - DNA, 332 bp, Streptomyces thermoautotrophicus
cgcagatcgaggcggcccgccgccgactcgccaccgggcggcccatccggctgtcggagctgaaagacctggaccggcacgagttctcgctcttcctccggctgctgggcgaggcgctcgcggcggggccgccggggccggacggacgtatccgcgccctttccgccgacggcacgttcgagatcaccttggttccgctcacggacggccggatcgcggtgatcaccacggacgacggcgtgctgcgcggtcccgaccatgagatcacgatcgtcgaccggaccgaggagaccccgtcgcctgcggagttcgccgccggagcggggcgatga

SEQ ID NO: 51603 - DNA, 1227 bp, Streptomyces thermoautotrophicus; identical to SEQ ID NO: 51599

SEQ ID NO: 51604 - DNA, 1261 bp, Streptomyces thermoautotrophicus
atgagactgcacgccgtacgcacttccgtacccacgccgaaccgcgagcggtggcagccgctgagagccgggctcgtcgacctgttctactacgactaccaggagttctggttccgcgacggccgcctgatgctgcgcggcaacaacggcaccggcaagtccaaggtgctcgcgctcaccctgccgttcctgctcgacggggacatctcggcgcaccgggtggagccggacggcgatcccggcaaacgcatggagtggaacctcctgctcggcggcaagtacgaggagcggctcggctacacctggctggagttcggccggatcaccgaggacggcgggaccgcgtacctcacgatcggctgcggcctcaaggccgtcgccggacgggggatcgccgaccgctggtacttcgtcaccccgctgcgcgtcggggtggacctgttcctcatcggaccctccggcaccgcgctgacgaaggaccggctgacggatgcgatcggcaccgagggatacgtcacccagaaggtcgagctgtaccggcgcgccgtcgacgagcacctgttccacctcgggccggaacgctacgacgcgctggtcaacctgctgatccaactccgccagccgcaactgtcgaagcggcccgaccccgagcggctgtcccgagcgctgtcggaggcgctggcgccggttgacccggcggtgatcaccgacatcgccgccgcgttccacgatctggagcgccagcgggacgagctggccagcctgcgtgagacccgcaaccacgtggctcgcttcctggaccggtaccggcactacgcccgggtggccgcgcggcgtcaagcggaggagctgcggctcgcccagtcggcttacgagcggaccggccgcgacctgtccgccgtgcgtgaggagatcgaccaggcgcgggccgagcagcagcaggccgagacccgcctggaggagatcggcggcgcgctcgccgagctgaccgcgacccgcgaggagctggccgcacgccccgagctgaagagcctggaagacgcggagcggtacgcgaagctggccaccgaagcggcgggcagcgcagcgcggcgcgccgaggaagcggtcaggacccgggacagccgcaaagcgaagcgtgacgaggccgcgcggaaggccgaggcatcgcggaccagggtcaccgaacggctcggcacggcagcggacgcggcctccagagccggactggggcttgagcacgcggagctggtcgagcgcc

SEQ ID NO: 51605 - DNA, 1575 bp, Streptomyces thermoautotrophicus
atggaggagcgagaagccaggccgttcgcgcacctggacagcccgctgacgccgttgtaccgccgcgtgatgcgcgtgttcgtcgagcacaaacggcgattcgtggtgcacctgcgcccggaggacgtggccgaggcgctgcgccgcgacggtggggcgccggtcagccaggaggccgtggacaaggcgctcgccagcctcgaggggtggggcaacctgcgggctgacccggacaccagccgggtcaccacggtcgaggacttctaccggacccgctacctgtaccagctcacgcgggagggcgaggccgccgagctggcgctggcgacgtacgaggaggccatcgggcgacgcggcgaactgcaagcggtcgcgctggaggacatccgggtacgcctgcgcgccctgcgggaggccgcggcggcgtcgagcccggaccccgcggtggtccacaacctgctgctggagctgaccaaccggctggacagcctcgcggccaatgccagcgcgttcatgggcagcctgcaaaggatgatcgatctgcaggacgtcgacgaggacgcgttcctcgcgtacaaggaccggttgatccattatctggagcggttcgtctccgagctggtcgtcaagtcatacgacatcgcggcgacgttgcgtggcttcgatgacgcgcaggtggacaggttgctgcggttggcggccgagcgggaggcggcggacgcggcacctgacatggcggccggcggcgacgatgacctgggcggcgtcatcgggaacaagctggctgagtggcgcggccgctggtccggcctacggtcctggttcgtcggtgaccggacccaccccagccaggccgcgctgttgcgacagcggacccgcaaggcgatccctgatctgctcgcgacgatcagcgtactggtcgagcgccatgccggacggagcgaccgctccgccgacttccgggcgctcgcgcgctggttcgcccaggctccgaccgaggcggacacgcaccgactgtggcgggcggcgttcgggctgtcgtccgcgcggcatctcaccgtcggcgcggctgacccgggtgaagatgttccggccaccaccagttggctcgacgcgccaccggtgacggtggcgccccggctgcgggccaccggccgctaccagcgccggggcgcgccggcgcgcgtggtggaccggtccagggagcgcgcgctgctcgcccgtcaggtcgcggcggagagggcgcagatcgaggcggcccgccgccgactcgccaccgggcggcccatccggctgtcggagctgaaagacctggaccggcacgagttctcgctcttcctccggctgctgggcgaggcgctcgcggcggggccgccggggccggacggacgtatccgcgccctttccgccgacggcacgttcgagatcaccttggttccgctcacggacggccggatcgcggtgatcaccacggacgacggcgtgctgcgcggtcccgaccatgagatcacgatcgtcgaccggaccgaggagaccccgtcgcctgcggagttcgccgccggagcggggcgatga

SEQ ID NO: 51606 - DNA, 1227 bp, Streptomyces thermoautotrophicus
atgagggacgccgccgacgggcacgaccagctcgtcgacgtactcgaccggcagcgggacgaggagcggcggcgggcggttcgcgccctgctgcgccacccgctgctcacgtcggcggagccggaggcgttcgtcctcgtccgccggcatgccgcctggctgcgcgagtggttcgcgcgggaagccggctggtcgctgcacgtggaggggagcgtcgcccggttgcgcaaggttcccggtgagcacggcgacgccacccgtgccgcgggaggtccgctcggcgcgaaggcgttcagccggcgccggtacgttctcacctgcctggctctcgccgcgctggagagagccgagtcgcaggtcaccctcggttggctcgtcgatcggatcctcgccttctcggccgatccggagctggtggcggccggcgtggagttcacgctggacagccgggaggaacgggccgatctggtcgcggtggcccggctgttgatggcgaccggagtcctcaccagggtggccggtgacgagcaggcgttcgtgaaccgtagcggggacgcgctgtacgacgtggaccgccgggtcctggcggtgctgctggtggcgcggcgcggcccctccacggtgagtacccgggacttcgccgagcggctccgggcgataacggaggatgtcgtgcccgacaccgaggacggccgcaaccgcgcgatccggcacgcgctgacccgacggctactggacgatcccgtcctgtactacgccgacctgaccgaggaggagcgggcgtacctgaccagccagcggacccacctgctgcgccggctcaccgaggcgaccggactcgttccggaggtccgggccgaagggatcgccctgctcgacccgaccggcgagacgaccgacctggggatgccggaagagggcaccgacgggcacgccgcgctcctgctcgccgagtacttggcggccgcgctgcgcgagcggcccggggagccggtcgccgtctcggacctgcgggagcacgtcgcccggctggcccggcgtcaccgtacccactggcgcaagaccgccaccgaaccaggggcggagcgcgagctgaccgagcagtcgctgcggcgcctggaggccctcgggctggtccggcgcgacggggacgcggtactcccgctgccggcgctggcccgcttcgcctacgcggagccgaacatcgtgggggagaccacggcatga

SEQ ID NO: 51607 - DNA, 4119 bp, Streptomyces thermoautotrophicus; identical to SEQ ID NO: 51600

SEQ ID NO: 51608 - DNA, 1245 bp, Streptomyces thermoautotrophicus
gtggtgagcacccctgacctggaccggctccgccgggtcctcggcggggaggacctgcgttggctcgtggaccggatgtggtccaggctggcgcgcgacctgcccctcgacggggacgtgacgttgcgcgccgccacccccgcacagcggcaggcggtggcccggttgctcgggcgagcgcccgggcgagggacctctctcacggtccccctgcccgccgtggcggagaccctgcgccgggctggcatcgcccccgacctgcgaaccgccgtggaagcgctgcgcggcccggtcgtgaaccgggtcgccgagcgggaggcagccgaacgcgcctgggcagcggcgatcgagcccgccgaggcggcggcccggctccgacccgcgttgcggtcctgggccgactggctgcggcagacggggatcgtgcggcggctggccggcgcggacgccgcacggggccgggcgctggtcgagaacgccgtggccgtcctggatcggctgccggcctccggggttccgctgtccgtactggccgcgaccgctaccggcgacgggcacgccctggaccacggccgcccactggcgaccctggtccttcgcgccgcggccgccctcggcggcatgccgcccggaggggacgccgagtggcggcgcgccgtgtgggcctcggtcggcgtgctgcacggggagttgaccaatccggtgctcgtcctcaacgtgcccggcgacgcgaagaccgccaccggccgcgtgctggccgtctgggcggaggccgggcagccggtccacctcaccgcccgccagttgctccgggacgcgcccgaacccccggtcgcgggccggcgggtgttcgtgtgcgagaacacctccgtcgtcgcggccgccgccgaccggctgggggccgcggccgccccgctcgtctgcgtggagagccaccccggcgccgcggcgaccctgctgctgcgcatcctgctcgcgcgcggggccaccctgcactaccacggggatttcgactgggccgggttggtgatcgccaacggggtgctggcccggttcgccgcccgcccgtggcggatgtcggccggcgactacctcgccgccgcagcccccggcgggcgccccctgcgcggcgaccccgtggtcgcgagctgggaccccgcgctgcacgaggccatgcaggcccggggggtggcggtcgaggaggaggtcgtcctcgacgacctgttacgcgatcttgcttcgtag

SEQ ID NO: 51609 - DNA, 1167 bp, Streptomyces thermoautotrophicus
gtgctcgacgcgatcgccgcccacctggacgacctgtacgggctgctgcgcgacccggcctcggacaaccggcggatcttcaccacgctcgccggcttggaaggccacctggacgcgttgcgcaccaacaccaagcagttcaacggcgagttgcagcggctgctccgggacgacgccgccgatctcgccacgttcgacgaggtgaaacgggccacggtcgcctatctcgaggagttcgtcaccgacctggacgtgcgcaagcatgcgatcgccgcggcgatcgcgcgggtcgaggagctcggcgtcgccgtgctgcacacgcgggcgctcgccggtgccgacctgcctgtgctgcccggtgccgccgacccggcgcctcgctggctcgcccagcggcaggccaagtgggacggcctgcatcgctggttcgccccgctggacggttcactaccggcggtcgaaaccttgcaggacatcgctcgccgggccatcgtctcgctgctgcgggtgctggagcggttcggcgaggcccgtcgccgctcggcgagcacgatccaggatttccgtacgctggcgcgctggttctccgcctgcccgaccgacgaggacgcgcaccggctgttcaacgcggcgttcggcctgtggccggcccgccacgcgcatctcgccctcgacgatccggacgaggtgccggccgccaccccgtggcacgccgctccccgggttccggtctccccgctgttgcgcacccacggcgtgaccgagaaggccgcgcgcaccgcccgggtgcgggacgtggccgagatccggcgccgccagcgggccagggcgttgcgggagcgcgcggaactggaggcggcgtgggcacggctcgccaccgacggcacggtccggctctcgaccttcggcgagctcgaccacgccaccttcgcccggttgctgcacctgcttggccgggcgctctcggtacgccccggccgcgacgggctgcggcgcgccaccaccaccgacggccgtctggaggtgacgctgcgcgatcccggggacgggcgtaccgccacgatcaggacaccgtccggcgagttcaccggacccgactacgcggtggagatccgcagcccgctgcgtgagatccgccgcgagtcgcgtgacgaggaggcgctgtga

SEQ ID NO: 51610 - DNA, 2688 bp, Streptomyces thermoautotrophicus
atgaccgtcacccggttgcgtccagcgggccgagccgaacgggcagggcccgcgcgatggcggccgacgcgggccggcatcgtgaacgtctggcgctactacaacgagaccttccacttccacaacggccgcctgctgctgcgcggtccgaacggcaccggcaagtccaaggcgctcgagctgctcctgccgtacctgttcgacgccaacctgcggccgacccggctatccacgttcggcggttcggaacggaccatgttctggaacctgatgggcgacgggtacccgggcacgacccgggtcggttacgtctggctggagtgcgggcgcaccggcgacgacgggtggttcacctgcggcgcgcggctgcaggcgagcaagcacagccgcaacgtgaccgcgacgtacttcgtcacgcaccggcggatcgacacccccggcggcctgtcgctgctcaccgccgacggccggccgctcacccgtggcgacctggccgccgcgatcggcgactccggcggggtgttcgactcggccgcggactaccggcggatggtgcggcacacgctgttcccggagttcaccgaggagcagtacgaggcgctgatctcggccctgctcaagctgcgcacccccaagccgtcggagcacctcgatcccaaggagctgtcgaagctgctctccgaggcgctgcccgtcatcgaccagcaggacgtcgccgagatcgccgaggggttcgagaagctcgaccgccgtcgcgaggagttggccaggctggcgcaggaggtcgaggcggcccgcgggctcgccgagcgtaaccgcacctatgcccggcgggtgctgcgcgccgccgcggcctcgctcatctccgcgacgagcacgatggacgggatcacccgcaaggcgcgggagagccgcgaggcgtacgagaaggcgaagcagcggctcgccgagctgaccaccgagcaggagcgtctcgcggccgaggacgacgagctcgcgcaccgaatcgacggcctgcaggagagcgacctgttccgggaaggccagcagctggaccgcctgcgccgggacgcggacacggccgcgcaggcggcggccgccgcggaacggaaggccgcggaacgcgcacgcgaagccgacgacgacgcggccaaggcgagtgcggtccaggccgcgtacgaacaggccgagcaggccgccgaccgcgcccgtggggaggcggggcaggcggctgaacgggtcgggttcgtcgcctcgttcgaggaggtggccgcggcccgggacgtcccgacggcgcgcaagctgctccaggcggcggtcgactcccgcacccgccaggtcgatcaggggcgcaaggcactgtacgagcacgtgggcgcggtcgccgagcggcgcaaggccgagacccgcctggaggactgccgggagcaggaggcgcgagctgaggcacggctggtcgaggcccagacgcgccgggaggaggcgctggcgcggctccgggaggcgatcgagcggtggtgctccgaatgccgcgagctgccgctcgccgcgcggctcgacgagctggtcgacgccgccgaggacgagaacgccgtgatgcgcgtcgtcaacgacgccgcggcggccgtcgccgacgagctgacccgcgccgagaccacgctggacgcgcggcgccaggcgctcgccgaggagcgcgcccggctcgacgcggagcgcgcggagctggcccggcgcacggtgctcgcccccgaaccaccccggacgcgcactgcggaccgggcacgcctgccgggcggcccgctgtggcggctcgtcgactggcggcccggggtggatgagtccacccaggccggcgtcgaagcggccctggaagcctccggcctgctcgacgcgtgggtgctgccgtccggagagctggcggtcgacgggcacgacacgttcgcggacggagcgctcaccaccccggctcccggcagctcgctcgccgacgtgctcaccgtcgaccccgacgcgccggtgccccgggtcgccgcgttgctgcgcgggatcgccttcggcgtgaccgcgccggaccacccggccgcgatcggcgccgacggcacctggcggctcggcgcagcgcgaggcagctgggccaaacctgcggcaggcttcatcggggccgcagcccaggaacgcgcccgggcgcggcgcatcgccgagctcaccgcgcggatcgaggacctggacgagcgcatcgccggggtgcgggccgagctggacgcgatcgccgggcggcgtgaggcgctcaacgccgagcagcgccgtcggccaggccacgacgagctgcgcgccgccaccggccaggtggccagggccgaggccgaggtagcggcccgcgccgacgcggtaagccgcgcccagcaggagcacgccgccgccgagcggcgcgtcgccacggccctgcggcagctctccctggtggcgggcgaacacggcctgccgaccgaggaagcagcgctcgacgcggtggacgcggcgctcggggcgtaccgcaacaagtgccacgcatggctcgacctgcgccagcaggccgccacgctcgccggtcaggcacaggccgctgccgagcgggcggcccgatcacggcgggacgcggacgcggcggcccaggaagccgcggagctgcggcgactcccacgcccttga

SEQ ID NO: 51611 - DNA, 651 bp, Streptomyces thermoautotrophicus
gtgctgcgcgcgctggcgtgcctgtacgacgagccaccaccggtgaacgccgagcaacgccgggccctgtggcggaaggcgggcctggaatgcgacaccctctccacctcggtgctcgtcgccggcctgcgcccgctcggcgagggaccgctcgccaccaccacccggctgtggacggcggccgggcaggcgacccggctcaccctcgcccagctgcgcgcggatccggtggccggcatcccgcatcaccaggtgtggatcgtcgagaacccctccgttcccgcgcaggcgctggaccggttcgggccggggtgcccgccgctcgtgtgcacctcgggctggccgaacaccgcggtgatcgagctgctgcggcaactgcgggcggccggggcggaacttcgctgccacgcggacttcgacggcgaggggctgcgcatcgcggcgtacgtggtcgcgaaggccggcgcctccccgtggcgcatgaccacgcgggactacctgagcgccgtgccggcacacggcccgtccgtgggccgcgtgtccgaggtcccgtgggacgcggacctggccgcggcgttgcggctcaagggcgtcacggtgctggaggagcgcgtcgccgactcgctgctcgacgacctcgatgccgcctga

SEQ ID NO: 51612 - DNA, 1569 bp, Limnochorda pilosa
gtgctggtgtccctcaacctccgcaggcttcagaggaggttccccgaggcctcgtacctggtagccgtcaacgtggagcggtaccggcccatcatgcgtctcttctaccttcggcacatggagcaccagtacgcgctggacctgcacgacgtctgggccgagatccaggcggccgtcgaccctgcgtacaccgaggagcagtgcgagcaggacctggcccagctcgtggagtggggcagcctcaccggtgcccaggaccgctcccgggcgaccaccatccaggagttcatgcgccggcacctcaagtacagcatcacgccctacggcatcgccctggagcggctcctctccgagctggagcaggaggggcggggcacgggctccctcaacgtggacctgctggaccaggtcctcgaggggatcgaccggctggaccgcctcctcagccagcttccggaccggctggaggatggcgaggagcggggcctcggccccatctaccaggcgtgggatcggaccttcaccgcctacgacgagaacggcaagcaggcgagcgactacctggcccagctcgcccgcaacggcgagggcgacgacgttaccgacgtcgaaggtttcctggcctacaaggaggtcctcaaggagtacctggccagctacgtgctccacctgatggacgtgggcgaccgggtggcggcggtcctgcaccggtggcagtccgacgggctgggtgagaagttggtggaggcgtgcgcccggtacgaggcgcaccatctgcccatggcggacgggcggctgcccgcgctggagagctgccgcgaagggcacgcggccgagtggagggtcttccgctcctggttccagccggggggcggcctggaggagctccggcgtcgtaccaacgaggcggtggagtcggtggtgcggagggtgcagcggctcaccgaccgccccgccggcctcagccgtcgcaggcagctcgaggagctggccgtcgccttcgccgcctgccggacgcccggcgaggcgcaccgcttggcgggggcccgcctgggtctcatgcagccccggcacgtgagcggcgaggcccaggtcttcgccatgcggcccgacgactcaccgtggcggcagcgggcgtaccgggtggagctccttcccgtggcccgggggcggcggcgacggcacgaaggggccgtccccgtgcgcgaccgctcccaggaggaggcggagatcctccgccaggtcatggaggagcagaagctggaggagtccgtctgggaccggctcttcgccgccggggagctcgacctgggcgccctggcgctggacgacgtggaccttcgcgaccgcctcctggcgctcctgggcgcatgcctcgcctcgccggaccggagcgccctggctcccgacggctcgaccgttcggctcctgccgccccggcgacccgctgtgggctggctctcggcccccgacggcagcctcgccctccctgccttccgcatggtgcggcgaaaggagggggagcgtgccctcgtaccgggtgcaggatctgcagcggcccttcattga

SEQ ID NO: 51613 - DNA, 1236 bp, Limnochorda pilosa
gtgccctcgtaccgggtgcaggatctgcagcggcccttcattgacctcctcgaccgggtcgccatccgggccgccgacgacccgctcgcctacagcagggtgcacgtccacgtcgagcggctccgccagtggttcgcctcccgccctgggtggcgggtgatcctcaggcgcgagttcgccttgctggtgaaggtgccggcggcggcgagcctcggctacgggcagacctgggcccagatgccgctggactacgagctcttcgcctgggccctctggtatgcggagcgatacccggaaggacccttcctcctcagccacctggtgcaggagatcgaggcacgggccaaggtgctgatcgggccggggcacgtggactggaacctctacccccaccgtctcagcctccagcggtcgctgaaggcgctggaggccatgggggcgctcacccggctggacagcacggacgactgggtccagacgggccagggcgacacgctctacgagttcacgcccgtcgcgccttacctggaggtccacgagacgatcgggtccgcgtcggagcttccgggctccgcggctccttcggaggggccgggaggggaggcaggctcccacctcgcgccccttccccacgtgaccgacccccgggtccgcctttaccgaacgctcctgctctcgccggcgatctaccgttgcgccgatccggaagccttcaccctcctggagaacaggagccgccgtgaggagatcgcctcggacctcctggagaccttcggctgggacctggagtggaccccgagctacgcggccctgctccggccctcggcctcggaggtgtccgagcagatgctctttcccttccggggggcgctggcccacatcctgctcctcctcttcggggaggtacgggcgctcgtccggcggggcgagctggacgcggacgagacggatcgggtccgcctcagcccccggcgcctcagcagcctcctcgcggccttgcgcgagcgccacggcgagcagtgggggctcaccatccagcgggagggcttggggtcgctcctggagcgggtgatcgacaccttgcgggcgtgggagctcctggacggccccgaccgggacggcaacctccacctcctgccgctggcggcccggttccgtggggtctacgagggcgaggaggccgagtacggggacttcgaggacgatccggggatggagtcggaggtgcagcgctga

SEQ ID NO: 51614 - DNA, 4644 bp, Limnochorda pilosa
atggagcgggacgacctcgtcgtcgacggctgggaccgggcgctggaggcggtgaacgcggcgctgggcgggggaccccgtcggtggcgcccgagccggctcatcctgcagcagtattggcacttcgagtaccaggagttccacttcgcccaggggcggctggtgctgcggggggccaacaccaccggcaagtcgacggtgctggtctcggccatcaccctcgccctggacggggagaagcgccgggagcggatggacaccttcggagggcagggccggggcgtggcctattacctggtgggcgacgccgacgccgacgagacctccgactactacttccccgagcgcaccggctacgtcgccctcgagttccagaggggcgaccggcccgagtacctcaccatcggcctgggcctctacacgagccgcacccgcccggacctcgccgtcgactcgtggggcttcgtgatcaccgacgggcgccggatcgggcgggacctgcagctctacaccgcgcagcggctgccgctcgcggcccgccagctcgccgagacgctgggggcggggggccgggtcttttcgcgggcaagcgactaccaggaggaggtgaaccggcagctcttccagttccagaacccggacgagtaccggttcctcctggacctcctcatccagatccggagccccaagctcaacaaggacatgaagccgtcggccatctgcgacctgctgagccgctcgctccctcccttgccggaggggatcctcaaccgggtcacccgcatcatggacgacatcgacagctacctggacctcctcaaggacctggaaagccgtctccaggcggtggccgcgatcgatcaggcggaggcggcctgtgcgaaccagatggcccagctcgccgcggtcgactacacggaggccctccggcaggcccgggaggtacgagggcggctccggaccgccgaggaggagctggctcggacgggtgccgatctggaggacgtgcgcgcccacctcgaccgcctggcagaggagcggcgcagcctggtggggcgccagaccgtcctcacccagggcgacgcctaccgcgaggtccagcagatcgagctcctccgccgggacgcggaggcggcgaggcgcgccctggcccgcctggaggagggacgggccagctcggaggctgccctggagcggctcgagggccggctcctggagcggcgccaggagtgggcccgcctgcgccgggagctcggtgaggcggcagagcagctacaggaaggcgcaccgtcgagccagtggcccctggcggtggaggaggccggccgccaggcgggggccgcccgctcactgccggacgagcctcccaagacggcgccgggactgcgggtgccgctgacgctcctacagggggcggcggccgagcgccggaggctcctggaggaggcccgtcgcgccctgctggaggtggaggcccgggagaggacgtaccgggccctgggtgagcgggcggaggaacgccgccgggagttggaggcggccgacgtgcgggtgcgcgaggccctgggtgagctggaggcggcccgcgagcaagtgcgggcgggcctggaggtgtggcggggccggctgcgcgtgctctcggtgcaggcgaccccctggcaggaggtcctggccggcgtcgactccttcgggcccgaccggcgccccggttggggagagatggtgcggcccgtgacggaggcggctgggtcgcagcggctcgggctcgaggccgcacgccgggaggagcagcggaagctcgacgcgttgcaggccgagttccagccgctggaggaggagctggccgagtggaaggcaggacgggaggtggtcccaccccgccggccggaccaggaggcggcccgccggctgctggccgagctgggcgttccagcggcgccgctctaccgggtcgcccgtttcagggccgggatccccgaggcggatcgcccgctcctggaggcgacgctggaggcttcgggcctcctcgatgccctcgtcgtcgaccccgggtccgggagccgggtggcggagcgcctgcgggaggccggcctgggggatctctggatcgacccgtcccgggggactccggcggggccgaccctgctggacctgctcgagccggatccggaccgcgccgaggcgcttccagacacggcgcttccgggcacggcgcttccgggcacggcgcctccgggccgcgcgctttcggacgaggctgttcgggccgccctgggatccatcgggctgaggcgggatggggtggaggatggggcgctcgtcgcggtgggcccgagcgaggttgtggcgtccgccgcacccgacagctgggtggcgccgggcatctggcggcacggccggctcgcggggacgggcctggcccggcccgaggccggggtcttctatctggggcgtcaggcccgggaggcggcccgcctgcgccggatcgcctcgctcgaggcacggctgaaggagctgaaggaggccatctggcaccaggaagaggccctggaccagcggcggagggcgctccaagtgatggaggcggaagtggaggagctccggatgctcgaggtccaggagcttctcccggggcgcctgctggcagtggagcaggctgaagggtggtcgcgggaccggcgccgcctcctggacgaggcggagcaggcggcggccaaggccctggaggcgttgcagtccgcccggaccgtgtaccaccggagcctggatccggtgcccgaagcccggggacgtgacggcgacgggctccgttccctcgcggaggccaccgacgccgtgctccagcgcttccagctcttcggcgtcctcctcgaacgcctggacccatgggccggcgagtgggcccggctcctccaggacgtggcccagtcccgcgagcgtctggagaaggaccgggccgcggtgcgggaggcggccgagcggctcgaggagtacgagggccgacgacgcgctgcccaggagaagcttcacgagatgggtctcagcgccgaggagctgctggacgagctctccaggatcgaggccaggctggaggaggtcggcggggaggagaaggagggtagcaccctgctcggagcgctgggggagcgccagaagaagcaggcgggggaggtagagcggctccaggctgagagccgggtggcgctcgacgagctggcgcggcaccggtccaccttccgcggccggctcgccgcgcaccccgcgctcgccgccctcctgagccggttcgagcagcgtccggcggccccgaccgaggccgagacagcagaggaatcggccgaggcgcccggcggggcccccgagtgggaggatgggcccgagggcgtggcggaggagctcctgcgactcaggcggtcggctcccggccggcttcgggagagcgtggagaggtccgtccgggatgcactccaggagctgaccatcgtcttctccaaccaccggcccgccctggccgagtacggtcccgagctccaggaggagcgcgtcgccttccggcaccgggggacccccgtggaagcccaccgcctgcgcgcgggcctggagagcgagcgggacctgcagaaacggtacctggagcagaaggagcgggagctgtacgagcaggtcatcctccacgaggtggccggggagattcggcagcggatccggctggcggagggctggcgggacgagatcaaccggctcctggaggcccagcggctctcgaacggcgaggtgctctccatcgcctggctgccccgggccagccaggaggccgaggcgctctcgtaccggcgggtgatcgagctcctgctgcgggatgcggacacgctggcgcacgcggagatggaggagctgatcgaccacttccgccagcgggtgaaccgggtgcgggagggctaccggaccggctcgctgggcgagggcgtcaccttcgccgaggcactccaccgggttctggactaccgggagtggttcgtcttctcgctccacagccggctccccaacgagccccggcgcccgctgaccgacctgcgtttcgcctcccgcagcggtgcggagaagtccctcgccatgttcgtccccctcctggccgccctccacgcccgctaccgggcggccgccccggacgcgccgcgtctggtgggcctcgacgaggccttcgcgggcgtcgacgagacgaacatccaggagatgtaccgcttcctcgtctccctcgagttctcgtgggtgatgacgagcgagaagctctggggcagggggacggccgttcccgcctgctccacctacgagctcctccgccggggcacggtggtgacggccctctggttcctctgggacggccggcggatggtactgaccggcgtgccgggatcggcgggcggcgccgccgcggcaggcccggcgtacgccgccggcaacggggccgtgacggagctgggccgggccgggggcacgggcgccggcgggaacgggtctgcagcaacgcggacagatgccgagggcacaggctcgcctgagcggcgcacgcgcgccggggacaacggggctgcactcaggcgtgaggacgagggcgaggacggcgatggggccggagaccggtaa

SEQ ID NO: 51615 - DNA, 1542 bp, Limnochorda pilosa
atggggccggagaccggtaacccgcaggcaggtcgcggggcgccgggtgctggcgggcgggcgcctcggggagaggggtccgggccgaacccggccggcgcgcaggaggctctcggcctcctccgggcccgtgggctctcgccgctgctcgaggccgtcgcggagcgctaccggaagcgggggcggctcacggggctcctgcccctggggtcgacggggctcgatgcgcctgcccgagaggccctcgaggccctcatgggcggccgcctcagccgccgccgggaccgcctgtacgtcaacctggaccacctggaacaggcactccgtcgcagccgcttcgagaccactctggacgcggtcctgcacgcggcatacggcgggatgcgcaccagagccgaggagcgcgagcttcgcgaccgcacctgggcggtgctgctggatcggcttcaggccggtgcaccaggcgagcggagccgggccttctgggtgagagtgatgaagggcgggccgtcccgaaccctgcagcgtgcccggcgcgcctttctggaagggtggcggcggcacgcttccgaggttgacgcgggccgggccctcggggggagtgagccggcctggctgcaggatctgcaggcgatgctccgtacgctgtcgacggtgatcgagggactaccccggtggcggggaagccgagagcggctccctctcttctctacccgggtgtcgggagacgcccacgcactggacgccgaccggccgctggggcagatcctgcttcattccctcgcagacctggcaggcggcgaggctcccgacccggacgaggtcggcccaaccttccaccgcgactggctgctggactgggccggccttggccgggacgacctctccccgaccgttctggtggtcggagcggacgagggtctcgggcttcccctcgcccttccactctacacggtccagcggcttcccgagctcctccccgcacagaccgggatggcccacgtggtcgagaaccccagcgtcttcggggcgatcctcgaccgaatcctcgaccggctggaaggggcgcggcgcgacctggggcgcgcggagcccggatgcggcccttccatccgacccgccctcatctgcaccagcggccagctcaacctggcaggtttccatctcctggaccgtctggcccggcagggcgcgacgctgcactacagcggagacttcgacgtgggcgggctccacatcgcggccctggccctccggcgctggcctcgcagcgtccggctgtggcgtatggatccccagagctacggggtggcgctcggccgcagcggcgggggtcatcccttctcggagacggagcgtctccagttggagcggctcgcgggctccagcagaggtcccgacgcgcccgtcgcggagctggcgggggcgctgctccgccgcggcgtccgcgccttccaagaggcgctggtcgacgagctggccggagacgtggaggccgcagggggatggcgcgggtccggaggccgtacggcgcctgggtga

SEQ ID NO: 51616 - DNA, 1521 bp, Paraburkholderia sordidicola
atgcagtctgttgtcgataatgcagcgctgttccgtcacgtaactgcggataaggcacttctttaccggaacattctcgacttgttcgctgccgcgaaaaggcaatatcgattgcagttgcgcccagacgaggtgcttttcgaggcagcctgggctagcagtgtgccgaggattgaggacgttaacgcggcactagtgcagctcacagagtggggcaatcttcaatcgcaaccggatactgctcgcgtttcaagtttgagtgacttctatagggcccgatttctttaccgcctctcggctggtggtgaagctatcgaaacagcgctcgtggcgttcagcaatagccttcgtaggcgcgccgaactgcagtcagttgcgctcgaggatatcgcgtctcggctcggcatgttgaaagccctgctcgatacgcacggtgatatagacgtgccaaaggtgcatgaggtgttgcgcgacctcgtacaggtgttcgaaaagcttgccgacaatgcgcaggcgttcatggccggagttgcaagaactctggaattgcaacaggctgaagcggctgctgtggcggcatacaagaggcgcctcattgactatcttgagcgtttcctcggcgatctggtacgtcggtccgacggcatctcttccctgattttgcagattgcaccgcgcatcaatgcagcgttgcagcacgtggcagagcgggaagcgaaggatgcggcgcctggcgacgaacttgaggcttctcaggaacgagtgcggcgatggcgcgaatggcttgaccgctggaaagggttacgcggctggttccttcccggcgagcatactcgtccacaagtcgaactgctcagagacaaagcgcgcacggcaatccctcaactgttgcaggcgatcgcagcgatcaatgaccgccgaagtggtcgcagcgaccgatcggctgactttcgggtacttgctggctggtttgcagcatgtgagatcgaggacgacgcgcaccggatggcacgcgcgacgttcgcgctgaatccggcgaggcattttgtcaagaatccgaacctggacgctgaccttccagcaaacacgccgtgggccgaagcgccgcccgtcgaaattaacccacgccttcgtgaatacggggagatgacaccgcgaggaccgctcccgaaaattcgcagccgcgctgctgagcgagagacgctgtcgtctctgttcgcggaagagtttcggcaggtcgaggcagccaggcagcggctggcaactggccggccgatgcgattgtcagaactgggcgagcttgacccggccgccttcggcctgtttcttggcctcttgggagaggcgctaggcgagcagaaaaaccccgaggttccggtcgaacggcttacgggagatggactattgctggtacgtctcgagccgctggcgagtgattccagagctgaagttcgcactccagacggcgtttttagcggccgagatcatctcttgaccatcacggaggttggcctgcaatga

SEQ ID NO: 51617 - DNA, 1284 bp, Paraburkholderia sordidicola
atgacaacttcacctcgcgagacgcgtagcgcgtcggatagcaggcaaattggggaattgcaggcacgccagcaacgggaagatttccagaacgggctacgtgcgatcctgatgcgacctttgcttagctcgacacatcccgggttcgcatctgttcggcggcaggcggacaaactccgcgaatggttctcgcgcgaaaccgggtggtccctcgtcgtagagcgtgagggtgcaaggttgtacaagcgaccttctgacacaaatgaccccacgcgggggctgcctgacttcgaccggcgacgctatgtcctgctttgtcttgcgtgcgctgtactggagcggacagattcgcagacgaccctgcgtgagcttggcgagcgggtaatggaattagcagcggataccaccatcactgggcggggcttctcatttgcgcttgcaagcgcctccgaacgtcgggaacttgtcgcggtttgccgactactgctggatttgggggtcctgacacgtgttgccggagacgaggatgacttcgttcgttctcaagctggttccgaagcggatgcgctttacgacgttcaacccagggcgctatccggaatgcttgccgccgctcgcggaccgtctacgtggactgctgggcaggccccggtcagcttggatgagagattgcacgcactggtaacggagcacgtgccggaaaacgaagatggacgacggactgcgattcgccatgccttgtcacgacgccttctcgacgacccggttgtttacctcgattcgcttcgggccgaagaattgaattatttcgtcaatcagcgtggcccgatggcgagccggttgtgcgatgccacgggcctcgtggcagagcagcgtgccgaagggcttgctttgacggatgacggtaccttgacggacatcgcgatgccggctgaagggacagaagggcacgtcacgttgcttatcgctgaataccttgcaacccgctccagagagggccaaacggcgggcatcacgactgtcgctgccgtcactgcattcgttcgcgaagcaacggacctccacgggaggtattggcgcaagtctgcgcgagagcccggcgcggaagctgaactaacggcgattgcactgggacggctaagctgcttgcatcttgtcgagtgcgtcgacggagctgttcgtccactgcccgctattttgcgcttcgccatcggtgaaaccgacgtgaggcaatcgagacgcaactccgaaccgccgcaaattggagcagttgaaaatgagtga

SEQ ID NO: 51618 - DNA, 4185 bp, Paraburkholderia sordidicola
atgagtgaagacgatctcttccagaaatctgttcctgcgatccgagctgagctacctgagccggtgcttgagagatggcagccattgcgtctcggggtcgtcgagttgtttcactacgacatggaagagttctggtttcacgacggccgattgctgttccgtggcaataacggaaccgggaaatcaaaggttctgtcgctcacgttgccatttctttttgacgccaacctgcgctccagtcgagttgaacccgatggcgacagcggtaagaaaatgccatggaacttgctggttggaggatacaaacgccgaattggttacacatggatcgagttcggtcgccgcgaccgcgagggacgttttcactatgtgacgcttggtgcgggactctccgctgtagaaggaaaacccaatgtcgaagcatggttttttatcctcgcgaatggtgagaacaatggctcaagaatcagccaggatttccagctcgttagccagcaaggaaatacgctgacgcgagagcgacttcgcgaatccattgaaggtcacggcaagctctttgacaatgccacgctatatcggcgtgcggttgacgagaagctctttagtctcggcgaaaagcgctacgacgccctgatggatacgttgatccagttgcgccagccacagctttcacgcaaaccggacgaagcggggctttcgcatgcgctcacggaggcgcttccgccgatgccagctgacatgctgaccgatatcgcggattcattgaaccagctcgaagaagaccgtcagcagcttgatgacatcaaggcgctgcacaaagctgtggacagcttcaacaccgactacgaacgttacgcatgcatccagagtcgtcgccaggcgcgggttttgcgtcaggcgcagacggagttcgataacgctagtgcgtcgcgaaacgctgaacaggctgcactggacacagcaattgaggttgaagcgggtgcggcgaaagcgttcgaggatgcacagagtcaggtaaatacagaacgggcgagacaggagacgctacggtcgaacccgacaatgcaggacgccaaccggttgcaaaatgcgaaggaggactacgagcgccgattgcgagcccttgcgtcagaagaaaaagcaagtgaggcgaatcaaaggcggcttcgcgacgagactgcccgaacgcaagattatgtagcaaaggtccgttcaatcgagcgcatgttcactgatgccagaaacgattgcgtgccgtacgctctcaaggcaggcgttgcgtccgaatttactgacaatctgctgaccaaggggacgcctgaaaaggtaggctcgctcgccgacggggaatttgacgcagcggcattagacatcagaaacgccaccgccgctcgtcgcgaagcgatcgcgacgcttaggcaacgtggacgcgctgcggagcaggccgatatgcgcttgaaggagattcaacgcgcggtcaatgaagcgaaagaagagatggtcgaggctgcggcgcggcgtgccgaagctgacatggaagcagagcaggtggggcagacgctcattgacgcttggaccgcgcactcggaaaaactggtccagctcgcatgggacgcgcatccgcacatccttgcattgactgagtgggtagcgaagacggatgcccagaacccggcgaaagccggtcttgagctcgcgcatcggcaacgtcaatcacagtttgcagccgacgaggcatcgctcatcgagcagcgtaaagtgtatgagcgacaagctacagagctacgggtagagcgtgatgaattgagcgctggacgcgacgcgatgcctcctgcaccttacatgcgcggcgagcagacccgggcagagtctgagggtgccgcgttctatcggcttgtagatttcaggaaacatgtcgatgatgcacagcgcgcaggcattgaggccgcgttggaagtttcgggcctcctggatgcctgggtcaccgctgatggtgttgtccaggccaaagatgggcagccatggctcgatacgcattgggcgtctcggcctgctgttgtgcggagtctcgcggactggttgcagcccgattgcccagtcgatggacccattccttgtgatgtcattcaccgcttgctgtcaggtgtagcatgcgccaaagacgaaacaacgatcgatgctgaaagtgaaacctgggtgtcaccgtccggaaagttccggcttggctcgttgtctggccgggggagcaaggcacaggcggtgtacattgggcagcgcgcacgcgcggaggcgcgatcgcggcgtcttgaggccatccgggccgaacttcaaaggttagacgtatgtctgcaaaacgtcctggtggcctttgagacgctcgcagccgatcgacgacaggccgacttggagctgtcaacggcaccggctgaaacggaacttttcaacgccctacaggccgtatcggtcgcaacgcagacgctgcaagcagcacgcgctcgtctggacagggctgaagtacagtgtcgtgacgcagagcagacatggcacgcggcgatggaccggttgcagagagacgctgccgatctccgtcttccgaccgatgagctcgcactggcaagcgttgaagaggccttggtttattgcatcgacaaacatcacgatatcgtcagtttggcacgcgactaccggcgtgcgcagcccgatctcgaggtgcaggaaacacgcgaacgcgacgcgcgactgcagcattcggaatcgttggaacgatggggcgaagcgcgggcggaagctcaggaagccgccgttcggttcgagacgcttcgcgacacggtaggaactgaagtagcgaatctcctgatcaaactcgacgcagcaaaggagagcgtggcggcggcagagtgcgctttgaccactgctaatgacgcgcgtcgcactgctggcgaacgtcgcgcgaccgctgcggagcgcgctaagagcgctcaaatcgtactcgatgaccagataggggcacgaacgcgcgcggttgtccagttgcaacatttcgccgcaagcagtctgctttcctctgcgttgccacggctcggtcttcccgacgtctcaatggcgtggacgattgaggcggcgttaacagtcgcacgccgcatcgagcaggaactcgtcgacgtcgccgacgatgagaacagctggacacgggtgcagaagcgtgtcagcgaagatctgatggaccttcaacgcaccttgggcagcttgggtcatcaggctgttgccgagacaagcgactgggggctcatcgtttacgtaatctttcacggtaagcaggatcgaccggaccaacttgcagcgcggcttgcagacgagatcgcccaacggggagagctactgtccgcccacgagcgcgcagtcctcgagaatcaccttcaggccgaaattgccacggagatacaacggatgcttcgggcggctgagacacacgtcaatgccgtcaacaaagaactggaaaagcggcctacgtcgaccggtgtcagatacaggttgcgctggcaacccttgtccgaactcgaaggtgctccggttggccttgatgttgcgcgcgaacgtcttctgaacacgagcacagacctgtggtcgatggaggatcggcgagtggtcggcaatatgttgcacctacagattaaggcggagcgcgatcgggcagatttcgctgtgctgccgggcgagagtgacaacgccggtagcttgttcgatcagctttcgcgtgcgctcgactatcgccggtggcaccgtttccgggttgagcgtctgcaggcaggccagtggaaaaagctcagtggtcccgcttccagtggtgagcgcgcgttgggtttgactgtcccgctgtttgccgcgattgccagcttctatggtcagagtaccaatccccacgcaccgaggctgatgttgctcgatgaggcgtttgcgggcatcgacgaccccgctcgtgcacattgcatggggctcatcagggagttcgatctggacttcgttatcacgagcgaacgtgaatgggcctgttacgctactttaccaggagtagccatctgccacttgcagcggcgtgaaggcgtcgacgcggtatttgtatccagatggatctgggatggtaaggcccgacgccgtgggcccgagccagaaagacttattgggtaa

SEQ ID NO: 51619 - DNA, 1341 bp, Paraburkholderia sordidicola
atggtaaggcccgacgccgtgggcccgagccagaaagacttattgggtaacgatggcagcatggatttgacagcgatgaacgataacgaagacatgcggctacagaacctgttagggggcgaagcacttatccggcttcgacagcggatgcgggcacgctatgcgcgtctttcccttgaacgatctccgtcgatcgtcaagttgacagggttgcagccgcacgagtatgaggcgttagcgctgttgagcgggaaagcggtcagtaattcgcgatcgattacgctcgatgtcgtcgcggtcgacaccacgctaaggtcgagtggtgttgcggcgtctctcagggaagcattggagcgcctggatggaccgattctttctgcgcttgtgcaagctgagagtgaggcacgttggattgagctgcaaaaagcagcagacgactcaagaatagtggagttccttacgtctcccagttcgcttggtctgctcaagcggctatcgaggagggacctgcaggtcgcgcggcgcctgcttcagagggcgttcgccgtgctttcgcgtttgcctgcatccggaatcccgcgagcgcagcttgctgctgaggttcttggtgacgcacacagtctcgataacgggcaggcagtcgcaacactggtcttgtctatatgccgtcgccgtcagaaggctgtcgagtcggatgacggcgattcgccgttcaacacggcggatgcgggccagtccgatgaatcctcgcgcgagatttgggcgcaacagggcgtctttgtcaacgaactggccaggccggctttattcctgaacgttccggtgcgagccgtgcgccaaccgggacgcttcggtgagccatcgtacatgtcgctgcgatcgctggtaagaagcccaccggcgtgggcggtaaaagatcgcatggtttacgtctgcgaaaaccccgaggtcgtaacaattgcggcagatcgattgggcagggcgtgtgcaccgcttatttgtacagacgggatgcccgcagccgcgcagcgcgttttgctcaatcaactggtgggcgcgggcgcccagcttgtgtatcacggcgactttgactgggctggcttgtcaattgccaattttgtccggcgaaagtgggtcgcgtcatcttggcattttaatgcggaagactacgagttggccgcttcacggcggagtgaggacgatgttcgagatctgtcgggtgcgccagtgattgcatcgtgggatccagtgctaactgaggcaatgtcttgtcgtggtttttcgattgcggaagaagcggtagttgaaacccttttacaagatctatgtcgtgcgcgatag

SEQ ID NO: 51620 - DNA, 1491 bp, Bacillus coagulans
atggatcagatcatgaagaaagttgtcgaagcgagttatctgacggcggattcggccgcccaataccgtgtgattttgcgcttcttttatcgacaacatgaaaggatgcgcgactttattgcaccggaggaagtgctcgaatatctgcgttcgctcccggccttccaggattatgcggaagaacagctgcaccagcagttggcccagcttgtgaaatggaataatctggttgctcgccaggatatgaccaatgccaaaacaatcgaagaatataagaaaaaaagattccgctaccagtgcacaccttacacggtagaaatcgagcggatgctgattcagcttgaaaaattgggagaccagttccaaggatcgctcgaacgttcgcaatttgaccgcctactcgcctctttggaaaaactggaagaggaactggaacagccattgaataaacctgcagccgattacatgcatatttgggatgacatttttcactttttcgggaccatccggacgaatacggcggattacatcgcttatatcaacagcgaaaagacgtcacaacggatgcagacggaggcctttctcgtatataaaaaccaatttacggcttatttgcgtgattttatcgtatcgttgcaaaaaacatccctgcaaatcaggggaagactgcgtgaactggatgggcaaagattggcaccgttttttgaaaaactcgtggaacacaggcgccaaattccgcgattggaagatacggcagcttccgaacaagaatggctggaagagttccacgaatactgggggtctttgcggcggtggtttcttgggggcagctcttcccaaagtgaattggaaatgttgcagatgcaaacaaatgagatgatccggagaatggcccgttatgtacaacggatcagtgaacgccagcaacatttccggagccggaaaaaagattatttgcatctggccaaatggtttgccgaatgccgcaatcttgaagaggcccatcaattgtcatcgatcgtgttcgggacgatgacagtaaggcatttgcacctggaggaagcgacaacggacaatcttcatgccgagacatgggaagaacagccggagatgcggcaaatcaagccgcgaacgaaccggtaccgcgagaaaacaaagccgggcgctttccgatctaatcatgaacagaaagaaaaacagcggctcgcctatttaaaagagcgcgaacaggaaaaacagctgattgaaaaatacatgaaaaacggagagattcgccttgcagaaattggaaccgtagaaccgtttgtccggaaagtgctgctcggctggattggaaaatcaatggcagcgaaaaaccatgaggtaaaaacggattacgggatgaccgtaagagttgcgatgaatccggatcatctcatcacactcgatgcagaagacgggaaactgatcatgccggatgtcgtatttgaacgatcaggaggagagcgctga

SEQ ID NO: 51621 - DNA, 1164 bp, Bacillus coagulans
atggatccgttacaaatttttgatgaaaaagcggtgcagggaatggacttgttattccatcattattggattttgcggtccgagcacccggactggtaccagctcatccgcgaacgcgaaaaagtgctgcgccgttacatcagcgagaaatttggccttaggctgatcatccatcagcattttatcaaactcgaaaaaatcccggtggaaccggaaagctggatgggcatcctgcattttcaggagccgatggattatgcaattttttgctgtgcgctctcctttttggaaggaaaagcggtggatgaacagtttctcttgtcggaaatgtgccaggaaatccaaaacaattatcctgtagaagatgagctggactggacgctttatcttcatcggaagtcgctcatccgggcagtccaggctctgatggaattcagtctgattcgcacaatagacggcgatatttctaggttcgacacttacgaagaccaggaagtcctatatgaagcgaccgtttacagccgctattttctaagaagctttccggatgattttacaagttatccggactggaccgggctccttgaagaagactggaaacaaaatcaggaagatgaacggcgtaagcgggtgtatcggaaattgtttttctcacctggcctgcaccggaaagatatgcaggaccctgattttctttatatccgcaatttccgcaaccggcttttggaggacattgaagaacacagccattataaactccatgttttcaaaaacactgcatttttatctgccgcagaaccgcggagttaccatcatgtttacccgaatgcaaaaggttccacggatctgatgctgcagttgtctaagacgctacacgaccatccggaaaaatatgtccccaatgaagcgggggaaattttgcttacggcaggcgagttggaagcggtgatagacgatatgcgcacccgccttgaacgcgggtggtcgaaacattttcgagatgccggtacaaaagcggtatgtgcggaattgctcgaaatgatgaaagaatggatgatggcggaaacggatgaagcagcgggactgatccggataaaaccgctgttgggcgtgcttgcaggcgagtatccggctgattttgagaaaggggatgaggaaccgtga

SEQ ID NO: 51622 - DNA, 4116 bp, Bacillus coagulans
gtgacagaaggaaaatgggtgatgaaccgcgccggcttgttaaatttttggtattatgacgatgaagtttttgaatttgcagacggaaagctgttgttgcgcggcacaaacggttcagggaaatcggtgacgatgcaaagcattttgccggttttgctggatgggaaaaagacgcctgatcggcttgatccattcggctcaaaagcaaggaaaatggaagattatctgcttggggaaaaagaagtgtccggccatgacgagcggaccggctacttgtttctggaatatcgaaagcaagggacaaagcagtatatcacaacggggatcggcatgcaggcaaaacggcacaaaactttaaaatcatggtattttgtcctgactgacaaccgcaggatcggctacaattttgaattggcacacacccgccaatcggaacggattccgttgtctgcaaaagagcttgaaaaccgaatcgggtctggggggcatcttgtccattcgcagaaagaatatatggaactggtgaacaaatatatttttggtttccagtcgatggaagcttttgaagatttgatcaagcttttgattcagctcagaagcccgaaattgtcaaaagatttcaagccgacggtcatctatgaaattctcgagtctgcgttaccacctttgacagatgacgagcttcgccatttgtccgacacgattgaaagcatggacgaaacggagcagcagcttgaacagcttgaaagagagcacgaatcggcaaaaaaactggtgcgccaatacgatctttacaatcaatatattttggcagaacgcgcccaaaaatggcaggaggccgaaagcaggctgcaggaagcaaagcaggaggccggtacgttagcagttcgctgtgaatccctgcgcggagtgattgaaaacctgacagaagatcaaaaacagaacgaacagaaacgcgacgttttaaaagcggaacaggaacggctgcagcaccatgaggtatggcgccttgaaaaagaaaaaggagaacaacaggccagggctgaaaagctaaaaagtgaagcagcagatctggagaaaaagtgggaattaaagaaaagccagcttttaaacatccgcttggaacaggaccggttggaaacagaaaacagcaaggatggagccagcatgcaggagacgctggatgaacttgcactggatgccggagaagcggctttcccccagcacgagatcaatgccggagacttttctcggcatgaaggggaagcttttgatttttctgtttggaaacaggaaatcaaacagcacagcggacttttgcaaaagttgcagcaactggccggagaagcggagcggcttcacgagatgcatatgaaattgcagcgccagtcatctgccaaaaagcaggaaattgacgaactccgtaaacaacttgaccatttggagaactggtttaccgaacaaaaacaagaactggaagatgccgtgtttttatggattgaacagcatccggccctcccctttacagacgaacgactccggcgcattgccggcgcgctggacgggctctatgaagaaaaccgttatgaagcggtcagggaagaaattgtgaaggcggcaaacgattatattttgcaagtgcagaaggaaatttcccgcgcggagcaggcgcaaaaggcaaaagaacaggaattggctgaagccgaagaaacacttatgtattggaaaaacttgaaacttgccaatccggagcgccctcaggatacggaagctttccgcgccggtctcgatggagcagggaaacgctatctccccttttatgccgcggtggaattccaggatcatgtgaccgaagcccaaaaagccagaattgaagcggcactccggcagacgggaattttggacagcctgattacggaagaaccggttacacctgtgcacgaccgggttatccgtccaaatccgcacattctcggctacacacttgccgattacttaaagccggatccggataatgacagcccggtatcagccgcacgcattgacgaagtgttgcgcagcattccgcttgaaccgtcggacagcggctttcacattgatgcggatggctctttttcagtcggctgccttgttggccatgctccggatgaaggaccttccaaattcatcggcagaacatcccggaaacggtaccagcaggaaaaaataaaagaaacagagcaaacgattgctgaaatccgcctagcccttttgcaaatcgaaaaccgcctttcggaatgggctaggaaagtacaagaagcagaagattggaaagcgggcattccagatgacaaagatttacgcgaccttgaagaacagattgaaaaaacagcgcgcagcctgaaacaggaacaggaatttctgacagaaattgaccgcgattggaaacaagtataccagcatttgcaaaacatccggctacagctgcatgagcaaggagccggcttgaaccttgtccttcaaagcggtccgctcgatgaagcactagcagctgcgaaaagttatgaagaacatcttcacagcctggagctcatttttcaacgtttgttttccgggcgcaaaatgcttgcgcgtcttgctgcggatatccttgaaaaagagcaggaactcgatgaaattcgcggtgaagagaacatccgccggtcagaatgggagaaaacggtggcaaatattgaagcgattgagcagcagctgaaattgcaggggattgatgaggttcgcgcccggattcaggcagtccaacacgaatataccagtacggaggaaaaaatcagggagatctacgaagaaaagccgaaaaaagaagcagaactagaaaaatgcaccaccaatttgtctcttgccaaaacgcgtaccacgttttggacaaatatggcggcggaatgggagaaactcgtaaaagcagaactttccctcggcttcgtggagagcgagcacacagaaccggaaagcattttgacggcgttttctggtgtgctggaaaagtatgaccgcgcaaaattaaatgaaaacttgacaaaagtttttttcaacgaacagtcaaatttaacagaataccgcatgtctgagtttacaaaagaagcggacccgccggattggttcgctgaaaaactcgatgactattacgaaacgttcaaaaaggaatgggaaggcttgcggggccgccgcctcatccagatggaataccgcggccgcagggtgagcccgtatacggtactcgagtctcttgaaaaagaacttttaaacttgcaaagttatttggatgagcaggacagaaggctgtacgaagatattatcgtcaatacggttggcgtcattttgcggaaccggatccagcgggcagccaagtgggtaaaagaaatggatgcgatcatgagaaaccgggataattcgtccggacttactttttcgattgcctggaaggaaaaaacggcggagtccgaggatgagctcgatacaaaagatcttgtcgcgttgctgcagcgcaacagcaagtttttaaacgaggacgatttgaaccggattacgaaacatttccgctcacggattgcggctgccaaagaactgattgaaatccgcaatgaagggtcgacgctccatcaagttttaaaagaagtgctcgattaccggaaatggttccaattcgtgctgtcatacaaacgtgccggcgagccgaaacgcgaactgagcaataccgcgtttttcaaattcagtggcggagaaaaggcaatggccatgtacattccgctctttacagcagcctattcgcgctatttggaggcaggcagtatggcgccgtacatcatttcgctggacgaagcgtttgccggggtagatgaaaacaatatccgtgacatgttcgaagtcgtcgagcagcttggattcaattacatcatgaattcgcaggcgctctggggtgattatgacaccatatccagtcttgccatctgtgaccttgtccgcccgaaaaacgccaattatgtgacagtgatccgttaccggtgggatgggcataaacggtcgattgtagagaagccgaaagaatcattggcaggcgccaccccggatctgctttga

SEQ ID NO: 51623 - DNA, 1299 bp, Bacillus coagulans; identical to SEQ ID NO: 51024

SEQ ID NO: 51624 - DNA, 1497 bp, Blastochloris viridis
gtgagcgccgaaaagtcggcgttctatcgctgcatcatggacgtgttcgctgcggccaaacgacaatatcgcctgcaactgcggcccgacgaagtcttggccgaagcccgatggccggacggacaaacgccgcgcatcgaggacgtcaacgccgcgctgagccagctttcggcctggggtaatctggaatcgcatcatgatacggcgcgggtttccagcctgaacgatttctaccgggcgcgcctgctctaccggctgtcgcagggcggcgaagccgtggaatcggcgctggcgctgttcgtgcaaaccctgcaacgccgcgccgagctgcaaaccgtggcgctcgaagacatcgccagccgattgcaggcgatgaaggcgctggccgacgagaccgaaccggacgccgcaaaaatccacgcgacactgcgggatctggtgcgggttttcgagagccttgccgacaacgcgcaagcgttcatggccggggtggcgcgcagcatcgaactgcagcaggccgaagaaaatgcggtggcgaactacaagcgacggctgatcgactatctggagcgcttcatcggcgatctggtgcgccgctccgacatgatcgccgggctcattctcgcattggagccgagcatcgacgcgatgttgcagcaggtggccgcgcgcgaggcccgcgatgccgcgccgggcgatgcccaggagcggatcgattcgcaaacccgatcctggaatgcctggcgcgaacgttggaaaggcctgcgcggctggttctttcgcaccggccatgagccgtcgcaggccgaattgttgcgggcgcgcgccaggtcggcgatcccgcaattgctcggcgcgatcgccgcgctgaacgagcgccgcagcggccgcagcgatcgctccgcggattttcgcatgctctcgctgtggttcgccggctgcgccgacgatggcgagacgcatcggctggcgcgcgccgccttcgcgctcaatccggcgcggcatttttcactcaatcccgacgccgacgctgagctgccggccagcacgcgctgggccgacgcgccggctttgcggattcacccgcggctgcgcgaatatggcgaagcggcgccgcgcggcccgttggcccgggtgcgcgaccgcgccgacgcgcgcgcccagctggcgcgcgaactcgccgaggaatcgcagcaggtcgaggcggcgcgccggcgccttgccaccggccatcccacccggctgtccgacctcggcgaactcgaccgtcacgccttcgggcttttcctcggactgctcggcgaagcgttgaccgaacaggccggaccggacgccaccgcggagcggcagaccggcgacgggctgttgcatatcagcctgacgccgctggcgccggacagtcgcgcccgcatcgacacgccgctcggcgtgttttccgggcgcgaccatctgatcaccatcacgccgacacgagacgccgatgaagcccagctctga

SEQ ID NO: 51625 - DNA, 1221 bp, Blastochloris viridis
gtgcgcgcgttgctgatgacaccgctgatgagtccggagcacgaggattttcccgccatccgccgccaggccgacgcgctacgcgactggttcgcgcgcgaaaccggctggccgctgcagatcgaacatgagggcgcccgcctttccaagcggccggccgacctcggcagcacgatgcgcggcctgcccggctacgatcgccgccgctatgtgctgctgtgtctcgcctgcgcggtgctggaacgcgccgacccgcagatcacgctgcggctgctgggcgagcggctgctgcaattggccgccgacccggcgctggcggcgtcggacttccgcttcacgctcggcgccccgcatgagcggcgcgaactggtggcggtctgccgcacgctgctggaactgggggtgctggcgcgcgtcgccggcgacgaagaggccttcgtgcaggccggcggcgatcaggccgacgcactttacgacgtgcagcgccgcgcgctcgccggcatgctggcggcggtgcgcgggccgtcgacctttcgaccggaagacgcgccggtcacgctcgaccagcggctgcatgcgctggtcgacgagcacgtggcggacagcgacgagggccggcgcaccgcgctgcgccaccacctcgcccgccggctgctcgacgatcccgtggtctatctcgacacgctggaccccgacgcccgcggctatttcgtcaatcagcgcggcaccatggcagcgcgcttgtgcgacgccgcgggcctggtggccgaacaacgcgccgaagggctggcgctggtcgacgaaaccggcgtgctgaccgacgtggcgatgcccgccgaaggcaccgacgcccacgccacgctgctggtcgcggaatatttggcccgcagttacagatcgcgcctggccgacgccaccactgcggcgccggcagcggcggcattcaccccggcgcacgacatcatcgccttcctgcgcgacgccaagaccaagttcggccgctactggcgcaaatcggcgcgcgagcccggcgccgaacgcgaactcgccgcgatcgcgatcgaacggctggaaaaactccacctcatcgtccgagatgccgacacggtacagccgctgccggcgctggcgcgcttcgcgctcggcgacgccgaaatccgcgacgcccgtgaaccgcgcgacggagccgtcgccgccaagcatcggttcggatcgccatga

SEQ ID NO: 51626 - DNA, 4179 bp, Blastochloris viridis; identical to SEQ ID NO: 51363

SEQ ID NO: 51627 - DNA, 1284 bp, Blastochloris viridis; identical to SEQ ID NO: 51364

SEQ ID NO: 51628 - DNA, 1452 bp, Rhodococcus sp. SC4
ttgaaattgttcgccttcaccacggcggagaagcgcgcggagtacctgtgggtgctgcgggccttcgaccacgcccgcgccaactacgtcgtcctgctgcacgccgccgacgtcgcccgcattctggacggcctcgccggcgacgatccggccggacaactcggcgccggagacgtcactcccctactcgagcaactgcacgtctgggaagtgctcgaacgcagctacgacggaacacgcgccgcgacgctggccgaataccggaaccggcacttcgtctatcagttcagccaggccggctaccaggtgttccgagcagtcgaggacgcactggcggcccggctcgacgacgcgtcgctgtcccggctggcactgcccgacctcctcgccgacatgaacgacctggccgcggcgaaccgcgcggccgacaacgacctggtgtaccggaaactcaaccgtctcgatgcgacgctgtcggacatggccggacgcgccgcccagttctacctgaccctgggcgacctcgtccgcaccacggagatcacgccggagacgttcatgtcccacaaggacgctctcctcacgcacatgcgcgagttcagctccgacctctcgcgctatgcaccgaaactcgcggcggcgatcgcgctcgtggaagacaccggcgtcgagacgatggtggcgcgagccgccgccagcgacgagcgggtgttcctcagcatcgaagagcgcgaagccgattggcgcgcgcggtgggcaggcctgacgcattggttcgtcgggagcgaggccggtctcagcgagtcggaacgcctgcgcgagggcacgatgagcgccatcgccgccgtcctgtcgctgctgcgccgcgtcaccgaaacccgcaagggtggtgtcagcagggagagccaattgcgccacctcgcaggctggttcgccgccactccgaccgaggacgccgcgcatgcgctgttccgagccgtgttcgacctcgggcgtccgcgccatctgtcgatggtgcatccggacgccgacatcattcccgacacgcggtcgtggtgggaggcccagcccgtggagatctcccgcacgctcgccgagaccggacgtcccccgtcgcccggtctgcccgcgcgggtgcagcgcaacgagggcagcgtgcgccgcctgcgggaggaacagctgaccgcgcaacgacttcgcgccgccgccgcccagtcgctcgcccggggcggagtctacgagcgggaactcgacgaggccgaaaccgacgtgctgctgagtttgctcaacgccgcactgacggcgcgggtaccggtcagcggccgcgtgaagagcagcacaggatcggagaacggcgtgaaactgaccctcagcccgcacagcgaatcgacggtggtgcgcaccgcccgaggacgtctgcacctcgacggacttcaggtgagcgttcggtga

SEQ ID NO: 51629 - DNA, 1395 bp, Rhodococcus sp. SC4
gtgaaggcgcgggagatctcgccgctcgccctcgattcgtatcagcgcgccgcccgtgtcatcctgtcgaatcacctggtgacacagacctatccggatcgcatcgctcttcccctgctccgccggtgggcgaccgaactacgcgacgatctgatgacgctcttcgggtaccgactcgacgtcaccgagacgaccgcccggctgttcacggtgagcgaccgactcgacgccgggacgccggccaagacggccaccgaccgcacgttcgaccggtaccgctacgcctacctcgcgttggcgctggccgcgctcggccgcgccggaaaccagatcaccctgtccgaactcgccgatcacgtagccgccgacgccgcacaggtcgacggtgtggatctgtccacggaacgcgcgtccgaccgggacgccttcgtcgacgccgtcggctggctcgccgcccgcggcgcgatcgcactcgccgacggtgacgcgggaggctgggccgccaatcccgatgcaggagaagcgctgtacgacatcgacaggtccgtcgtcatcgccctgttccggccgccgcgcgcactacagcatctccggtccatccgcggactgcttgccggtgcggactccgtgaccgaggacgacacctcggagttcgggacggcccggccggtggacgtgaaggagacggcgcggcgagtgcggcgtgccctcgtcgaacggcccgtggtctacgccgccgacctggacgatgacgaactggtgcaactcgcactcccccgcaccgcagccgatgtcgagttgctcaccggactggtcgcggaacggcgggaggagggcgtcgcgatgatcgactcctccggacgtctctccgacgtccggttccccgggacgggaacggtcgcgcaggtcgcacttctgctcgccggggagatcgccgatcgcgtactggatcccgatgccccggagaccgcccggatgccgctgccgcggggccggttcgacgacctgatcgaacaggtcgacagcgccattccgcagtccgggatcttcgacagcctcgccggccacgacggattcgagcccgaagaccccgcccccgcggaccggctgttcccggtcgtcgaggacgagtggatcgccggcaccgtccgcacactgaccgaacggttcgggcgcacattcgccgccgggtggcaggcggaccccgacggtctgggacgggcggcgctggcgctgctcgagcggctacgcctcaccgcggtggtaccgggtggtgtgctcgcactcccggcactcgcccgctaccggggtgtggtggtcacgatccgcgaccgcacacccgagatcgacctgttccagagctcagcgaacgacagcgaggaagtcacagcatga

SEQ ID NO: 51630 - DNA, 4158 bp, Rhodococcus sp. SC4
atgacgagtgcgcgtttccggcccacccgcgccgggatcatcaacctctgggactaccgcgatcaggagttctccttcgccgacggtcgcctcgttctccgcggtcccaacggatccggcaagacgaaggccctcgaagtgctgttcccgttcgtattcgacggcaggatcgaaccccggcggctcaatccgttcgccggcgaggaacgcaccatgaagtcgaacctcctgtaccgcgggcaggagagcgcgtactcgtacgtctggatggaattctgccgcggcgcgaaggacgaccccgaggccgtcaccgtgggcatcggcatgcgcgccacccgcaccaacgacaaagtcacacgctggtacttcgtggccgacggtcgcgtcggcgtcgacttctccctgctcggcagcgacgaccgtccgctcacgaagaagcaactgggcgaacagatcggcaccgactccatcaccgaccggccgctcgactaccgcgccgccatcgacgcccgaatgttcgggctcggcgtccagcgctacgaccagctgatcaacctcatcctcacgctccggcggccccagctcgcgaagaacctcgaccccaagggactgtcgcaggcactcaccgacggtctgcgaccgctcgacgagcaactggttctcgaggccgcccgctcgttcagcgacatggaggaggtcggccgagcgctcgaggggctggccgcggcggaccaggcggcacagagcttcgtcggcgtgtacgcgaaataccttcgccagcaggcgcgtacggacgtcgaccacctcgcgacccgcctggaggccgtccgatccggtatcgccgccctccatggggcggcagcggaccgggcgcgcagccaggagagccgagcggccgcagaggaacgcttcaccgccgccgaacgcgcactcgaccaggccaatgccaccctggacgcgctgaagcggtcgacggcatacgagggacggacacaactcgacgacctcgcgcaggccgtctcgacactcgagaaatcgaccgaactgcaggccgagaaggcacgcaaggccaaggcgaccctcgaacagcgagccgaggaacacgacaaggccggtgacgccgtcgcccgcgccgtcgaggcgctcacccacgccgaagacgaacttcacctcgccgccgaggacgcgggaatcacctggaccgcactccccgagaacgcgcgcaccgaccagctgaccgcggcgctgcgcgggcacaccgaagaacgggacggcgacatccgcgcggtccgggccgcactcgccaccgtcgagagggccgccaccgaacggaccagggccgacgaggcggcacgccgcggccaggagcaactcgacaccgcgaaggtggccgttctcgaggccgagacggcggtcgaatcggcccgcagccggtgcgccaccgaactccggtcctggtggacggaacagtcgtccctctacgccgagatcgacacgcccgcttcactgttcgaggccctggacaccgccctcggcctgataggcgacgacgacgccgccaccctgtcggagacgctgaccgaacagacgacggacgccgtcgacgcgctccggctgcgtcgtcagcagtacgaccgcgacgtcgccgccgccgaggaggcgatcgccgaacacgaatccgcccgtgcggccatcgaatccgagcacgacgacgccccgccgctctcggccgcccggcaggacgcccggtcccggctgaccggtgcaccgctgtggcgtctggtccgcttcaccgacagtgtcgacgctgccgcggcggcaggaatcgaggccgcactgcaggccgcgaatctcctcgacggctgggtgcccgtcgacgacgcactccccgacgtcgaatccgaacagttcctcgtggcccttccggccgcggatcggcccaccggcaagaccctcgccgacgttctcgaggtcgaacaagacacgggcgttcccgacgatcgcgtgcgcgggatcctcgaatccatcgccctcgaatccctcgacctgcccgaaggtccggtcggtgtcgccgaagacggtgcgtaccggcagggaatccagcggggacgccacacgaaatcggacgccgagtacatcggaaccaccgcacgggcccgcaggcgcgccacccgtatcgccgaactcgacaggatcctcgaggaaacccgggcgactctcgacgagacccgtgcggccgcggacgcggcagcggcgctgctgtcgcggaccaccgcggcggcgcaggccctgccccgcaccggatcgatcctcacggcgctgaagaaggtcaccgaatccgcaggcgcactccgcagccgctccgacacggcgacagcggtcggtcgcgaactcgaccaggccatcgccgacctgtccgcgaaggagaagcagctccgggccactgcgtccacgcaccggactccccacgtcgcccgcgagatcgactcgctcgccgcgtccgtccggcatttcgagaagcagggcgagatggtgcagcggtgcaggcgcgaacacgccaaggaggtggagcacacccgcgagtccgaagaccgactgcacgaggcgcgcggcagcgcggaggagttcgcggaagaagctgccatcgccgaagaggttctcgcgcaacaggtccaacgcctcgagacgctgcgcgacacgctgggagcgggggccgagcaactggaccggcagctcgaggaggcgcacacgcggatcgaggcgtgcaagaaggagcagcgcgacgcccgtaaggcggacaaggacgcgggtgaggcgatcggtaaggcagagggcgcgtacaacaccgccgtccagacgctccggctggcgctcaccgaaacgcacgccgacgccgcccgcctcgcgccgtacgcccggcgcgacctactcgaactcctcggcgtcgacggcggccacacctggccggcgagctcggcggcgtggatgagtgccgaacagctggtgtatcgcatccagaacgccgaaggcgacaccccgatcctgccgcccgaagtggatgcgctgttccacgcactggacggcgccaccgaatcggtgcgggtcagcgactcggcgcgcaagtcgacgcgcaccgcgctcaccaccgcgctgcaggacttcgacgcacaattggcggccgccggccaggactaccggttgcagtgggacgccccggacggcgtgaccgtggtgcaggtgcaggacgacgagggttactcgtcgatcggcgagttcgccgcccgcatcgcgtccgctcgctccgatcaggaactgctgctcaccgaatccgagcgtcgcatcctggaggacgcgctgctcacgggtctcgcacagcagatccacgaacggaccgtcgacgcccgcgaactcatcgccaggatgggcaccgagatgcgggagcggcggatgtcgtccggcaacaccatcggtgtccactgggtgctcgccgacaacctcgacgacagtgcgaaggcgatctccaaactgctcgagcgcgacacctcggcgctggggccggacgagctcgccacgatgcgcgcccacttcgcccaccagatcaggaccgcccgcgccgcgcacccggagcgttcgtacccggagatcctggcgtccgccctcgactaccggcggtggcgggtgttctcgttcaccctgatcagcggcaacggcaacgaggaccggctgaccgtcgcccggcacagcgcactctccggcggcgagcagtccgtctcgctgcacctgccgttgttcgccgcagcgcacgtcatgctcgattcggcagacccccatgcaccgcgactgctggcgctggacgaggcgttcgccggcgtcgacgacaacggccgcgccgaactgctcggcctcagcgtgcaattcgacctcgacctgttcatgaccgggttcgacctgtggatcacgtacggcggcgtgccggggtgtgcgcactacgatctggcgcactcgacggccgagcagagtgtcagcgccacgctgctcgtgtggtcggatggcgaactgctcgccgaacacgacggcaccgacctggcgcaggcgctcggttcgcccctgcgccggcgcgtcccgacgcccgcggagggtgccttcgagttcgcctga

SEQ ID NO: 51631 - DNA, 1512 bp, Tepidibacillus sp. Z9
atgaatgatcaaatgttaagagcgatatcagaggttacctatttaacgacagataatgcatggcgataccgttcaatcctacgttatttttatcaacagcatgaacgattacgtcattatctattcccagaggaaatctatgaatatttgaaacaaaactttcactttcaagaatatacagaagaacaattacaaaatgacttgaaccaattagttcagtggaaaaatatcattccccgtcaagagacaggaagagttaattcaattgaggattttaagaaaaagaagtttcgctatcaggcgactccctacaccattgaaattgaacggatggttcaagggttagagaaattaggggattctttcggtggatcattggaaaagaccttatttgatcgattgcttgaatccttatatcaactcactgcttatcacgaaaatccctttcataaaggcaaacgtgaatatgatgtggacaagctagataatgaggcattatatcgtttgtgggaagatatgtttgatcaatttcggaaaatggcggaaaacgctacagattatattgcctatcttaaaagtgagaaggttgaagaggtcatgatgactgaaacatttctcgcctttaaggatgctttaaccgaatatctacggaattttatgtctgcgttacaacggtcttcctttaaaatcgaatccgttttgcatgatactaagactgattttattgagcatgtggctaatcgtattgcaacctatcaactatcgattcctcgtttaataaatctaccaaatgaacaggatctaattcagcaatcgattgatcaatggcaaagcttacaaaagtggtttcttggtgaaaatggtcgtgaaagtgaactttcctttttgcaaaatgagacgaacgagactattcgacggatgactcgatttgcacagcgaatcggagaaagaagtcaaaatttccgtagtcgccgaaaggattatcttcatttagcgaaatggttcgctgagatgcaggatatacaagaagcgcataaactatcgtctgttgtctttggtgtttttcatacgaggcattttcaaacagatggcatagagacagaagatatctattccgaggtttgggaccaaccccctacgatctttactttaaaaccaaggattaaacaatacaaggaaaaaaccagacctggaatcattgtgaacaaagaacgagagaaaaaagagacacttcaacaatatttgctagaaaaagaggcagaacagaaaatgatggaacaaataatgaatcaagatcgaattgtacttagtcaattaacgatagtagatccatacgtacgtaaaacccttttgaattggattgcaaaagcgatgggaaataaagaacaaatcggtaaaacagaaacgggtagacgatttaaattattacaattgaatgattctatgattcagcttgagtcagaagatggatggttaagaatgcccaattatgttttctatttcatagattag

SEQ ID NO: 51632 - DNA, 1197 bp, Tepidibacillus sp. Z9
atggagaaacaaaatttgatatttgatgaagtggcacaagaggttttagaggatttatttgaacaattttggattctacgtgagaaggatccagagaaataccagatgattcgggagagagaacatgcattaagggattattttcaggaaaaatttggttaccgtttcattgtgcatcgccattttgcgaaattagaaaaaattccagttgatccagaaccatggatgggaattcaaatgtttatacatccacgtgattatgccttgtttgcatgtgtattagcctttttagaggggaaagccgttgatgagcaatttctattaatggaaattgtcgaagacctgttaagtatttatccaagagaggaaggaatcgattggaccaattatgaacatcgtaagtctcttgttcgtgtactcaagttttctgaagagataggaattgtaaaggctgtagatggagatattgaaggtttctcgcaaacagaaaaccatgaagtactttatgaagttccgctcatctctcgttattttatgcgatcctatccaaaggacctatttcagtttgagtctatggaagagattttgaaagtagagtggatgggagaagaagcgaatacaggagcgatgaggagatatcgaatctatcgaaagctattcttgtcacctgtactctacagtgaaggagtacaagatcctgactttcaatatctacggaattatcggaatcgattacgggaagatattgagtctcatacaccctttcaattggaattatataaaaatacagcaatgctcacattacctgaacgaaaagcacgctttcatttatatccagataataagggaattatggacgttgctttgcaattttcgagtattgtacgggaacaacaagttgaagatgagatcccaattcaatgggatggttctttattattgacttggttagattttgaacgatgggtaggattttgcaaagaaaaatatgggataggttggagcaaggaacaccgtgaagcctctattcaagaaaccacaataaaattatttcagcttttagaggattggaaattggctagaagagaattggatacaggggcagtcatacttttaccagcattagtgcgaatgattgggcgttatccagatgattttaacggaaatgaggaggtaggagaaagtgaaggggaataa

SEQ ID NO: 51633 - DNA, 4167 bp, Tepidibacillus sp. Z9
gtgaaggggaataaatggcaacttcatcgtgcaggtttacttaatttttggtattacgacgaggaagagtttcaattttcgggaggtagattacttttaagaggaagtaatggatctgggaaatccgtcaccatgcaaagtttactccctgtattattagacggaaagaaaagtcccgaccgtttagacccatttggctcgaaagcaagaaagatggaggattaccttcttggtgaaaaagggatcgttgatcgcgatgagagaacaggatacttatatcttgaatataagcgtcaggatacggagcaatacttgacaactggaattggcttacgggctaaaagacaaagtaacatggaattctggggatttgtgatctatgataaccgccgaatcggacaggatatactcctgtataagctagaagctggagagaagattccactgacaagaagagaattagaaaatagattagagaacggtggtaaggtggttcgtacacaaagagaatatatggagttggtaaataaatatatatttggttttgaaacattagatgcgtatgatgaattgattaagttactcattcaattgcgtagtcccaaattatccaaagaatttaagccaactgtcatttatgatatcttgaatgaatctttaccagccctatctgatgaagaattacgtccattatctgatacaatcgaaaatatggatcaaaccaagcaacaattagatcaactaattcgagaccaaagatccttgaaacgcttatgtaaagaatatgatcaatataaccaatttgttctagtagaaaaagcaaatggcgtattggtggctcatcgagagcaggaaaatgtacgcaaaaagaaagcagaattgcagcgtagaatgagtgagttaaaagctgaattggatttgcagagtaggaatttggaacaacttgagcgagaagaagaagttctaaaggatgaagaaaagcaattacgagatcatgatgtatttaaagctgaagagaaaaaacaagaattactaatagcagaaaaacagatagaattcaaaagaaagcaaaaggaacaaaccctagaagaaaaaaagcgtaaagaaagagagttaaaagataaaatacggatagaagcagaaaaagaggaaaaagcagatcgcctgatccaggaatcgcttgaggaattggagtttctggcggaagaggcagcctttttcaatcatcagattgccgctccagaatttaaacgaaattaccaaggggtttatcaatttgatttatggaagaaagaagttcatgattatcaaggaaaactagatgaaattcttaaaattcttagggagcattcgatcatcaaaaaacgttatcaagaattagaaaaagagttaggagaggttaataaagatcttgatgatcagcggagtaatgaacggaaatgggagcaatattttgaagaggagagagagcgttatttagaagctttccatatatggcaacagcaaaataaacagctggatttgtcagataaggatgtgcaaatggtggcctctcgaattggccaaatctatgacgaatatcctttagaagaaattaaggctcctattgaaaaacgatatcgtgaagtctatcaagttctccaaaaagagagcattcaattacaacaaagaatcgaaacaaagcaaaaagaaatagaacagaagaaaatagaattaaaagaatggaaggaaaagaaagatccagaaccagaaagacattacgaaacagtagaagctagacaacaacttatgaaacaaaatatccctcaccttcctttttactcggcggtagagtttcatgacgaggtgtcaataacgcaacgagaacgaattgaagcagcgattacagagatgggtctattggatgcattgattattcctgaatcttattcagtagaactcgttcatgatcgaatcattcggccaaacccacaattttttggctatacgttagcagatcttctttatccaacaccggttgagggaattgaggtaacaggaaaggatattgatcatgtattaagaagtattgttatcgatgaaaaggctgattctctcatttcgattaatgaagagggtcgttatcagattggactgattgaaggacatgcccctgatcagtcacaggcaatctatattggcaaagaagctcgaaaacaatatcggttacaagtgattcaacgaattgaagagaaaatcagtgcactagaagaagagaaaattcgaatgatacaggaatcccaacgatgggaaatgaaacttgcaaccttagaacgagaatttctagattttccagaagataaggatgtaaaacatgtttatgaagaattagtagaaactagacaaaagatcaaattacttgcagaggaagcaaaacgtaagaatgatcgtgtaaaacaagagcttgaacaattacagaggatcaaaaatcaattacgagaattaacagaggaaatcagcttgcctattcaggaagaagcatatgaaacggcaagaacatcaatactgaattatcaacaggaactacgagatttagaaagtaattataaggactatcaacatagtaaacaaagcatcttgctatatcaacaaaacttggaagaaattcagtttgatattgatgaattaaaaggagaattgaatcaaattgaaggagagataaagaaatatcatcttcagttacaacaaattgaagaacgtttagcagagttaggagccgaagaaatacggcaactgattgaaaatattgttcaacgattaaagcaaattccaattcagatcaaagaattgatcgcaaacatacaagatatacgcaatcaaatcaatcatactgaagcagagatcaacaaaaaggaatcagaggttttatttgcagaacagctctttcaaaaatggttaaccattttcacagaggatgatcgattacaactggtgaatgtgatcgaggattcgtctattcggttagaagaagagcatattgtgagtcgtgctaaacaagtcttaaatcaatatggtacactactccaaaacctagatcgcgaaaaagtgaatcaacgattaacaaacgtttattatcaagaacagagtgtgctcgtagaatatcgtcttacccaagatacgatctttgagatcaatgaagagataagtattgatgatgaaaacatcatcatgaaatgggatcaattaaaacagaaggcaagacgaattcaactgcttatggagtataatggtaatcgtgtcagtccttattatgttttaactcaaatcgataaagatattgaattgcaaaaagtaatattaagtgaaaaagatcgcgaattatacgaagaaattattttaaatagtgtagggagaatcattcgcgctagaattaatcgggcagaacaatgggtggagaaaattaaccgtttaatgtctgaaagggatacatcaagtgggttgaccttttccattcgatggaaacctaagactgcggatatagaagaagaattggatactaaagatttagttgatcttcttcgtcttgattctagactattaaaagcagaagatatgaatcgtatcaccacccattttcaatctaagatcactcgtgccaaagaagtacttgaagaaaaaggttatggagaaaccttgcaccaaatgattaaggagatgttggattaccgcaaatggttttcattcactctttattacaaaagggaaggagaaccaaaaagagaacttacaaacaatgtcttttatacgtttagtggaggcgaaaaagctatggcgatgtatattccgctattttctgcagcttattctaggtatctggaagcccgtgatgacgcaccatatatcatctctttagatgaagcctttgcaggtgtggatgagaataatattcgtgatatgtttgatctagtagagaaactagggtttaattatatctttaattcacaagccttatggggagattatgacacagtatctcaattatcgatctgtgaattagttagaccgaagaatgcatcttatgttacagttgttcgctaccactgggatggtagaagattgcaacttttgaaaagcgaagggattgaagaaaatcgtctggatcaagaaaagataaagtatatggtataa

SEQ ID NO: 51634 - DNA, 1371 bp, Tepidibacillus sp. Z9
atggataagctaaatcatttaaccagtgaagcggtaaaatacttcaaacaggagaaaggttttcaaacactttttcaactattgatcaacaaatataagagcctaggaagaattgggggaaaagttaccatcgtcaatgtgaatgaacaggaaaaagaggtactttcctctttttttcgtaaggacttttccaaagagaaatcaatcaccatcgcattttcacagtttgaaaaggcacttgaaaggacaaagtttgcaggagttgatgttaaggatttattagatggttacattggacatccaatcatatcgcaggcagaagaaaaagaacgctatgaacgacttaaagctaatttttttgaggaatttaaacaacgatacaacgacccacttgctctaggctttcttcaacatattcaagaaaaggggaatggcgtaagaggatttcatcttgcttatgataaagatcgggatttatttaagagtcagttggaacaagtgataaaagccatttctattttaacgtttcgtttagagacagatactagaacaaaagactatattcgattgcctatctttgcctaccaagtgacacaagatcctcatggttttgacctggatacagatcaaggtcggtttcttattgtggctttacaatggattcgacagttggaagaccaagattatgagatggtaagttcgttgacggctgaagatgttagtgaattgatgcaatattttagaatcattcgcgatgatatattgaattttgtcacttgcactggtattttaggtttttgcgatgatgggacgccagaatcgttatggtgggaggcatttaaggggaatcatgttatgaatgttgcattaagggaattgattaaactccatttctttatacccggtgttacgtatcattcaagaaaagccaatgttgtttttgttgttgaaaattctggtgttttttcggcaatcatcgaccaattacaattacaagagtctccaccaatcatatgcactcatgggcaatttaaactcgctaccttgattttactagattaccttgttcagaatgatgctattatttattactctggagattatgaccctgagggccttcaaatggctgagagattaaaaaaccggtaccccgaacatgtccaactttggcattatgaagttgatgaatatatgaaagcaaagtcaaccgttgaattatctgatacgcggcttaaaaaattagagacaataacactaagtgaattactaccattaaaagaacaaataaagatagaacgtaaagcagggtatcaggaaaagttaattcctaaactaatagaagatatagaaaagatgatggaagagtgttaa

SEQ ID NO: 51635 - DNA, 1476 bp, Thermotalea metallivorans
atggaaattcacagtaagatgatcaaaccgattcaagaagtaaaatatctttctgcagacaatgcatggaggtatcgcaccattttgcgctttttctatatacagtatgaaaaaattaaatattggatgtacaaggaagaagtatgggaagagctgaaaaaacattctttgtttcgagattatacgatggaacagtgcaagcaggatctggatgtgctggtggaatggggaaatctgattccgatccaagacacatccaaggtgtccacggtagaggagtttaaaaataaacagtttcgatatcaattatcggagtataccgttgaaattgaaaggatggccattcgacttgaaaatatttttgtggaaggagcatccctagaacctactttattggaacggattaaaagtcacttggagaagtttcatgccattgtggaggaagatataaaaagtgtggggatttggtggagggacttgaatacggattttaagcggctcaaccagaactatcaagactatatccgagagctgcacagcataaaagcggaggagatgatgaaaaccagggagtttctggtttttaaagataagtttatcgagtatttgcgggattttattaaggaactgcagaaaaacacctatggaattgaaggactgctaagggaaattgacgaaggaaaagcaaaaaaactgatggaaaaggtatttgcctatgagcaatctatcccaaggattgatatggaggtcaggggggaggatatttttgaaaatatccgggggcgatggagaaatctacaggagtggtttttgggctcccctgcccaaaaaagtgaaagggaaaaactttttgaaattaccaatgaaatcattcgtaaaattactcgttttgctgcgcaaattgcggaaagtcgaaacagtgcagccaacagaaaggaagaatataagaagctctgtgaaatgtttctagcctgtgagaagatggaggatgcccataagctgtcctccctggccttcggaattttccatacaaaacatatccggggaagtttttataggaagacggaaagtattaacagcggtgtttttgatgaggacccctttgtaatagaaatcaaaccgaggatcagagcttatcgggaaaaaagcatgcggacgcccattgaaaatcatcgtgtacaaaagcaaaatatgctgcaacaatacatccagatgcggcagcaggagaaaaacattatcgaaagttatatctgcgatcaaagaattgatttttctgccctgccaagaattgaatcccatgtacgggcaacgctgctaagatggttgagcaaagggatgaattcgcccaacaaaagggccaaaacggaagatggacatacctttcgagttgttctgccagatcccccaaaaaggtgtattttgcgctgcgatgacggagatttggaaatgcctgcttttattattcagtttgattag

SEQ ID NO: 51636 - DNA, 1149 bp, Thermotalea metallivorans
atgaaagaactagaaatcttgttggaacgattttggatcatcaaagaacaggataaagaactttattatcaaatcaaggatgccagtccaaagctcaaaaattttttagaggacaagctgggctataagctgatcatcaatccctatatcattaagttggaaaaacttccgggaaaacctgaaaactggatggggatagaagattttgaggaccgaatggagtatggatttttatgccttttgcttatgtttttggaagataagggaccggaagagcagtttgtattgtctcagatcacagagtttgtccaagggacttatcctgggcaggaaaaagtggactggactttgtataagcatcgacgccatctgatcaaggttttgcgctttgcagcggaaataggcctcatgaaggtgaatgacggcgatgaacaatattttgccaatgcggtggatacggaagtgctctatgagaatacaggattatccaaatactttatgcgcaattttaccggaaatttgctttattatcgccattggcaggacatagaaaacgaggaatgggtggatatagataaagacaggggcagaatcaggaggaacagggtatacagacggctggtgatgtcaccggcggtctatagtgaggggatagaagatgccgattatctgtatatcaaaaactatcggaatatgctccaaaaagatatagaggagatgttggaaagccagctgcatgtgcataaaaacggcgcctttgtgatcttagacgagggaaagaatttttgcgatacttttcccaacaataaaaatatttccgatatcgtattgcagatgaacggtttgattgtggaagaagtcaaaaaaggaagcttcctcaaaagggaagatgataccatccatatttccatggcaaggttcgaagcaatgattgaagaatgtctaaaaagatatatggaaggctggagcaaagaatatagagagatgaaattagaaaaactttacaatgaagtaatcaaatacatgcaggatttccaaatgatacaggtgaatgaggggacgaaagaggtaatcattatgcctctggcagggaaagtgataggatgctattctaaggattttacggaaaggacggaagcagatgaataa

SEQ ID NO: 51637 - DNA, 4122 bp, Thermotalea metallivorans
atgaataatcggtggataatcaatcggtttggacttatcaacttctggtattatgacgaggaagaatttcatttctccaatggaagattgctcttaaggggggcaaacggatcgggaaaatctgtaacaatgcagagttttattccgctgcttttggatggaaacaagagtcctgaacgattggatcctttcggttctagggcaaggaaattggaaaactatttgttgggagaggatgagcaagggcaagaagaacggacgggctacttgtatatggaatttgtgaaggaaaatacagaaaaataccttacgataggtatggggctaaaggccaggcggggaaaacctatggaattttggggattttctgtaaaggatggccggagaatcggcaaagatttatttttatacaaagacatcggagagaaaattcccctaagcaagatagaattaaaaaatcgaatcggcgaagggggagaagtccacgagagccagcgggattatatggaaatggtgaacaaactgctttttggatttgataccaccgaggaatacgatgaattgatcaaactgttaatccagttaagaacaccgaaactgtccaaggattttaaacctacggtgatttatgacattatgaatgactccttgcagcctttgtccgatgatgatttaagacccatgtcggaagccattgagaatatggataatatcaaaagtcagttggaagtactaaaaaacagcaaaaaggccggagaaaagctaaaaaatgaatatgataagtacaatcgcttcattttgttggaaaaggcaaaagactttataaaggcgaaggaagagctggatgaaaagaaaaaacagcaaaaagagctggagatggaaagggagcaatatgaaaggcagtttcaagaagctgctgaaaatttggaagattttaaactgcagcaaaagctgatcaatgagaaaaagcggcaactggaaggacatgacgggtttaaggcaaaacaggaagtagatcgattggagagacagttaatagagttggagcagcaaaagaaaacaaaagaagaaaatcgggaaaaaaaggaaagcaaagagagggaattggcagcaatcttaagagccggtgaggatcttgaacagcaacaaaaaagggagatcaaaagcaaattggacgaaatggcggaaattgcagaaaatatttgctttcatgaacaatttttcatggaggaggagctgtccaaaaagatagatgagacctatgattttacgtatatcaagcaacagatggaccggtatgtccatcaaatcatccaaatcagaagggccttggaacaggaaaaaaatcaattggttgcctatgacaatgctctggagcagctggaaaatgcgaaaaaatacagggatcatcagtacagggagatggaaaaggccgagaggcttctgttggaaaccaaggaggagttcattgaaagagtccatacatgggcaaagaaaaatgaagaattgaagatttccaaggaaacgttggtagaagtgacccggaaagtccaccaatatggggaaagtacaacctatgatgatatcctggaagaacttcggaaaacctatcatgatgatgagaacaggttcaacaaagaaaaattaaatttagaagtgttgcgggatggccagaatgagctcttgaaacaaaaggaagaagaattgcggcagtggcaaagtcaaaaagatccggaaccagaaaggaaagaacaggttctgagaaatcgtgaacggctgagcagggaggggattccctttattcccctttaccaagccatagattttcaaaacaatgtgccggaggcgtttaggggaatattggaggaagccctgctggatatggggcttttggatgctttgattattcctaaggaatacagggagaaggtctttgcaatggatgtgtccatggcggaccgttatattttctctgatccaaaattctttcagcatgaactttcttccttcttgaggccggaaaaatcagatatttcaggggtcagtcgagaagaggttgacaatgtattaaaaagtattctattagatgcagaaaaggaaggcccctatatcaatgaaaaaggagaatatggcattggattgctgaagggaaaggtgacaagggactataagccaaagtatattggcgtagaagccagaaaaagattccgagaagagatgatagaaaaattaataggagaacaggggatcattcaaaaaaatatatgggaaatagagcagaaaataaaaaccatagaggagcgcaagaaagttttacacaacgaatggatagctttccccaaaaaggaagatttggaaacagccctgcattatgtgcaaggggtaaggctgtcttatgagagcagccaaaaagaagtagcgagaaatgaaggaattgtagaaaaaacctatgaggccctcaaggaaatccgccaaaagattagggtattgacccaaaaaatggaaattcccttaaacttagaagcctatgaagaagcagagaaagaggctgatctctacaaaaatgccctcagagaattggaaacacaacatataaagctgttgcaacaaatccataaaaatgatttgatgcaccggcaaagggaggacgtattagaagatttagatgctatactgtatgatttgggaaggatagaaagggacatcaaaagccacgaacagcagctcaaaaactgtcaagaacagttgaaattatcaaattatgaagagatcaaaaaggaaatcgaagaatgtattcaaatattaaatgagctgcctggaaagattgaaaaagaaatagaaaagaaaaagcagggggaagtggaacgaaatcacaggatcaccagattggcggaagcttgggaggaaatccaatggatagagaaattataccatatattccaggagggtttccgacaagaaatggctttaggatatgtttttccctataacaaggatgaggatattttcaaagcagccaagcaggtgtatcaggaattgaaaggagaagagaaagccgggaagcagaaagaagactatacggcggctctccaagaaaaatatcacgaaaatgtccagtacttggtggaatataacctgtttttggagcatattttccatggggagtcggaagaaaaggatgaaaaaatcagagaagcccttcgaaaacagagaagaattgaaatcaagggaaaaacccagggcaaggacgtaaacttctatggattgatgacttttattgaagaggcgatgaaggagaatgagaatctgcttcgggaaagcgatcgacaattgtttgaagatattttaaccaataccatcagtcaaaaaatacgggcaaagatttatcacagtgaacagtgggtaaaacaaatgaatgctctcatggaatctatgaatacatccagcggactgtcctttagtttggtgtggaagagcaaaatcaaagaaacggaagaacagttggataccaaagaactggtggatttattaaagctggatcctagattgttaagtcaagaagatttgaaaaaattgtccaggcattttcgctcaaagattcttgaagccaggaagcaattggaggacagcggaaagacccagacgttccattcgatcatgaaagagatactggattatcgcaagtggtttgaatttcgtttgtttttcaagaagacgggggaaaataggaaagaattgacaaacaacgcctttgatcgattgagtgggggagaaaaggctatggccatgtatgtacctttgttttcggcagtttatgcaaggtatgaaggtgctaggaaagattgtccccgcattatttcactggacgaagccttcgccggtgtggacgaaaacaatatccgggatatgttccgcctgttggaagagttaaggctaaattttgtaatcaattctcaaattttatggggagactatgatacggtgccttccttgtctatttgtgaattggtaagacccaacaatgccaattttgttaccgtcatccgttatcgatggaacggaaaggtgaaggagttgctggtagaagagggagatctggatggaaaaagtgaaactgcttaa

SEQ ID NO: 51638 - DNA, 1323 bp, Thermotalea metallivorans
atggaaaaagtgaaactgcttaaccaaagtgtcgattattttaaaaataatgaaggcttccatcgattgtttgtaaagataaaggaaaaatataaatctttaggaaatataggaggaaccattgtcttcgatcatctgacggaggaagagaggaaggcttttacgggcttttttcgaaaagattttcgaaagaggaagtctgcggtaataaagcttgaacaaattcaacatgctttagatatgacaaagtttcgtggaatagctcttttggatatattggaacagtattttgaagaagaattgattcccaaaaaggaagaaaaaatgaatcatgatagggaaaaagaatctttctttcgtgaaattattgacagatttgccggtaccaaggcgggagaatggctagcctttgtgcttgaacaaaaaggaaaaggctataggattctggtacaacgatataacatggataaagaaaaattgagggaagatctttctattgtttgcaatgcagtgaatgggcttcctttctacagggaaaagaaacaaaggctggctgtattttcttctgctgtcagtaaaaatcctcatactttcgatgaaggtacgccatgcggacaattgcttttgcacgcattgggctatcttttccattgtgaaatgcccaaaaatgcggaggagagaacagaactattgtatcaagccggtatcctgaaggatgaggtttccaactataccctttgcagcgggctaatcgcttacagagaggggaaaatccatgggggatgggaaggtttttaccggtatggggaatccatgcaggtatctttagagaatttgagttatttggatcgcatcatcagcccccgtgggaaagtatttgtctttgaaaatccaacggtatttagtgaggctagggagcgaatgattgaaaaactgcctcctttggtgtgtacttacggacaggtgaagctttcatctttgattttattggacatgttagccaaggaagggacacagatctattattccggagactttgatcccgaagggctgctgattgcagacaagttgaaaaaaagatacggacatcaattgattctttggcgatatgcaagggatgactatggaagggcagtttccagcaatcctatagaaaaaaagagaatgagacaactgaaaagtctgcaggatgccaaattgaaaaaattagggcagtatatggaggaagtgggatatgcaggctatcaggagttgttgacagatctattggtgcaggacatttccgacgctttccctgaaggggattgtttgttgttcctttga

SEQ ID NO: 51639 - DNA, 1545 bp, Paenibacillus amylolyticus
ttggatttgtcattgacgcgtgctatacaagaagcaagttatttgtcaacacaaaaaacgcaccgatatcgtccaatattaagatacatgtatgagcaacatcgtatatttaataatgaagttttaccaatagaaattttcacgcatcttaaacaatttccggaatttggggattatacactcgaagagcaagatgctgatttatcggtcctagttggaaacaataacttagtgttgaaccaagataatacagatgctgttacattggaagaacttattaggaatcgaaaaacatattcactaacggaatatacgattgaatttgaaaaaatgcttatttttatggagaaaaaacttcatcgtatacgtggtggttctttggataaaaaactcactgagcacctacataatgcgcttgtaaaattaaacggattttccatgcaaaccgagttggattcgtcttcgcttgttcaactatatgaagcgtgggaggaactgttcgaacggtttacaaagcttgataatgatgcttcggattatttgaatcatattagcggtgataaattggatagcaaaatggaaacggatgccttcatcgtatttaaaaatcagttttgttcttatttaacggatttcatggttgaacttaaccgcaattcgcctgcgataattaatattattacacacatttcggagaagaaaattcagaacatcgtaatgcaactcgtccgtcataaaaaaaatatgccgaccacttcggttgtgtcggataaagagtattccgataccttttttgatgtatggacaggcatccgtaactggtttttggcaagcgatactaaatcgagcaaagcgtttcaacttgaagttcgtactcgggatgccatcagtaaaatgtctaagcttgcgcatttttatgcagagcgacaatttgtgaaaaaaagtcgagtaacagaatttttacgacttgcagacatgatgcataagtccggcaacatggaagaagcccatcaagttttttcttacctatttgggttcgaaggtattcagcatttcaaaatcgcacggaaaccgtcggaaaagaatgatggtacggtatgggattttgacccggatgagctagaggtgacgtatcgtattcgaccaccatccgagagaaccataaaacaaaatttgaaggtttcgaaagtgagtcaggaggcactcgagcagcaacggttgctcgcggagcggctgacatacgaagaaactgtattaaaagcgatcgtggagcagccttgcttaatcttgaaagatttggaaacgaggattgagccgtttgttcgaaaggcattattggattggataagtgcggcgctgttgaatccagttggctacggtatttatgaaggtaccacagaactgggggtgaactttaaacttcataaggttagtaacgatattattgaattgcattgtttagatggaatcctcttcttacctgatttccaaatgacatttaccgaggtgaaaacgcgtgaaaaagttgtctcaggagtctcttaa

SEQ ID NO: 51640 - DNA, 1194 bp, Paenibacillus amylolyticus
gtgaaaaagttgtctcaggagtctcttaattgcattcatcaactactcgataatttttgggttgtgcgcaaggagaatccagagcttttttatgaaattaaacaaaatgaagggtttctgcgggattactttaaggactacttccgttttaagttggtagttgggacaaattttgcaaaagttgagaagtttcaagtaacgcctcaaccgtcaacaggcatattagatttcaaagaagtgaaagattacatcattttttactgtgtacttgcttttttggatggaaaggcatcaaagcaatttactctgtcagatgtctgccaagcggtcgtttcgtactacccaagaagttccaagagatcggtcaatgaatccctcctaccattaacatggaagggtaacgaaggctatagaaaccgactatcacttgttcgtgtattgaaggaagctgttcaacggtgtctgatagaagtgattgataaaaacatagaagacttccaagaaagagaaacgaatgatgcactgctgcgttcaactgggcttgtgaaatattttatgcgtaatatcggttttaatattgaaggagaattgaccctaaatgatattatgttgattcaagaaactcaggaacaggaattgggtctagaaagaaagcacttactgtaccggaaactatttttagagccagccttgtatcgacatgaagtatcggcgtcagattttgattacttaaaacagtacagtcgccacttaaatgaacatgccgaaaaatattacgatatgaatctggatgtctacggaagcagtgcttttttagtaaaagaaaacgtaagcacgtttcgtaggttctttccagcaagtaatgctgaatcgaacctacttgttcagtttgcaacgttgttgcgacttaaaatcatcgacgataatgacagtctcgttgaacaaaaagatgggacagtacttttaacaaatattgatttggatattatgtgtcggcagcttatagatgagaatagccacggatggacgacaggtctaaaaagcatgagtatcactgaaataaagaataaaattaagaatatgctatttgaatggaaattagcggagacaacgcatgaaggtgatttaaaactatatgatgtaatcggaagattttttgaaaaacctaaagaagaaaataataaaggagtatga

SEQ ID NO: 51641 - DNA, 1428 bp, Paenibacillus amylolyticus
atgactaatcatacacagcgttggaagcctcatcgcttcatcctatttaattattggtattttaattatgaagaatattacttcaagaacgggagactgttactacgtggtcataatggtgcgggaaaatcgattgccatgaatacgcttttcacattcatgctagatggaaacaaagaccctaagcggttggatccatttgagtcaagtgaccgcaagttttatgacatcttgcttggagaagagtcgttaaacaaggacattatcgaacgcattggttatgttgtgattgaatataagttgacgaacacggagcagtatatcacgacgggatttggactacattcaaaacggaaaaacagaaggttggaagatgcctgggggtttgtgattcatgaccgtcatcggcgtattgggcgtggaccaaatccgatcccactctataaggtggaagtactagatgattcaccagagcaaattcccttagatagaaaacaaataacaacagaaatcggcgagagtggtacggtcgttgatagtaaagattacgcggaactgattaataagcaactgttcaagtttccggatgtaacaggacttaagctttttactgatgtactcgtacggcttaagagccctaaattaactaaaggaggagggccggacgatttaaaagaaaccttgaacgaatcattaccgccattatccgatcatgaattgtccgctttaactactaccgtggaagcacaagaccaaacacagcgggaaattctaaagacgcaaaacgaccttggttttgcaacgaaactggataaaggttttgacgattatgtttcatacgtatttgcggagaaggctaagtattatttggaaagcaaaaatgcgtgggataccattgctttggaacatcagagagtacaaagagatatcgaaaccaaaagtgttgactttgatgtgaccgagcaaaaactccgaaaccttgaaagtgaaattgaaggattgaagcaatcaagacaggaattggggcatgaaaaaatagtggatttggatgacgctcttcaatctgccagaaaagagctagcgcggatattgaatgagaaatcagccaaaaagaatcgatatgagttaaatgagaaatcattaatggatgctaataacgaacggcgtaatattgagaatgaattgtgggcaattgataaagaacttaaagtcgcgttggagagtctggaggaactggggatagattcggcatttgaagacatctatctggcattctctgaccatttcaaacggaatgaaaaaaatggggattatctttttttgaattgggattctgaaataagaatcaggcttcaaagacttggaggacttctcaaacaaattaaagagctggatcaaaagaagcgcgatctagatggtatgagataa

SEQ ID NO: 51642 - DNA, 1491 bp, Bacillus coagulans; identical to SEQ ID NO: 50897

SEQ ID NO: 51643 - DNA, 1164 bp, Bacillus coagulans; identical to SEQ ID NO: 50898

SEQ ID NO: 51644 - DNA, 4095 bp, Bacillus coagulans; identical to SEQ ID NO: 50899

SEQ ID NO: 51645 - DNA, 1296 bp, Bacillus coagulans; identical to SEQ ID NO: 50900

SEQ ID NO: 51646 - DNA, 1524 bp, Steroidobacter denitrificans
atgacaacgatcaccgctacttcgaccgacctgtttcgccatgtcaccgccgacaaagcggcgctgtaccgcgccattatggacgtcttcgccgctgcgaaacgccagtaccgcctgcagctgcggcccgatgaggtattggccggtgcgacctggagcggcactccacccgcacaggaagaagtcgccctggcattggagcagctcgctgcatggggcaacctggagtcgcagccggacatggcgcgcgtcgccacgctcagcgactactaccgcgcgcgcttcctgtaccggctgtcgcgtggaggtgaagccgtagagatcggcctcgcagcattcgagcagacgctgcgccaccgcgccgaactgcagaccgtggcgctggaagacatagacagccgcttgcgggcgctacaccgattgcttggcgaggacatcgtagacgtagccaaggcacacgaagtcctgcgtgatctggtgcgcgtgctcgaggacctggccgccaatgcacagacgttcatggcgggtgtcgcacgcagcctggaactacagcaggccgatgccactaccgttgcggcctataaacgacgtctgattgaatacctggagcgattcatgggtgatctgatccgacgctccgataccattgctcgtacgctccacgagctatctacctccatagacactgtgttgcagctggtcgccgagcgtgaggcgcgcgatgccgcccctggcgacgcggatgaacgcgtcaatgaagcgcggcggcgccacgacgcctggcgcgagcgatggcggggactgcgtggctggtttctgaccaatggcggcgagccgcctcaagcagaactgttgcgcgcccgtgcgcgcgcggcgatcccgcaactgctgggtgcgatctctgcagtcaatgagcgtcgcagcggacgcagcgaccgttcggcagattttcgtatgctggcgcaatggtttgccggctgtgacagcgacgatgatgcccatcggctggcacgggccgccttcgcgctgaatcccgcacgacatttttcgctcgatatacaaacggatgaagatgtaccggccaacgtttcatggctggatgcgccgccgctggcgatcaacccgcgcctgcgcgagtatggtgaggcggcaccacggggacctctacctcgtgtacgcgaacgcaaccgcgaacgtgaactgatggcgcaacaattagccgaagaatcatcccaggtcgaagccgcgcgacggcgtctggccaccgggcatcccctccggctttccgaaattggcgagctgaatgcgcgcgagttcgccctgttcctggggctgctgggtgaagcgctggccgaacagcagaatccggaccagaccgtggagcgttacaccggtgatggtcttctccacatccgcctggagccgatgagttgggatagccgggcacaattgcacacgccagccggcgttttctcgggccgtgaccatgtattgactatctgcaccacgcaggaaggcgcatga

SEQ ID NO: 51647 - DNA, 1257 bp, Steroidobacter denitrificans
atgaacgcgcgggcatcgcgttcaactgcccggcatgtcggcgagctgcagcgcctgcagcaacaggacgagttccgacgggcactgcgcgccttgctgctgcatccgctgatgtcttcacaacatacagaattcttcgccgtccggcgtcaggccgaacgtctgcgtgagtggttcgcacgcgaagccggctggccgttgcatgtcgatcgcgagggtgcgcggctgttcaaacgaccgaccgatctgctcgatgccacgcgcggcctgccagactatgaccgacgacgctatgtgctgctgtgcctggcctgtgcggtgctcgaaagggccgacccgcagattaccctgcagctgcttggcgaacggatcatggcggaagtcgccgatcccgcacttgcggcactgggatacacgttcacgctgcgcagcgcatccgagcggcgcgaactggtcacggtgtgccgcacactactggaccatggtgtactggaacgcgtggccggcgatgagcaaagcttcgtgcacgacagcggctggcagcagtccgatgccctgtacgatgtgcagcggcgcctgctagccggattactggccgccgtacgcggcccctcgacctggccgactggagaagcaccggggaatacagaggcgcggctgcatgctctggtcacggcacatactgccgatagcgagcaaggccggcgcgacgcgctgcgccatgcactggcacggcgcctgctcgatgacccggtgctctataccgatacgctgacgccggacgcccaggcctattttttcaatcagcgcggcacgatggccgcccgcctatgcgaggccaccggcctcgttgccgagcagcgtgccgaagggctggcgctggccgacgccagcggccaactgaccgacgtggcaatgccggccgaaggcaccgatgcgcatgccaccttgctggtggccgaatacctggcacaggcgctgcgtcagacgcgcgcgccgctgcacgtcgccgaagaggaaattgctgcattcctgcgcaaagccgtcgaccgctatggccgctactggcgcaaatcagcccgcgtgccaggcgcggaacgagagttggcgcagatcgtactggagcgtctgcaacgcctggcgctgattgcgcgcgagatcgacggcgtgcggccgttgccagccatcgcgcgtttctctcttggggaagctgaaatgcgcaccaccggtatctcatcgcaagcggcgctcctgtga

SEQ ID NO: 51648 - DNA, 4173 bp, Steroidobacter denitrificans
ctgccgcaaaccgacaatcttagcgttgccgacatccgcccaccgctgcccgaaccgcagcgcgaacgctggcaaccgctgcgcatcggattgatcgaactgttccactacgacagcgaggagttctggtttcacgatggtcacctgctgctgcgcgggaacaacggtaccggcaaatccaaggtgttgtcactgaccctgccgctgctgttcgatgcgcagttgcgtccggcgcgtgtggagccggatggcgacagcggcaagaagatggcctggaacctgctgatgggcagctatccgcgccgtatcggttacagctggatcgagttcggccggcgcgatgctgagggcgttgctcactacctgacgctgggcgcgggcctatcggcggtggccggccgcgcgcatgtagacagctggttcttcctgctggaaggcagccccgatgcgtccggtccacgcctgggccgggatttgtggctgactacggcccagcgccagatattcacccgtgaacgcctgcgtgaggcgatcaccggccgaggccaactattcgaaagcggccaggcctatcggcgcgcagtggatgaacgtctattccatctcggccagcgccgttacgacgcactgatggacacactggtacaactgcgccagccacagctatcgaaaaagcctgacgaagccggcctttccagcgccttgagcgaatcgctgccgccgctgccgaatgaactgttgggcgatgtcgccgaggcgctcaaccagcttgaagaggatcgcaaccggctggaggaaacccgccagctgcaacaggcggtggcacagttcgagcaacgctactgcatctacaccggcatgctggcgcgccgccaggcacgcgagctgcgccaggcgcaaaccggtttcgataatgccagcgcggcacgcaaccaagcacaggctgcgttagagcaggcgcaggaggtggaagccgcggccatcacggcgcgcgacaacacccggcgagcaagccttgcggcacgcgaacgcgttgataccctgcaggccgatccggccaaccgcgacgccacgcaactggcgctggcagaaggcgatatgcaacggcggcgtaacgctgccggacgtgcagcagaacagttcgccgaagcgctggagcggctgcacggcgaggcggaacgcagcgaacaacgcgtccggcaggcacaggatgcatgcggcgcggtagaagcggcgcgcgcggagttgcgccacgccgccaccgccctcggtatcgacgcatcggtggacgccaacccgctgctggccctggatgccgatgcactggccgactcgccctcggagctgcaggcgggcacacaagccctgcagactgcggtatcgcggcggcgtcaggatcttgtgctgctgcgccagcgtcatgccgaagtcgatcagcggctggcactgcgggcacaggccgcgacgcacaggagcgatgccgacactgaacacgacgaggccctggagcagcgccggcaggccgatctggaagccgagcgtgaaggtagtgcgttgaccgagagctggtcgcgctacggcgcggatctggtgcaactgaagttcgatgccaacggacccttgcagcaacttgcggcatgggcggcacatcccgagggtaacaaccccgcgctgatggcgttgactggcgcgtggcaagcgacgctggcccgccacgctgcacgacaggccgagctgaatgggttacgcaccgcacaacaacagcagcgcgcagcactgacactggagcaggcacagctgctcggcggcgaggataccgttcccctcgaaccgttcacccgtactcccggcatccgcggtgcgcgcccaggagcaccattgtggcgactgctggattttcatccgagactgaccgcagccgagcgggccggactggaggctgcactggaagccagcggactgctcgatgcctggctatcgcccgacggcaacctggccgacgccaccggccagccgctgctggatacccactgggcccaccgtttaccggttgccggtccatgcctgaacgatgcattggttccatcgctgcccgaggattcacccgttccggccagtctgctcatcacgttgctggccggcgtggcatggggcatggaagaccggcaggatgccgagagctggatctcggccgatggccgctttcgtctcggagccctgtccggcgcatggcgcaagtccgaagcgcgctacatcggccacactgcccgcgaacgcgcgcggcagcaacgcctgcaggaaatcgatacagccatcgccgcgctggatgtggccgatgccgatctggcgcagcagttcgacacgctgcagaccgctcgcaacctggctgcgcaggagtatcgctgcgcgccctccgatcaggctctgcaaactgccattgtggcggcgatcaatgccgggcagcaggccactcgtgcgcgcctgcggctggaacaggccaatgcccgcctccgcgaagccgaacaagcgctgcaggatgtacagcaaacactgcagcacgacgccgccgatctgaggctgcctgccgaagccgatcaactcccggcgatcgagcagatgttggagcaattcgaccatacccgcttcggcctgtcgcaggcagcccaggcctggcagcgcgatcgtgccgccctcctcgagcagcaacagcgcgagcaagacgcacgcacactgcatgatcaggtcgaagcgacgctgcgccatgctcgtgaagacgccgaccaggctacggtgcgttttactaccttgcagcgttccgtcggcgccaaggtcgatgcgctgctgcaggcactgcgcgccgcacgcgaagcgagccagcgcatcgaaacggctttacagaaagccgaagacgacttgcgtgcggccagcgaacgacgtgccgtcgcgcagaccgaatccacccagaaggagcagacattatccacgcgcagcgccgaacgcatgcatgcagccgaacgcgtgcagcgcttcgcggccagcggcctgctggccgccgcgctaccggaactggcaatgcctgaaatctggagtatcgatccggcgctgaacctggcacggcgcatcgaacaagatctgcgccacctcgccgatggagagcaggcatggagccgtgtgaccaagcaggtcgccgaagatctgaacgaactgcaacgcgcgctgactgctcttggccaccaggctgtctccgaacccaacgactggggcttcaccgtccacatccagtaccaaaaccgggccgaacgtcccgacacattgaccgcgctgctggccgaggacatcgcgcaacgcagcgagctgttgtcggccagagagcgcgaagtgctggaaaatcatctgcaggccgagatcgccgccgagatccagcgcctgatgcgtgccgcggacgagcgggtcagcgccatcaacgaggagctgcgcaaacggccgaccagcacgggcgtgcgctatcgcttgaagtgggagccgctgtcggccgaggaaggcgcccccgccggcttggacgttgcccgcgagcgcctgctgaataccagcgccgatctatggtcggccgaggaccgacgtgccatcggcagcctgctgcagcagcgcattgccgcggagcgcgcccgtgccgacgccgaggtttccggcggcagtctcgccgaacagctcgcccgcgcactggattatcgctattggcatcggttcgccgtacagcgcctgcaggatggccagtggcgcaagctgtccggtccggcttccagcggcgagcgtgcattgggcttgaccgtgccgctgttcgccgccatcgccagcttctacggccacggcgcgagccggctcgcgccacgactgatgctgctggacgaagctttcgccggcatcgacgatgccgcccgcgctcattgcatggggttgatccgcgaattcgacctggacttcgtcatcaccagtgaacgcgaatgggcttgctacgccgagctgcccggcgtagcaatctgccaactgcagcggcgcgaaggcgtcgatgcggtgttcgtttcgcgctggatctgggatggtcgcgctcggcgcgtaaagaacgatccggaccggcgctttccgccggtaaacggaatttgctgcgatgactga

SEQ ID NO: 51649 - DNA, 1254 bp, Steroidobacter denitrificans
atgactgacgcctccgaccaccgtctgcggcgactgctgggtagcactgcgctggccagcgtacgtcaacggttgcgtcgtcattatgaacgtaccgaaccgggttcgcgcacaactcgcctgcggctggccggccttgacccggccgcatacgccgcgctatgccagctcatcggcagtccctcacgcaatgcacgctcgatgacactggacatcagcgagttggatgcacggctgcgcgccggtggtcttgccgattcgttgcgcgacgcattggagcaactggaaggtcctatcgcgccaaggagccacctgcgacgcgccttacaagcacgctggtcggcactcgccgcaacgcggatcggcgacgtgcgccgactagcctggctacgcacgccggctgcattgacgctgctcaaacgtctgggccgcgatccggatcgcgctgcatgcctgctcgccgatgccgacagggtgttgcgccacctgccggccggcgggctgactcgttcacaactggccgctgaaacactgggcgatgcgcatgccctggatgctggccggccggtggccacactggtgctgaaagtattgggacatcgccagcatgcgcacgcggatcgatcggcagccggagagtccagcgacagaagcggcaaggaacgcgcacgcgacatctgggcgcaggccggcgtgctggtcaacgaattggcgcggcccgctctggtcctgaacctgccacctgcggccgacgttacaggtatcgggatacccggtgaacccacatggctgtcgctgcggcagctgctgcgtagcccgccaatctggcgtctcaccggatgccgcatctttgtttgcgagaatccgaatatcgtcgccatcgccgccgataccctcggcgccggctgcgctccgctggtctgcaccgatggtatgcccgccgcggcccagcagaccctgctcgaccagcttgtcgctgccggcgcgcaattgcactaccacggcgacttcgactggccgggcatcggtatcggcaatctggtcatacggcgatggaatgccgtaccgtggcgcttcggcgcgacagactatctgctggctatcgaacgctgctctgcggtgcaacagcccaacctggataccgtcacgctcgaagcgagctgggatccgcaactcgtccgggtgatgtgcgaacatggcttggccattgccgaggaggccgtggcgcaggaattgctcgaggatctgcgttga

SEQ ID NO: 51650 - DNA, 1533 bp, Bacillus cereus
atgtttgatattcctatagtccaaactcatataaaggaagccacttatttaaataccgagaaaacacgggtatatcgtcccatcattaaatattgttatactcgttatcttcaagcaaatcggtttgtgtatcctcatgaagtacttgagtttctgcaaagtataggagagttttcatcatatacacttgatgaagtaaagcgggatcttgagtcacttgaaaactggggcaatttagttgccagacaggatgttcgaggacctgaaaaattagaagatgtattgaaaaaacgttaccaatatagtgtctcagaaatcacggttgggtttgagcaattcttagaaaggttcgattctaaacgttctaaaattacaggttctactgatagttcgttggtatcccgtttattagaaacactttacgcattaaaagattatgctattccaaggaatagggatatgaaggaaaatcaagaagtttatgaactttggagtgatattttttatcgattcgaaaagctacaattcgactcggttagttacttatcgcacatcgattatcaaaaaatacaagcggaagtagcaaaaggcgaattagcctttttacattataaagatgacttcattacttatttacaagattttgttttgtcattgcatcgtacagtagatttgattatttctgttttcaaagagatagagataactaaattggaggaagttatctttgctgcagctgagcataagtgctatcgtgaccgcttcatttttgaaaatgtttcagtggaagaacaaatacaagagtttcaaaacagttggagatatatgatgcaatggttttctagtgattcatttaagcataacggtggctatgaatctcttttaagacaaacgcaggaaaccattgatcagattgtgaaattcattagacaaattggagaaaagtatcgtcaagtcaaaaatagacaacatgagtatcttcacgctgctgtactatttgaaaaaatgaataaattagatatggatgaatgtcatgaaatgtttgcgtatcttttcggtgttcaaaatacaaaacacatcagagcacattcaatatctactgaccaacaaaataatgatttgtgggaaatagaaggtgaaaagttgactttgctatctaaatacagagaacggaaagagcgaaagaagcgtaaagcaatacaagaaaatttagaagaacgagataggcttctcaaggagtatgaaagggaaagagaaatcaaacaacagcatatcgttagatacttatcatcaaaagtggtccgtgtacgcgatttaggtccagttccggcttgtatacgtgaagaaattttagaatggttaagtcgttctagtttcgaggtttctgagaaagggatattacgttatggcttcacggatgatggcagaacatttgaagcaatagccgttacaaaaaatcgaataaaactagtttgtaatgacggaacactcgaaatggaagacttggaatttagattcaaagaggtgagatag

SEQ ID NO: 51651 - DNA, 1203 bp, Bacillus cereus
ttggaaggaaaatacattattactgaccatatgaaagaacttgtggaatatttatttgaatacatgtttattgaccgcaaaaaacatcgagacatctattatgaaataaggaggttgcaaaaagagctcacttactatgtaagtgaaaatttcaagtacaacttacttgttcatccagactttattaaattagagaaggtcacaacatcacccaaaccatggatgggtattgaacgttttaaggaaccgagggattatgtaatcatgtgttgttttatggcttttctagagcagcaaatcacaaatgaattcattactgaagaccttacaacagctattaaaaattacttccctggagaagtaggaatacaatgggaaggtaatggtggttatcagaatcgtctttcccttataagagtggtacgagcacttgaagaattagggattatcgtaatcttagaccaaaatatcgatgattttaaagatgatgataaaaagcaagtgttgtttcaaaagcaagccccaagtcattactttatgagaaaccttccttttgatattacaacttgtcagtcctcaaggtctttaaaattgaaaagacaattagaaaaagagataacaggcatacttccaaaatttgaactgaataggcgtttattcatagaacctattattcgaaagcaagatttggatgagggtctgtatgactacttgaagaggaatattgaacaaatggaatccattgtagaggaaactagttcttatcaattggaactctataaaactggggccatgttaactagaacggaatcttataaacctcttaccacatttccaaatttgaagatggaaagtcatctcactatgcaactctctttttatgtaagggaactgattatggagaaaaagattcataaagagtttgatggggagattcatatgacacgttctgagtttttacaattaatagatgcattaaaggaacggaatggcgatgaatggaccgctagttatagacaaatgagtgcgaagcaaatatgtaaagagtttattcctttcctaaagagctggggcttttgtaatgaactagaagatagagaaagctttatattgtatgattcacttggccgggttagtggtgcttataacatagaactgaaacaaactgaatgggaaagtggaggagttgaaaaaacgtcatga

SEQ ID NO: 51652 - DNA, 4203 bp, Bacillus cereus
atgacaatagaaactcgatggagaccaaaccaagctggattctttaatttttggttttttaaggacgatttatttgagtttattaatggaaagttgcatctaatgggagaaaacatgagtggaaaatcagttactactcaaagtttaatcaccatattgctagacggaaaaaaagacgcaactagaatggatacttttggtagtcgttctcggacgctacgagatacttttttagggagtacaggagataaggaccaacaagaaagaaataatcaagacaaattaggatatacctatctcgagtataaaaggggtatttatgatgaatacattacaacagggatgggtctccaagctaaagctggccatcaagacttagactactggtttttcatcattttagataattctagaatcggaaaacgttcccaggatattaagttgtacaaagaagagcggatagatggtgaggtgaaaaagatcccgctctccaaagaagaattgcgtgaacaattaggagaaggtgggaaaatttatacgactaatgcagagtatatgaaggctgttaatgatcatctgtttcaatttagggagattcaaatttttgaacatctgattaaattattaattgctttacgctccaataaattaggtgggggtcaaaagcctaaaatggtgtatgaaatcttaaccgattctctgccatcattatcattagaggaactaagccctcttagtaacacaattgaatcaattgatacgattgaaagggaattaactgaattacagtttgcctacgactacatagaagttattacaagtgtttatgaagcttatcatgaagtgtatttagcggaaatagcaaatgggtatttaaaggctgaaaatcgcttgcagaacctatatgaacgtcagagatataattcaaaccagttaagttctactagaagtaatgtagtaaaactaacaggggatatatcttatttggaggcaaaagaaaagactttgaatgaacggattgaagctttgcgtagtaaggaggcaaaggatctttctatacaaaaggggaggctggaaaaccaaaaggtagacattactcgtctaataaaaccgaaacaagagcagaagaaatccaaggaaataaaaattaaagaaatggctcaactatctgaaaccactagttcaaatagtttaaagtggataaatcatatgaaagatgaactgtcagaaatggagcactgtgcattagactcgtcttttaagcagcatagtcgacataaaggacactttatgactcactatgagtattttgattatgatttttccttatggaatcaagacattcaatcttatcaaacatttattcacgacttacaaaaacaaatatttgatctcgaaaaattaggtcaaaagaaaacaatgcttattgatgaaaaaaatggagctaccgttctccttaatcagaaacaagatgagcttcatacgataagaaaaaaacttgatgaactgaagaaaaccttaggtaatgaaatggatgaatggttagaagacaatgaaatcttagtaatgagcgaagaagagaaagagcaactgttaaaaagattgtatcattttcctaattccgtcacagaacgagaattaactggaatgattgagcagcagtattccgatgtgaaaaggaaaatcaatgatgaatttcatcaagtaggtagattggaggaagaactcgtacaaaagcagtctagtatagaggaagaactcaatgaatggattgctggcaagatgcctattccttttctttcaaaagagaaagaagccgtattagaatcaataaaagaatggaatattccgcatatcttattctatgatgcggttgaatttcaagagggtctttcagaaagagaaatggctgccattgaatctgcactagaagatactagacttcttactacggtaatcgcagacccaaaatgggataagcagctcagtcagtatacaacggttccgaacaagcaaggaactccatatatgtgtaacttaacccaatatctgaaaccaagtaagaaatcaggcaagctggctgtatgggttgaagaactgttaagttatgtcggtatttcgaaagaggaagagtgctttatcttatccaatggtaacttcaaaaatggtatgattaaaggtcaatcattgcttaaagattcacctcagtaccttggtgaaaagatacaagttcactataaaaaacaaattatgtcatcgttggagaataagttaaacgaaattgcccacgaactagagaagttacaacaagaaaagaacgatttatttctacaactggatttattagatgatgaatatcataatttaccagatagaaatggaattttagaactatatcaagctttaaacaggaacgaacagagtataaaagatatttttcagacgaagttagattctgtaagagaaaaacttactactcttcaaaacgaaatggatacaatgactaggcgtattcaggcggaagcagattttacagagattccattaacatctgaagcattctctcaagtaagagatgaaatgcaccattatgatcgtcatttgaatcaaatgaaacttgcttataccgaattaaagagtattcaacaatcaatggattcatacaacatccaaaagcaatcattactggaggatgtagataatttatccgtagagatttcgtcacacgaaaacgagttacaaaatattgaagttcaaatcaatgtcatcatagaagagatggagcgttcagggcttcttgataatgaaagacaaatccaagaatatatgaaagaattacactccattcctgataaaaaggacaatcttagaaaagagttggtcaaagaagaagggaaaaatttacagttagatgagaaaatcaatttcatgataaaagagcagggtgttagggaggttattcgggatgcttgggaaatttatttcagctctctcgtcaagttaggtgagaatgatacattgagaagaatcgctgaggagtatttggaacttgctcgtgattatttggtcgggaaagaagatttaaagaatcttcgtactcggtctgaaaaagagctattaaatgagttctataagtccagacaagcaattgcacaatattctccgatccttgatgaatgcactagtaacattgaagataatttggtgattccatcggagttagaggaattgaacctagatacagaatggggaaatcttatttctctacgtaagtacaaacttgcactagaaatacaggttaatggcattgttaaacgaagagaaccgcgttatgtattgtcagttcttaaagaacgcatggacttgcaacgagctaatttaaacgagcgagataaaagaatgtatgaggaaatcctgttaggctctattggccgaacaattaagcggaaaattgttcaaacgaaagattgggtaaaaaatttgaatgaaattatgatgaatatcaatacgggtggtgggttacagttcggaattaagtggatgccattgaaagcaacgactgaggaagaactaaatacaagagaaattgttcgcttgctcgacatcgatgcccctttgttaaagcctgaagatcgagaaaagttaattgaccattttagaagtaaaatagaaacaaggaagctagaacaaggtttaggccaatatacaggtctcgatttaaaagagacattcaaagaaatactggattatcgtaaatggtttaaattccaactggtatcaaaatacgttaacgaaggggaatttactcttgtagatcaagataagtttggaaagttcagtggtggtgggagagcattagcgttatacattccgatattagcagcaattagttcttgttatggtgaagctcattatgattcgccgcgcattatttcaatggatgaagtttgggctggtattgataataaaaatatcaatgaaatgtataagttacttgaagaacttgagcttgactttatttcgaacagtcaattcgtttctggttgttctccagctttgaaaggattatcgatttatgaattaattcgaccgaagaacagtaaagaaatcaatttcggaaggtatatttggaatggaagatacaaagaatatgtgaaaaataacttattaagcgaagactatcctggttcagccaacatgtaa

SEQ ID NO: 51653 - DNA, 1335 bp, Bacillus cereus
ttgtattctcaagttcaagaagcagtgaattactttcgtttaaaaggtggctatgaccgccttttttatttgtttagagaagaaatcattcgatacaacaaagcacgaggtgttgtaattttaaaaaacgcaacagataaggaaaaggaatgtttggatggaataatgcccaacatcaattttaatgataccgatattaaagtgagattactcacttttgagaaaagattacaagaaaaaacagtttatgatagcgtaaacttgcacaatttattagaatgttatttttctcaaaagatcgttagtaataaagaagtgggggagcacaaaagaagcaaaaaggttcaatttattgaagaggtatctaagtatacaagccacccttattatcactactatatggattcaataaagggacagagaagagggtataaacgatttatgaatttgtacaaagaatcctcattcactttgagaaaatatttatctcacttaagccggtctatacaacttttacccttaagtaacatgacgcatgtcgctatgtttgcaactagaatgacaaaggatcctcatgcttatgatttgcaaacctcattaggagatttgctttttgatatgttgacaactacctatgagagggaagtgatgaataggaaattaccatcgaaattatctatagaagaaattaatgatatattgaatcactataatttgattcgggatgatgtttctagtgatgtgacattcacaggtctttatgctagagacaaaagagatttaccaatagaatacatagatatagcaactaaacatgacactgttttgaaattgcctttatgtgaactaataaaagtggaaaaattctatccaattggatcgttccaagttatttatgtatttgaaaaccctattctttacaaggtttttattgaaatggtaaaagaaaaggttggatgttatcctccctcggtgtgtacgagtgggcattttgcttatgcattatggaagttcttcgataaatttatcccatataaccctactgtaagtatcaaaactaatttcgatatggatcctgaaggattaaaaatgaatgacaagctatataatcgctatggagaaatgattcaaccgattgcttactctaaagaattatttaaagagaaacagtcggataatcaaattcatcgtaatcgactaaagcaattagataatcttactcatggtgtcttaaaggaaatgggtgagttgttaaaggaaacgcctcaggcatcgtatcaagaaaactttattgaagtttgcgtagaggatgctattagtcaatttattgggtga

SEQ ID NO: 51654 - DNA, 1545 bp, Ralstonia solanacearum
atgaaactccaaagtgaagctcaagccgatctgttccgccacatcagcgtcgaaaaagctacgctttatcgctgtgtgatggattgcttcgccgcggccaagcgccagttccggctgcacctgcgccccgatgaagttttgaacgaagccaattggaatcggatgccggaacatgctccaccgcgcatcgaagaagtccaggcggcgctcgcgcaactgaccgaatggggcaacctcgaatcgcagccggatacgacgcgagtagccagcatcagcgacttctaccgtgcacgtttcctgtatcggttgtcgcagggtggcgaggccgtggaagcagcactgaccactttcgagcgcacgctacgtcgccgggcggaactgcaaaccgtggcactggaagatatttcgaaccgcctgcaaaccctgctgtctttggcggatagcgccaccccggatacagcgaagatacacgagacactgcgcgatctcgtgcgcgtgttcgaaagcctcgcggacaacgcccaggctttcatggccggcatcggacgcagcatcgaactgcagcaggccgaggttacaacggtgctggcctacaagaagcgattgatcgattacctggagcgtttcatcggcggcctggtgggtcgttccggcggcatcgctcaacatctcgtagcactgtcgccccgcatcgactccctgctctggctggccgcacaacgcgaggcacgcgatagtgcgccggacgacgatccggaacagctcgacgctgtggcacgtggctggcaggcttggcgcgaacgctggaaagggctgcgcagctggttcgtgaccaccggccacgaacctccgcaagccgaactgctacgctcgaaggctcgcgctgcgatcccgcagttgttgattgccgtgtcggcgctcaacgagcggcgcagcggccgtagtgaccgttcggccgacttccgcatgctggcgggctggtttgccgcctgcgaagacgattcgcaagcccaccgtctggcacgtgccgccttcgcgctcaaccccgcacgccacttttcgctcaaccccgctccggcgcccggtatccaggacctgcccgccagcacgccctgggccgaagcaccgccgctgcacatccacccgcgcctgcgcgaatacggtgaagccgcgccgcgcggcgctctgccccgtgtgcagtcccgcgacgagcagcggcgcctgttggcagcgcaactggaagaagagcacgcgcagatcgaagctgcccgcttgcgcttggccaccggccgcgccaccctgctgtccgaacttggcgccctcggcacgcacgacttcgcactgttcctgaaactgctgggagaagcgctgaccgcgcaaatgtcgcccgacgtgccggtggaaacgcagagcggcgacggcctcctgcacatccggttgcagccgctgaccggtagcccccgggccatgatcaccacgcccgcaggcgtgttcagcggacgcgatcacactgtcatcatcacgcgaatggaagacctgccatga

SEQ ID NO: 51655 - DNA, 1251 bp, Ralstonia solanacearum; identical to SEQ ID NO: 50174

SEQ ID NO: 51656 - DNA, 4131 bp, Ralstonia solanacearum; identical to SEQ ID NO: 50175

SEQ ID NO: 51657 - DNA, 1545 bp, Ralstonia solanacearum; identical to SEQ ID NO: 51654

SEQ ID NO: 51658 - DNA, 1251 bp, Ralstonia solanacearum; identical to SEQ ID NO: 50174

SEQ ID NO: 51659 - DNA, 4131 bp, Ralstonia solanacearum
atgaccgatacgcaatccccggcactaccgatcccgaccctagcgcgttggcagccgctgcggctggggctggtcgagcttttccactacgacagcgaagaattctggttccgcgacggccgcctgctgctgcggggcaacaacggcaccggcaaatcgaaagtgctgtcgctgaccctgccctttcttttcgatgcgtatctcaagccgtcgcgcatcgagcccgacggcgacgccagcaagaagatggcctggaatctgctgctgggtcgccatgagcggcgcatgggctacgcgtgggtagaattcggccgcgtaggcgaagatggaaggcatcgctatctcacgctgggcagcgggctctctgccgcggccgcgcgtgcacaggtggacacctggtttttcttgctggacgaacagcgcatcaaccaggacttttggctcatgagcccaacccgggtggtgctcacacgcgaccgcttgcgcgaagcactgcaggattgcggacagtttttcgacaccgcagccccctaccgccgcgccgtggacgagcggctgttccgcctgggttcgacacgatacgcagccttgatcgacacgctgatccagttgcgccaaccgcaattgtccaagaagcccgacgaggccagcctgtcgaaagcactcaccgaagccctgcccccgatctccaccgacctgttggccgacgttgccgatgcgctgaaccagttggaggagtaccgtcgagaactggaggaatacgaggcgctggagcgtgccgtcggccagttcaaccagcgctaccaacgctacgccgccacgcaggcccggcgtcaggcccgcaatttgcgcaccgcgcaaaccggattcgacaacgccagccgcgaattgaactcagcgcgcgacgcgctggagactgcccaagccgaagagaagcgtgccgaccaggcatggcaacaggccgacgccatgctggccgccaaccgcacccggctcgaggaactgcagaacgacccggcgatggccgatgccaagacgctggagaaggctgacgccgatttccggcagcgcgacaaggaagccaatgccgcacagcaaacgcgccatgacatgcaaacccgcctggagcgcgagcggcaggccacgcgcactcgtgcccagcgtgccgagcacgccgggcgcgcgctcgctgagtcgcgcgaagatgcggtgcaagccgccgagcgcgccggcctttcgcatgcctactcggcaaacccgttggccagtgccaacgcccgtctgctgcaaccgctcgcgttggacacagcacgccaggacctgcgccgcgccggcgtcgagcgacgcgcagaggtggcactgctgctgcgccactgcgacgaagccgaccacgcggcacaagcccatacgtacgcgcgaacccagcgcgacgaacgcgccgacgaggcggaagccgctgccgcacagcgagaagaggccgatgccgccgtcgatcggcagggccggacactgctcgatgcgtggcaacgccatctcgacggcctgcggcaattccagtgtcccgatggtgccaacgcactggaagcgctggcagcctggacagtcagcctgcagggcgacaacccggcccgcaccgcgctgcaccgcgcccagcagaccgcaagcctacgtctagcgcagcgccaggccgcactgcagaacgatcgtcatgcgctggaacaggaacacgacaccctgcaagacgagcggacgcgtcttgaacagggagaagatgccgtgccgcagcccccgcactggcgcgcgcccgacgtacgcgtcggccgcgccggtgcaccgctgtggcaattagtggacttccaccccggtacgtccgcagccgactgcgccggcctcgaagccgcgctgcaagcctcgggcctgctcgacgcctgggtgacaccaaatggcacgctgctggatagcgacggcggtgatgcgctgttgttgcacgacgcgcaatggctcacccgcgaacgccagccacagtcgctggccgcttggctacgccccgcagaagcagcaaacggcgcttcgccccgggtcgatcccgccgtggtgcagcacctgctcgagggcgtggcctgctgcgctgaggacaatctcgccgcagaagcctggatcgcccctaccggacgattccggctcggcgcgctggcgggcgcatggcacaagcccggcgccgagttcatcggctacgccgcccgcgctgcggcacgcgaacgccggcagcacgaaatcggcgcacgcctggacgcaatcgacgctgccctcgcgtcgctggcacgagacttcgttcaactcgatgccgatcagcgcgaagccgcccacgaatggcaattcgccccgtctgacgacagcctgcgcgccgcgcacattgcagctgtattgcatgcgcgcgaattcgacatggcgcggcagcgcctggagcacgcggatcggcaactgcgcgccgctgcccagcaatgggaacaggctcgcgaaatcctggcacgcgatgcagaagacctggctcttccccccgcgcgcgatgccctacgcgccatcgaccaggcgctgcaaacgtttggagactgcttgcacacgctagccgtcgacgcgcgcgagctgcgcgacgccctggccgaacacgccgagcaattgcagcgtgagcaacaggccgagtccgacaccctgcacgccgtcgagcaattcgccgagcgcgaggccctggccgaggaagcccacatccgcctggaaacgctgcgcacatctgtcggcgccagggtggaagagcttcaacaacgcctcagcgacgttcgcagcgccgtcacgagcggcgagaccgaactcaggcaacagaacggcacccggcgccaggccggcgaagcacgcgcccgagccgaacaaaaggtcgaagcggccgaagccacgcttgccgaacgcatagccgcacgccagtacgccgtggggcagatgcaaggcttttccgccaccggtctgctggtcacggccctgcccgatgccgagttgccgtctatgcacgcgccctggaccattgagccggcactggcgctggcacgacgtaccgaacaggcactgctcaacgtcaaggacgatgacgaagcatggacccgcgtgcaaagccaagtctcgcaggattacaccgaactcggccgcgcactggccgcgctgagccaccaagcccaggctgaaaccaacgacttcggcctggttgtcagcatcatctaccaaaaccggccagaacgtcccgaccagttgggtgcacgcctggccggagaaattgcccagcgccgcgagctcctcacggccggcgaacgtcaagtactggagaaccatctacaggcagagatcgccagtgcggtgcaaaagctgctgcgcgatgccgagcgtcaggtcaaggccatcaacgacgaactggacaagcgcccgacctccaccggagtgcgcttccgtctgcagtgggaaacgctgcccgaaggtgcggatggcgccccggtaggcctcgaggccgcacgccgccgcttgctcaacaccagcacggatctctggaccgccgaagaccgccgggtggtcggcgaaatgttgcagcagcgtgtcgccgcggagcgcagccgcgccgacgcggaccaaggcggcagccttctggatcaattggcccgagcgctggactaccggcgttggcatcgcttccgcgtgcagcgctgggacggccaatggcggccactgtccggtcccgcctccagcggcgaacgcgcgctgggcctgacagtgccgctattcgccgccgtctccagctactacacgcaggaaagctacgcccacgcgccgcgtcttgtgctgctggacgaggtttttgccggcatcgacgacgcagcgcgcgcgcactgctgggcactgatccgcgagttcgacctggacttcgttgtgaccagcgagcgcgagtgggcctgccccgccgaactgccgggcgtagccatcgcgcaactgcaacgccacgaaggcatcgacgccgtacatgtctcgcgttggacctgggacgggcgaacccggcggcgcgaagacgacccgaaccggaggttccccgacgcatga

SEQ ID NO: 51660 - DNA, 1491 bp, Bacillus coagulans
atggaccagatcatgaagaaagttgtcgaagcgagttatctgacggcggattctgctgcccagtaccgcgtgattttgcgcttcttttacaggcagcatgaaaggatgcgcgactttatttcgccggaggaagtgctcgaatatttgcgctcgctcccggcttttcacgattatgaagaagaacagctgcaccagcagttggcccagctggtaaaatggaataacctggttgcccgccaggatatgacaaatgccaaaaccatcgaagaatataagaaaaaaagattccgctaccagtgtacgccttacacagtggaaatcgagcggatgctgatccagcttgaaaaactgggggaccagttccagggatcgctcgaacgttcgcaatttgaccgtctgctcgcctctttggcaaaactggaagaagaactgaaacagccgttggacaaacctgcagcccactacatgcacatttgggatgacatttttcactttttcgggaccatccggacaaatacagcggattacatagcctatatcaatagcgaaaagacatcacaacggatgcagacggaagcctttctcgtatataaaaaccaattcacggcttatttgcgtgattttatcgtctcgttgcaaaaaacatcgctgcaaatccgggaaaggttgcgggaactggatacgcatatattggcgccgctttttgaaaaactcgtggaacacaggcgccaaattccccgcttggaagatacggctgcttccggacaagaatggctggaagaattccgggaatactgggagtctttgcggcggtggtttcttggggccagctcctcccaaagtgaactggaaatgctgcagatgcagacaaatgaaatgatccggaggatggcccgttatgttcagcggatcagtgaacgccagcaacatttccggagccggaaaaaagattatttgcacctttccaaatggtttgccgggtgccgtaatctggaagaggcccatcaattgtcatccgtcgtgttcgggacggtgacggtacggcatttgcacctggaggaggcgacaacggacaatcttcatgccgagacatgggaagaacagccggagatgcgggaaatcaagccgcgaacgaaccggtaccgcgagaaaacaaagccaggcgctttccgttctaaccatgagcagaaagaaaagcagcggctcgcctatttaaaagagcgcgaacaggaaaagcagctgattgaaaaatatatgaaaaacggggagattcgccttgctgaaatcgggatagtggagccgtttgtccggaaagtgctgctcggctggatcggaaaatcgatggcagcgaaaaaccatgaagtaaaaacggattacgggatgtccgtaaaagttgtgattgacccggatcggatcatcacactggatgcagaagacgggaaactgatcatgccggatgctgtatttgaattatcgggaggagagcgctga

SEQ ID NO: 51661 - DNA, 1164 bp, Bacillus coagulans
atggatccgttacaagtttttgatgaaaaagcggtgcaggggatggacctgttattccatcattactggattttgcggtctgagcacccggactggtaccagctcatccgcgagcgcgaaaaagtgctgcgccgttacatcagcgagaaattcgggctcaggctgatcatccaccagcattttatcaaacttgaaaaaatcccggtggaaccggaaagctggatgggcatcccgcattttcaggagccgatggattatgcgattttttgctgcgcgctttcttttctggaaggaaaagcggtggatgaacagttcctcttgtcggagatgtgccaggagatccaaaacgattatcctgtggaagatgggctggactggacgctttatcttcaccggaagtcgctcatccgggcggtccgggcactgatggaattccatctgatccggacaatagacggcgatatttccaggtttgacacttacgaagaccaggaagtcctatatgaagcgaccgtttacagccgctattttctaagaagctttccggatgattttacaagttatgcggactggaccgggctccttgaagaagactggaaacagaatcaggaagatgaacggcgcaagcgggtgtaccggaaattgtttttctcccccggcctgcaccggaaagatacgcaggaccccgattttctttatatccgcaatttccgcaaccggctttttgaggacattgaagaacacagccgttataagctccatgtttttaaaaacacagcctttttatctgccgcagaaccgcggagttaccaccatgtttacccgaatgcaaaaggttctacggatctgatgctgcagttgtcaaagacgctgcatgaccacccggaaaaatacgttccgaatgaagcgggggaaattttgcttacggaaggcgaatttgaagcggtcattgacgagatgcgctcccgcctcgaacgcggatggccgaaacatttccgggacgccggcacaaaggcggtatgtgcggaattggtcgaaacgatgaaagaatggatgatggcggaaacggatgaagcggcggggctgatccggataaaaccgctgttgggcgtgcttgcaggcgagtatccagctgattttgagaaaggggttgagcaaccgtga

SEQ ID NO: 51662 - DNA, 4113 bp, Bacillus coagulans
gtgacagaaggaaaatgggtgatgaaccgcgccggcctgttaaatttttggtattatgacgatgaaatttttgaatttgcggacggaaagctgttgttgcgcggcacaaacggttcggggaaatcggtgacgatgcaaagcattttaccggttttgctggacggaaaaaagacgcctgaccggcttgatccgttcgggtcaaaagcaaggaagatggaagattacctgcttggggaaaaggaagtgtccggccatgacgagcggaccggctacttgtttctggaataccaaaagcaggggacaaaacagtatatcacaacgggcatcggcatgcaggcaaagcggcataaaacgttaaaatcatggtatttcgtcctgaccgacaaccgcaggatcggctacgattttgaactggcgcacacccgccagtcagagcggatcccgttgtctgcaaaagagcttgaaaaccggatcgggtccggggggtatctcgtccactcgcagaaagaatatatggaactggtgaacaaatatattttcggttttcagtcgatggaagcctttgaagatttaatcaagcttttgattcagctgagaagcccgaaactgtcaaaagatttcaagccgacggtcatttatgaaatcctcgagtccgcgctgccgcctttgacggatgacgagctccgccatttgtccgacacgattgaaagcatggacgaaacggagcagcagcttgagcagcttgaacgggagcacgaatcggcaaagaaactggtgcgccaatacgatctttacaatcaatatattttagcggaacgcgcccaaaaatggcgggaggccgaaagcaggctgcaggacgccaagcaggacgccagcacgttagaaacccgctctgaatcactgcgcggcgtgattgaaaacctggaagaagagaaaaagcattacgaacaaaaacgcgacgttttaaaagcagaacaggaacggctgcagcaccatgaagtttggcgccttgagaaagaaaaaggggagaaacaggccagggctgaaaagttaaaaagtgaagcagcggatctggagaaaaagtgggaagcaaagaaaagccagcttttggacatccgcctggagcaggaccggttggaaacagaaaacagcaaggatgaatccagtatgcaggagatactggatgaactggcactggatgccggggatgcagcttttaccgggcacgggataaacgccggggatttttcgcggcatgagggggaagcttttgatttttcggtttggaagcgggaaacgaaacagcacagcggacttttgcaaaagctgcggcaactggccggagaagtggagcggcttcacgaagcgcatctgaaactgcagcgccagtcatctgccaaaaagcaggaaattgacgaactccggaaacaactcgaccatttggaaaactggtttaccgaacaaaagcaggagctggaagatgccgtgtttttgtggattgaacagcatccggccctctcttttacagacgagcggctccggcgtattgccggcgcgctggacgggctgtacgaagaaaaccgttatgaagcggtcagggaagaaattgtggacgcggcaaatgattatattttgcaagtgcggacagaaatttcacgcgcggagcaggaacaaaaggcgaaagaacaggaattggccgaagccgaagaaacgcttgtgtattggcaaaacttgaaacttgccaacccggaacgccccgcagatacggaggctttccgtgcgcgtctccatgaatcagggaaacgctatctcccgttttatgccgcggtggaatttcgcgatcatgtgaccgatgcccaaaaagccaggattgaagcggcactccggcagacggggattttggacagcctgattacggaagagccggttacgcctgtccacgaccgggtcatccgcccgaacccgcacattctcggatacacgcttgccgattacttaaagccggatccggatgacgatagcccggtttcagccgcgcgcattgacgaagtgctgcgcagcattccgcttgaaccatcggagagcggttttcacattgacgcggatggctctttttcaatcggctgcctcgttgggcatgccccggatgaagggccttccaaatttatcggcagaacgtcccggaaacggtaccagcaggaaaaaatcaaagaaacagagcaaaagattgctgaaatccgccttgctcttttgcaaatggaaaacagccttttagactgggccggcaaagtacaggaagcagaagattggaaagcgggcattccggatgacaaagatttgcgcgacattgaagaacagatggaaaaaacggcgcgcagcctgaagcaggaacaggaatttctgagcgacatcgaccgcgaatggaaacaagtataccaggatttgcaaaacatccggctgcaattgcatgagcaaggggccggcctgaatcttgcacttcaaagcggcccgctcgatgaagcgctggctgctgcgaaaagttatgaagaacatcttcacaatctggagctcacttttcaacggttgttttccaggcgcaaaatgctcgcgcgccttgctgcggacatccttgagaaagagcaggaactcgatgaaatccgcggtgaagagaacatccgccggtcagaatgggagaaaacagcggcagatatcgaagcgattgagcagcagctgaaattgcgggggattgaggaggtccgcgcccggattcaggcagtccagcatgaatatgcaagtacggacgaaaaaatcagggatatttacgaaacgaagccgaaaaaagaagcagaacttgaaaagtgcatagccgatttgtctcttgcgaaaacgcgcgccacattttgggcaaatatggccgcggaatgggagaaactcgtaaaagaagagctttcactcggcttcgtggaaagcggagatacggaaccggaaagcattttggcggcgttttccggcgtgctggaaaaatatgaccgcgcaaaattaaatgaaaacctgacaaaaatttttttcaacgaacaatcgaatttaacagagtaccgcatgtccgagtttacaaaagaagcggatccgccagaatggttcactgaaaaactcgatgactattacgaaacgttcaaaaaggaatgggaaggtttgcggggccgccgcctcatccagatggaataccgcggccgcagggtgagcccgtatacggtactcgagtctcttgaaaaagaacttttaaacttgcaaagttatttggatgagcaggacagaaggctgtacgaggatattatcgtcaatacggttggtgtcatcttgcggaaccggatccagcgggcagccaagtgggtgaaagaaatggacgcgattatgagaaaccgggataattcgtccggacttactttttcgattgcctggaaagaaaaaacggcggagtccgaagacgagctcgatacgaaagatcttgtcgcgttgctgcagcgcaacagcaagtttttaaacgaggacgatttaaaccggattacaaaacacttccgctcgcggattgcggctgccaaagaactgattgaaatccgcaatgaagggtcgacgctccatcaagttttaaaagaagtgctcgattaccggaaatggttccaattcgtgctgtcatacagacgtgccggcgagccgaaacgcgagctgagcaatactgcatttttcaaattcagcggcggggaaaaggcaatggccatgtatattccgctttttaccgcagcatattcgcgttatttggaggcaggaagtatggcgccgtatatcatttcgctggacgaagcgtttgccggggtggatgaaaacaatatccgcgacatgttcgaagtcgtcgagcagctcggattcaattatattatgaattcgcaggcgctctggggcgactatgacaccatttccagccttgccatttgcgagcttgtccgcccgaaaaacgccaattttgtcaccgtgatccgttaccggtgggacgggcataaacggtcgatagtggaaaaaccggaagaagcattggcgggagctccggaccggctttga

SEQ ID NO: 51663 - DNA, 1296 bp, Bacillus coagulans
atgaatgatgcgatcgatctgttaaggaaggaaccggggatgatgaaactgttccgcctttttaaagaaaaataccgttcgctcggccatatcgggggaaccgtcagtcttgccggttttacgcgcactgaactggaggcgattgcaggtcttgccggcacgtcccctgatttgctcagagagaaaaacaaaatttcgctgcgagcatttgaaaaggcgctggcgccgactgttttcggcaagtacaccctggttgagctgcttgaagcggttttgagggaaaaaattttttccaaagcggaagaaggggaaatagagaaaaagaaagaggaacagtttttggcgcggctggcggagacgatgccgggcggaaactggtggtggcgccggattgccggtaaaacggctgacacgcgttttatctggcatgcgtacaagcaggatccggatacgttgtccgcacagctcacaaccgtcttgaaagcttccacaatgctgccggaagaagggaaatatgaacgaattccgtttttttcccagcgtgtgacagggaacccgcatttttttgaccagaaccgtttcgaaggcaggctctttgtccattgtttgttcaccagccaattgttgaaagggctgatcgaagagatgccgaaaacgacggaagaattgaacgaactgtacgcaaatgccgggctgatgcgggatgacttatggagttttgtgacgtgccgcgcatttttggcggaaacggaaaacggcctgcacccggtctggcgggaagcagctgctctagggacggtcatgaatgtcccggtgaaagaattattgcagcttacaaacatttggccgcgggtgggaaaaaaagtctggatcattgagaattccggcgtggcttcggccgtgcttgatgaagtgcccgatgcgcctgtgatttgcacgcacggccagttccgcactgctgcctggatcatgctgcagcgtcttgcggaaaacgggtgtactttttattattcgggcgatctcgatccggaaggcgttgtcatggcggagcgcctcagcaaccgttttcccgggcaaacggtattttggcggatggacccggatgcatactggcgggttctgtcggaagaggatatatccgcccggctttccaagctggatgcggttcaatcccctgaactgcttttagtggcagatgaaatgcggttgaagaaaaaagcggggtaccaggaaggccttgccgatttgcttgtagaagatttgaaaaaaagatgggcgggcggaaaagagatatga

SEQ ID NO: 51664 - DNA, 927 bp, Bacillus coagulans
atgcagacggaagcctttctcgtatataaaaaccaattcacggcttatttgcgtgattttatcgtctcgttgcaaaaaacatcgctgcaaatccgggaaaggttgcgggaactggatacgcatatattggcgccgctttttgaaaaactcgtggaacacaggcgccaaattccccgcttggaagatacggctgcttccggacaagaatggctggaagaattccgggaatactgggagtctttgcggcggtggtttcttggggccagctcctcccaaagtgaactggaaatgctgcagatgcagacaaatgaaatgatccggaggatggcccgttatgttcagcggatcagtgaacgccagcaacatttccggagccggaaaaaagattatttgcacctttccaaatggtttgccgggtgccatagtttggaagaggcccatcaattgtcatccgtcgtgttcgggacgatgacggtacggcatttgcacctggaggaggcgacaacggacaatcttcatgccgagacatgggaagaacagccggagatgcgggaaatcaagccgcgaacgaaccggtaccgcgagaaaacaaagccaggcgctttccgttctaaccatgagcagaaagaaaaacagcggctcgcctatttaaaagagcgcgaacaggaaaagcagctgattgaaaaatatatgaaaaacggggagattcgccttgctgaaatcgggatagtggagccgtttgtccggaaagtgctgctcggctggatcggaaaatcgatggcagcgaaaaaccatgaagtaaaaacggattacgggatgtccgtaaaagttgtgattgacccggatcggatcatcacactggatgcagaagacgggaaactggtcatgccggatgctgtatttgaattatcgggaggagagcgctga

SEQ ID NO: 51665 - DNA, 1164 bp, Bacillus coagulans
atggatccgttacaagtttttgatgaaaaagcggtgcaggggatggacctgttattccatcattactggattttgcggtctgagcacccggactggtaccagctcatccgcgagcgcgaaaaagtgctgcgccgttacatcagcgagaaattcgggctcaggctgatcatccaccagcattttatcaaacttgaaaaaatcccggtggaaccggaaagctggatgggcatcccgcattttcaggagccgatggattatgcgattttttgctgcgcgctttcttttctggaaggaaaagcggtggatgaacagttcctcttgtcggagatgtgccaggagatccaaaacgattatcctgtggaagatgggctggactggacgctttatcttcaccggaagtcgctcatccgggcggtccgggcactgatggaattccatctgatccggacaatagacggcgatatttccaggtttgacacttacgaagaccaggaagtcctatatgaagcgaccgtttacagccgctattttctaagaagctttccggatgattttacaagttatgcggactggaccgggctccttgaagaagactggaaacagaatcaggaagatgaacggcgcaagcgggtgtaccggaaattgtttttctcccctggcctgcaccggaaagatacgcaggaccccgattttctttatatccgcaatttccgcaaccggctttttgaggacattgaagaacacagccgttataaactccatgtttttaaaaacacagcctttttatctgccgcagaaccgcggagttaccaccatgtttacccgaatgcaaaaggttctacggatctgatgctgcagttgtcaaagacgctgcatgaccacccggaaaaatacgttccgaatgaagcgggggaaattttgcttacggaaggcgaatttgaagcggtcattgacgagatgcgctcccgcctcgaacgcggatggccgaaacatttccgggacgccggcacaaaggcggtatgtgcggaattggtcgaaacgatgaaagaatggatgatggcggaaacggatgaagcggcggggctgatccggataaaaccgctgttaggcgtgcttgcaggcaagtatccggctgattttgagaaaggggatgagcaaccgtga

SEQ ID NO: 51666 - DNA, 4113 bp, Bacillus coagulans
gtgacagaaggaaaatgggtgatgaaccgcgccggcctgttaaatttttggtattatgacgatgaaatttttgaatttgcggacggaaagctgttgttgcgcggcacaaacggttcggggaaatcggtgacgatgcaaagcattttaccggttttgctggacggaaaaaagacgcctgaccggcttgatccgttcgggtcaaaagcaaggaagatggaagattacctgcttggggaaaaggaagtgtccggccatgacgagcggaccggctacttgtttctggaataccaaaagcaggggacaaagcagtatatcacaacgggcatcggcatgcaggcaaagcggcataaaacgttaaaatcatggtatttcgtcctgaccgacaaccgcaggatcggctacgattttgaactggcgcacacccgccagtcagagcggatcccgttgtctgcaaaagagcttgaaaaccggatcgggtccggggggtatctcgtccactcgcagaaagaatatatggaactggtgaacaaatatattttcggttttcagtcgatggaagcctttgaagatttaatcaagcttttgattcagctgagaagcccgaaactgtcaaaagatttcaagccgacggtcatttatgaaatcctcgagtccgcgctgccgcctttgacggatgacgagctccgccatttgtctgacacgattgaaagcatggacgaaacggagcagcagcttgagcagcttgaacgggagcacgaatcggcaaagaaactggtgcgccaatacgatctttacaatcaatatattttagcggaacgcgcacaaaaatggcgggaggccgaaagcaggctgcaggacgccaagcaggacgccggcacgttagaaacccgctctgaatcactgcgcggcatgattgaaaacctggaagaagagaaaaagcattacgaacaaaaacgcgacgttttaaaagcagaacaggaacggctgcagcaccatgaagtttggcgccttgagaaagaaaaaggggagaaacaggccagggctgaaaagttaaaaagtgaagcagcggatctggagaaaaagtgggaagcaaagaaaagccagcttttggacatccgcctggagcaggaccggttggaaacagaaaacagcaaggatgaatccagtatgcaggagacactggatgaactggcactggatgccggggatgcagcttttaccgggcacgggataaacgccggggatttttcgcggcatgagggggaagcttttgatttttcggtttggaagcgggaaactaaacagcacagcggacttttgcaaaagctgcggcaactggccggagaagcggagcggcttcacgaagcgcatctgaaactgcagcgccagtcatctgccaaaaagcaggaaattgacgaactccggaaacaactcgaccatttggaaaactggtttaccgaacaaaagcaggagctggaagatgccgtgtttttgtggattgaacagcatccggccctctcttttacagacgagcggctccggcgtattgccggcgcgctggacgggctgtacgaagaaaaccgttatgaagcggtcagggaagaaattgtggacgcggcaaatgattatattttgcaagtgcggacagaaatttcacgcgcggagcaggaacaaaaggcgaaagaacaggaattggccgaagccgaagaaacgcttgtgtattggcaaaacttgaaacttgccaacccggaacgccccgcagatacggaggctttccgtgcgcgtctccatgaatcagggaaacgctatctcccgttttatgccgcggtggaattccaggatcatgtggccgatgcccaaaaagccagaattgaagcggcactccggcagacggggattttggacagcctgattacggaagaaccggttacgcctgtccacgaccgggtcatccgcccgaacccgcacattctcggatacacgcttgccgattacttaaagccggatccggatgacgacggcccggtttcagccgcgcgcattgacgaagtgctgcgcagcattccgcttgaaccgtcggacagcggttttcacattgacgcggatggctctttttcaatcggctgcctcgttgggcatgccccggatgaagggccttccaaatttatcggcagaacgtcccggaaacggtaccagcaggaaaaaatcaaagaaacagagcaaaagattgctgaaatccgccttgctcttttgcaaatggaaaacagccttttagactgggccggcaaagtacaggaagcagaagattggaaagcgggcattccggatgacaaagatttgcgcgacattgaagaacagatggaaaaaacggcgcgcagcctgaagcaggaacaggaatttctgagcgacattgaccgcgaatggaaacaagtataccaggatttgcaaaacatccggctgcaattgcatgagcaaggggccggcctgaatcttgcacttcaaagcggcccgctcgatgaagcgctggctgctgcgaaaagttatgaagaacatcttcacaacctggagctcacttttcaacatttgttttctgggcgcaaaatgctcgcgcgccttactgcggatatctttgaaaaagagcaggaacttgatgaaattcgcggtgaagagaacgtccgccggtcagaatgggagaaaacagcggcagatatcgaagcgattgagcagcagctgaaattgcaaggcattgatgaggtccgcgcccggattcaggcagtccagcatgaatatgcaagtacggacgaaaaaatcagggatatttacgaaacgaagccgaaaaaagaagcagaacttgaaaagtgcatagccgatttgtctcttgcgaaaacgcgcgccacattttgggcaaatatggccgcggaatgggagaaactcgtaaaagaagagctttcactcggcttcgtggaaagcggagatacggaaccggaaagcattttggcggcgttttccggcgtgctggaaaaatatgaccgcgtaaaattaaatgaaaacctgacaaaaatttttttcaacgaacagtcgaatttaacagagtaccgcatgtccgagtttacaaaagaagcggatccgccagaatggttcgctgaaaaactcgatgactattacgaaacgttcaaaaaggaatgggaaggtttgcggggccgccgcctcatccagatggaataccgcggccgcagggtgagcccgtatacggtactcgagtctcttgaaaaagaacttttaaacttgcaaagttatttggatgagcaggacagaaggctgtacgaggatattatcgtcaatacggttggtgtcatcttgcggaaccggatccagcgggcagccaagtgggtgaaagaaatggacgcgattatgagaaaccgggataattcgtccggacttactttttcgattgcctggaaagaaaaaacggcggagtccgaagacgagctcgatacgaaagatcttgtcgcgttgctgcagcgcaacagcaagtttttaaacgaggacgatttaaaccggattacaaaacacttccgctcacggattgcggctgccaaagaactgattgaaatccgcaatgaagggtcgacgctcaatcaagttttaaaagaagtgctcgattaccggaaatggttccaattcgtgctgtcatacagacgtgccggcgagccgaaacgcgagctgagcaatactgcattttttaaattcagcggcggggaaaaggcaatggccatgtatattccgctctttaccgcagcatattcgcgttatttggaggcaggaagtatggcgccgtatatcatttcgctggacgaagcgtttgccggggtggatgaaaacaatatccgcgacatgttcgaagtcgtcgagcagctcgggttcaattatatcatgaattcgcaggcgctttggggagactatgacaccatttccagccttgccatctgcgagcttgtccgcccgaaaaacgccaattatgtcacagtaatccgctaccggtgggacgggcataaacggtcaattgtggagaaccggaaagaagcattggcaggagctccggacctgctttga

SEQ ID NO: 51667 - DNA, 1296 bp, Bacillus coagulans
atgaatgatgcgatcgatctgttaaggaaggaaccggggatgatgaaactgttccgcctttttaaagaaaaataccgttcgctcggccatatcgggggaaccgtcagtcttgccggttttacgcgcactgaactggaggcgattgcaggtcttgccggcacgtcccctgatttgctcagagagaaaaacaaaatttcgctgcgagcatttgaaaaggcgctggcgccgactgttttcggcaagtacaccctggttgagctgcttgaagcggttttgagggaaaaaattttttccaaagcggaagaaggggaaatagagaaaaagaaagaggaacagtttttggcgcggctggcggagacgatgccgggcggaaactggtggtggcgccggattgccggtaaaacggctgacacgcgttttatctggcatgcgtacaagcaggatccggatacgttgtccgcacagctcacaaccgttttgaaagcttccacaatgctgccggaagaagggaaatatgaacgaattccgtttttttcccagcgtgtgacagggaacccgcatttttttgaccagaaccgtttcgaaggcaggctctttgtccattgtttgttcaccagccaattgttgaaagggctgatcgaagagatgccgaaaacgacggaagaattgaacgaactgtacgcaaatgccgggctgatgcgggatgacttatggagttttgtgacgtgccgcgcatttttggcggaaacggaaaacggcctgcacccggtctggcgggaagcagctgctgcagggacggtcatgaatgtcccggtgaaagaattattgcagcttacgaacatttggccgcgggtgggaaaaaaagtctggatcattgagaattccggcgtggcttcggccgtgcttgatgaagtgcccgatgcgcctgtgatttgcacgcacggccagttccgcactgctgcctggatcatgctgcagcgtcttgcggaaaacgggtgtactttttattattcgggcgatctcgatccggaaggcgttgccatggcggagcgcctcagcaaccgttttcccgggcaaacggtattttggcggatggacccggatgcatacttgcgggttctgtcggaagaggatatatccgcccggctttccaagctggatgcggttcaatctcctaaactgcttttagtggcaaatgaaatgcggttgaagaaaaaagcggggtaccaggaaggccttgccgatttgcttgtagaagatttgaaaaaaagatgggcgggcggaaaagagatatga

SEQ ID NO: 51668 - DNA, 1491 bp, Bacillus coagulans
atggaccagatcatgaagaaagttgtcgaagcgagttatctgacggcggattctgctgcccagtaccgcgtgattttgcgcttcttttacaggcagcatgaaaggatgcgcgactttatttcgccggaggaagtgctcgaatatttgcgctcgctcccggcttttcacgattatgaagaagaacagctgcaccagcagttggcccagctggtaaaatggaataacctggttgcccgccaggatatgacaaatgccaaaaccatcgaagaatataagaaaaaaagattccgctaccagtgtacgccttacacagtggaaatcgagcggatgctgatccagcttgaaaaactgggggaccagttccagggatcgctcgaacgttcgcaatttgaccgtctgctcgcctctttggcaaaactggaagaagaactgaaacagccgttggacaaacctgcagcccactacatgcacatttgggatgacatttttcactttttcgggaccatccggacaaatacagcggattacatagcctatatcaatagcgaaaagacatcacaacggatgcagacggaagcctttctcgtatataaaaaccaattcacggcttatttgcgtgattttatcgtctcgttgcaaaaaacatcgctgcaaatccgggaaaggttgcgggaactggatacgcatatattggcgccgctttttgaaaaactcgtggaacacaggcgccaaattccccgcttggaagatacggctgcttccggacaagaatggctggaagaattccgggaatactgggagtctttgcggcggtggtttcttggggccagctcctcccaaagtgaactggaaatgctgcagatgcagacaaatgaaatgatccggaggatggcccgttatgttcagcggatcagtgaacgccagcaacatttccggagccggaaaaaagattatttgcacctttccaaatggtttgccgggtgccatagtttggaagaggcccatcaattgtcatccgtcgtgttcgggacgatgacggtacggcatttgcacctggaggaggcgacaacggacaatcttcatgccgagacatgggaagaacagccggagatgcgggaaatcaagccgcgaacgaaccggtaccgcgagaaaacaaagccaggcgctttccgttctaaccatgagcagaaagaaaagcagcggctcgcctatttaaaagagcgcgaacaggaaaagcagctgattgaaaaatatatgaaaaacggggagattcgccttgctgaaatcgggatagtggagccgtttgtccggaaagtgctgctcggctggatcggaaaatcgatggcagcgaaaaaccatgaagtaaaaacggattacgggatgtccgtaaaagttgtgattgacccggatcggatcatcacactggatgcagaagacgggaaactgatcatgccggatgctgtatttgaattatcgggaggagagcgctga

SEQ ID NO: 51669 - DNA, 1164 bp, Bacillus coagulans; identical to SEQ ID NO: 50178

SEQ ID NO: 51670 - DNA, 4113 bp, Bacillus coagulans
gtgacagaaggaaaatgggtgatgaaccgcgccggcctgttaaatttttggtattatgacgatgaaatttttgaatttgcggacggaaagctgttgttgcgcggcacaaacggttcggggaaatcggtgacgatgcaaagcattttaccggttttgctggacggaaaaaagacgcctgaccggcttgatccgttcgggtcaaaagcaaggaagatggaagattacctgcttggggaaaaggaagtgtccggccatgacgagcggaccggctacttgtttctggaataccaaaagcaggggacaaaacagtatatcacaacgggcatcggcatgcaggcaaagcggcataaaacgttaaaatcatggtatttcgtcctgaccgacaaccgcaggatcggctacgattttgaactggcgcacacccgccagtcagagcggatcccgttgtctgcaaaagagcttgaaaaccggatcgggtccggggggtatctcgtccactcgcagaaagaatatatggaactggtgaacaaatatattttcggttttcagtcgatggaagcctttgaagatttaatcaagcttttgattcagctgagaagcccgaaactgtcaaaagatttcaagccgacggtcatttatgaaatcctcgagtccgcgctgccgcctttgacggatgacgagctccgccatttgtccgacacgattgaaagcatggacgaaacggagcagcagcttgagcagcttgaacgggagcacgaatcggcaaagaaactggtgcgccaatacgatctttacaatcaatatattttagcggaacgcgcccaaaaatggcgggaggccgaaagcaggctgcaggacgccaagcaggacgccggcacgttagaaacccgctctgaatcactgcgcggcatgattgaaaacctggaagaagagaaaaagcattacgaacaaaaacgcgacgttttaaaagcagaacaggaacggctgcagcaccatgaagtttggcgccttgagaaagaaaaaggggagaaacaggccagggctgaaaagttaaaaagtgaagcagcggatctggagaaaaagtgggaagcaaagaaaagccagcttttggacatccgcctggagcaggaccggttggaaacagaaaacagcaaggatgaatccagtatgcaggagacactggatgaactggcactggatgccggggatgcagcttttaccgggcacgggataaacgccggggatttttcgcggcatgagggggaagcttttgatttttcggtttggaagcgggaaactaaacagcacagcggacttttgcaaaagctgcggcaactggccggggaagcggagcggcttcacgaagcgcatctgaaactgcagcgccagtcatctgccaaaaagcaggaaattgacgaactccggaaacaactcgaccatttggaaaactggtttaccgaacaaaagcaggagctggaagatgccgtgtttttgtggattgaacagcatccggccctctcttttacagacgagcggctccggcgtattgccggcgcgctggacgggctgtacgaagaaaaccgttatgaagcggtcagggaagaaattgtggacgcggcaaatgattatattttgcaagtgcggacggaaatttcacgcgcggagcaggaacaaaaggcgaaagaacaggaattggccgaagccgaagaaacgcttgtgtattggcaaaacttgaaacttgccaacccggaacgccccgcagatacggaggctttccgtgcgcgtctccatgaatcagggaaacgctatctccccttttatgccgcggtggaattccaggatcatgtggccgatgcccaaaaagccagaattgaagcggcactccggcagacggggattttggacagcctgattacggaagagccggttacgcctgtccacgaccgggtcatccgaccgaacccgcacattctcggatacacgcttgccgattacttaaagccggatccgggtgacgatagcccggtatcagccgcgcgcattgacgaagtgctgcgcagcattccgcttgaaccatcggagagcggttttcacattgacgcggatggctctttttcaatcggctgcctcgttgggcatgccccggatgaagggccttccaaatttatcggcagaacgtcccggaaacggtaccagcaggaaaaaatcaaagaaacagagcaaaagattgctgaaatccgccttgctcttttgcaaatggaaaacagccttttagactgggccggcaaagtacaggaagcagaagattggaaagcgggcattccggatgacaaagatttgcgcgacattgaagaacagatggaaaaaacggcgcgcagcctgaagcaggaacaggaatttctgagcgacatcgaccgcgaatggaaacaagtataccaggatttgcaaaacatccggctgcaattgcatgagcaaggggccggcctgaatcttgcacttcaaagcggcccgctcgatgaagcgctggctgctgcgaaaagttatgaagaacatcttcacaatctggagctcacttttcaacggttgttttccaggcgcaaaatgctcgcgcgccttgctgcggacatccttgagaaagagcaggaactcgatgaaatccgcggtgaagagaacatccgccggtcagaatgggagaaaacagcggcagatatcgaagcgattgagcagcagctgaaattgcgggggattgaggaggtccgcgcccggattcaggcagtccagcatgaatatgcaagtacggacgaaaaaatcagggagatttacgaaacgaagccgaaaaaagaagcagaacttgaaaagtgcatagccgatttgtctcttgcgaaaacgcgcgccacattttgggcaaatatggccgcggaatgggagaaactcgtaaaagaagagctttcactcggcttcgtggaaagcggagatacggaaccggaaagcattttggcggcgttttccggcgtgctggaaaaatatgaccgcgcaaaattaaatgaaaacctgacaaaaatttttttcaacgaacaatcgaatttaacagagtaccgcatgtccgagtttacaaaagaagcggatccgccagaatggttcgctgaaaaactcgatgactattacgaaacgttcaaaaaggaatgggaaggtttgcggggccgccgcctcatccagatggaataccgcggccgcagggtgagcccgtatacggtactcgagtctcttgaaaaagaacttttaaacttgcaaagttatttggatgagcaggacagaaggctgtacgaggatattatcgtcaatacggttggtgtcatcttgcggaaccggatccagcgggcagccaagtgggtgaaagaaatggacgcaattatgagaaaccgggataattcgtccggacttactttttcgattgcctggaaggaaaagacggcggagtccgaagacgagctcgacacgaaagatcttgtcgcgttgctgcagcgcaacagcaagtttttaaacgaggacgatttaaaccggattacaaaacacttccgctcacggattgcggctgccaaagaactgattgaaatccgcaatgaagggtcgacgctccatcaagttttaaaagaagtgctcgattaccggaaatggttccaattcgtgctgtcatacaaacgtgccggcgagccgaaacgcgagctgagcaatactgcatttttcaaattcagcggcggggaaaaggcaatggccatgtatattccgctttttaccgcagcatattcgcgttatttggaggcaggaagtatggcgccgtatatcatttcgctggacgaagcgtttgccggggtggatgaaaacaatatccgcgacatgttcgaagtcgtcgagcagctcggattcaattatattatgaattcgcaggcgctttggggagactatgacaccatttccagccttgccatctgcgagcttgtccgcccgaaaaacgccaattatgtcacagtaatccgctaccggtgggacgggcataaacggtcaattgtggagaaccggaaagaagcattggcaggagctccggacctgctttga

SEQ ID NO: 51671 - DNA, 1296 bp, Bacillus coagulans
atgaatgatgcgatcgatctgttaaggaaggaaccagggatgatgaaactgttccgcctttttaaagaaaaataccgttcgctcggccatatcgggggaaccgtcagtcttgccggttttacgcgcactgaactggaggcgattgcaggtcttaccggcacgtcccctgatttgctcagagagaaaaacaaaatttcgctgcgggcatttgaaaaggcgctggcgccgactgttttcggcaagtacaccctggttgagctgcttgaagcagttttaaaggaaaaaattttttccaaagcggaagaaggggaaatagagaaaaagaaagaggaacagtttttggcgcggctggcggagacgatgccgggcggaaactggtggtggcgccggattgccggtaaaacggctgacacgcgttttatctggcatgcgtacaagcaggatccggatacgttgtccgcacagctcacaaccgttttgaaagcttccacaatgctgccggaagaagggaaatatgaacgaattccgtttttttcccagcgtgtgacagggaacccgcatttttttgaccagaaccgtttcgaaggcaggctctttgtccattgtttgttcaccagccaattgttgaaagggctgatcgaagagatgccgaaaacgacggaagaattgaacgaactgtacgcaaatgccgggctgatgcgggatgacttatggagttttgtgacgtgccgcgcatttttggcggaaacggaaaacggcctgcacccggtctggcgagaagcagctgctctagggacggtcatgaatgtcccggtgaaagaattattgcagcttacgaacatttggccgcgggtgggaaaaaaagtctggatcattgagaattccggcgtggcttcagccgtgcttgatgaagtgcccgatgcgcctgtgatttgcacgcacggccagttccgcactgctgcctggatcatgctgcagcgtcttgcggaaaacgggtgtactttttattattcgggcgatctcgatccggaaggcgttgccatggcggagcgcctcagcaaccgttttcccgggcaaacggtattttggcggatggacccggatgcatactggcgggttctgtcggaagaggatatatccgcccggctttccaagctggatgcggttcaatcccctgaactgcttttagtggcagatgaaatgcggttgaagaaaaaagcggggtaccaggaaggccttgccgatttgcttgtagaagatttgaaaaaaagatgggcgggcggaaaagagatatga

SEQ ID NO: 51672 - DNA, 1491 bp, Bacillus coagulans; identical to SEQ ID NO: 50897

SEQ ID NO: 51673 - DNA, 1164 bp, Bacillus coagulans; identical to SEQ ID NO: 50944

SEQ ID NO: 51674 - DNA, 4116 bp, Bacillus coagulans
gtgacagaaggaaaatgggtgatgaaccgcgccggcttgttaaatttttggtattatgacgatgaagtttttgaatttgcagacggaaagctgttgttgcgcggcacaaacggttcagggaaatcggtgacgatgcaaagcattttgccggttttgctggatgggaaaaagacgcctgatcggcttgatccattcggctcaaaagcaaggaaaatggaagattatctgcttggggaaaaagaagtgtccggccatgacgagcggaccggctacttgtttctggaatatcgaaagcaagggacaaagcagtatatcacaacggggatcggcatgcaggcaaagcggcacaaaactttaaaatcatggtattttgtcctgactgacaaccgcaggatcggctacaattttgaattgacacacacccgccaatcggaacggattccgttgtctgcaaaagagcttgaaaaccgaatcgggtctggggggcatcttgtccattcgcagaaagaatatatggaactggtgaacaaatatatttttggtttccagtcgatggaagcttttgaagatttgatcaagcttttgattcagctcagaagcccgaaattgtcaaaggatttcaagccgacggtcatctatgaaattctcgagtctgcgttaccacctttgacagatgacgagcttcgccatttgtccgacacgattgaaagcatggacgaaacggagcagcagcttgaacagcttgaaagagagcacgaatcggcaaaaaaactggtgcgccaatacgatctttacaatcaatatattttggcagaacgcgcccaaaaatggcaggaggccgaaagcaggctgcaggaagcaaagcaggaggccggtacgttagcagttcgctgtgaatccctgcgcggagtgattgaaaacctgacagaagatcaaaaacagaacgaacagaaacgcgacgttttaaaagcggaacaggaacggctgcagcaccatgaggtatggcgccttgaaaaagaaaaaggagagcaacaggccagggctgaaaagctaaaaagtgaagcagcagatctggagaaaaagtgggaattaaagaaaagccagcttttaaacatccgcttggaacaggaccggttggaaacagaaaacagcaaggatgaagccagcatgcaggagacgctggatgaacttgcactggatgccggagaagcggctttcccccagcacgagatcaatgccggagacttttctcggcatgaaggggaagcttttgatttttctgtttggaaacaggaaatcaaacagcacagcggacttttgcaaaagttgcagcaactggccggagaagcggagcggcttcacgagatgcatatgaaattgcagcgccagtcatctgccaaaaagcaggaaattgacgaactccgtaaacaacttgaccatttggagaactggtttaccgaacaaaaacaagaactggaagatgccgtgtttttatggattgaacagcatccggccctcccctttacagacgaacgactccggcgcattgccggcgcgctggacgggctctatgaagaaaaccgttatgaagcggtcagggaagaaattgtgaaggcggcaaacgattatattttgcaagtgcagaaggaaatttcccgcgcggagcaggcgcaaaaggcaaaagaacaggaattggctgaagccgaagaaacacttatgtattggaaaaacttgaaacttgccaatccggagcgccctcaggatacggaagctttccgcgccggtctcgatggagcagggaaacgctatctccccttttatgccgcggtggaattccaggatcatgtgaccgaagcccaaaaagccagaattgaagcggcactccggcagacgggaattttggacagcctgattacggaagaaccggttacacctgtgcacgaccgggttatccgtccaaatccgcacattctcggctacacacttgccgattacttaaagccggatccggataatggcagcccggtatcagccgcacgcattgacgaagtgttgcgcagcattccgcttgaaccgtcggacagcggctttcacattgatgcggatggctctttttcagtcggctgccttgttggccatgctccggatgaaggaccttccaaattcatcggcagaacatcccggaaacggtaccagcaggaaaaaataaaagaaacagagcaaacgattgctgaaatccgcctagcccttttgcaaatcgaaaaccgcctttcggaatgggctaggaaagtacaagaagcagaagattggaaagcgggcattccagatgacaaagatttacgcgaccttgaagaacagattgaaaaaacagcgcgcagcctgaaacaggaacaggaatttctgacagaaattgaccgcgattggaaacaagtataccagcatttgcaaaacatccggctacagctgcatgagcaaggagccggcttgaaccttgtccttcaaagcggtccgctcgatgaagcactagcagctgcgaaaagttatgaagaacatcttcacagcctggagctcatttttcaacgtttgttttccgggcgcaaaatgcttgcgcgtcttgctgcggatatccttgaaaaagagcaggaactcgatgaaattcgcggtgaagagaacatccgccggtcagaatgggagaaaacggtggcaaatattgaagcgattgagcagcagctgaaattgcaggggattgatgaggttcgcgcccggattcaggcagtccaacacgaatataccagtacggaggaaaaaatcagggagatctacgaagaaaagccgaaaaaagaagcagaactagaaaaatgcaccaccaatttgtctcttgccaaaacgcgtaccacgttttggacaaatatggcggcggaatgggagaaactcgtaaaagcagaactttccctcggcttcgtggagagcgagcacacagaaccggaaagcattttgacggcgttttctggtgtgctggaaaagtatgaccgcgcaaaattaaatgaaaacttgacaaaagtttttttcaacgaacagtcaaatttaacagaataccgcatgtctgagtttacaaaagaagcggacccgccggattggttcgctgaaaaactcgatgactattacgaaacgttcaaaaaggaatgggaaggcttgcggggccgccgcctcatccagatggaataccgcggccgcagggtgagcccgtatacggtactcgagtctcttgaaaaagaacttttaaacttgcaaagttatttggatgagcaggacagaaggctgtacgaagatattatcgtcaatacggttggcgtcattttgcggaaccggatccagcgggcagccaagtgggtaaaagaaatggatgcgatcatgagaaaccgggataattcgtccggacttactttttcgattgcctggaaggaaaaaacggcggagtccgaggatgagctcgatacaaaagatcttgtcgcgttgctgcagcgcaacagcaagtttttaaacgaggacgatttgaaccggattacgaaacatttccgctcacggattgcggctgccaaagaactgattgaaatccgcaatgaagggtcgacgctccatcaagttttaaaagaagtgctcgattaccggaaatggttccaattcgtgctgtcatacaaacgtgccggcgagccgaaacgcgaactgagcaataccgcgtttttcaaattcagtggcggagaaaaggcaatggccatgtacattccgctctttacagcagcctattcgcgctatttggaggcaggcagtatggcgccgtacatcatttcgctggacgaagcgtttgccggggtagatgaaaacaatatccgtgacatgttcgaagtcgtcgagcagcttggattcaattacatcatgaattcgcaggcgctctggggtgattatgacaccatatccagtcttgccatctgtgaccttgtccgcccgaaaaacgccaattatgtgacagtgatccgttaccggtgggatgggcataaacggtcgattgtagagaagccgaaagaatcattggcaggcgccaccccggatctgctttga

SEQ ID NO: 51675 - DNA, 1299 bp, Bacillus coagulans
atgatgaaggatgcgatcgatctgttaaggaaggaaccggggatgctgaaactgttccacctttttaaagaaaaataccgttcgctcggccatattgggggaacagtcagcctttccggttttacgcgcaccgaactggaggcgattgccgggctggccggcacgtcccctgatttgctcagagagaaaaacaaaatttcgctgcgggcatttgaaaaagcgctggcaccgactgttttcggaaaatacacccttgtcgaactgcttgaagcggttttgaaggaaagaattttttccaaagcggaagaggaagaaattgagaaaaagaaagaggaacaatttttggcacggctgacggaaacgatgccggacggaaatgggtggtggcgccggattgccagtaaaacggctgacacgcgttttatctggcatgcatacaagcaggacccggatacgttgtccgcacagctcaaaatggtttggaaagctttcacgatgcttccagaagaagggaaatacgaacggattccgttttattcccagcgtattaccgggaacccgcatttttttgatcaaacccgtttcgtgggcaagctctttatccactgtttgttcaccgaccaatggttaaaagggctgatcgaagaagtgccgaaaacaacggaagaattgaacgaactgtacgcaaatgctgggctgatgcgggatgacttatggagtttcgtgacatgccgcgcatttttggcggaaaccgaaaacggcctgcacccggtctggcgtgaagccgcagctactgggacggtcatgaacgtcccagtgaaagaattattgcagctaacgaatatttggccacgagcgggaaaaaaggtttggatcattgagaattccggtgtcgcttcggctgtgcttgatgcagtgtccgatgcgcctgtgatttgcacgcatggccagttccgcactgctgcctggatcatgctgcaacatcttgcaaaaaacggctgtactttttattattcgggtgatctcgatccggaaggcgttgtcatggcagagcgcctcagcagccgtttcccggggcaaacggtattttggcggatggatccggatgcatactttttgaccctgtcggaagaggatatatccacccggctttccaagctggatgcggttcaatcccctgaactgcttttggtggcaaatgaaatgcggttaaagaaaaaagcaggataccaggaaggccttgccgatttgttgatagaagatttgaagaaaagatggttgagtggaaaagaagcatga

SEQ ID NO: 51676 - DNA, 1491 bp, Geobacillus stearothermophilus; identical to SEQ ID NO: 51372

SEQ ID NO: 51677 - DNA, 1197 bp, Geobacillus stearothermophilus; identical to SEQ ID NO: 51178

SEQ ID NO: 51678 - DNA, 4122 bp, Geobacillus stearothermophilus
atggcgaatccatgggtgcttcatcgtgcggggctgattaatttttggtattacgacgagcagtattttcatttcgctgacggcaagctgctgttgcggggaagcaacggggcgggcaagtcggtgacgatgcaaagcttgatcccggtgcttttagacggcaagaagacgcccgatcgcctcgatccgttcggctcacgggcgcggcgcatggaagactacttgcttggggaaaaagacgtcgtcaatcgcgatgagcggacggggtatttgtttttggaatacaaacgaaaagcatccgaccaatacgtcacaacgggcatcggcctgcgggcaaagcggcaaaaaagcctcgacttttgggggtttgtcatgttcgacaaccgccgcatcggctatgaccttcagttgtataaacaagaaaaaacaggtgaaaaaatcccgctgacgaaacgcgagctcgccgcattgctcggtgcgggcgggacggtcgtcgagacgcaaaaagagtatatggagctcgtcaataagcatgtgtttcgctttgaatcgctcgaggcgtttcaagaattgatcgaactgctcattcaactgcgcagcccgaagctgtcgaaagactttaagccgacggtgatttatgagattttggaaagctcgctgcctccgttgaccgatgacgagctccgccatttatccgaaacgattgaaaacatggaccaagccaagcagcagcttgagcagctcgaacgcgacgaacgggcgttgaagcgcctttgcgatcaataccgcctgtacaacgaatatatgatcgccgaaaaggcggcagaatacgtaaaagcggtcaagcaggccgaacagctcgccgccgagcaacaacgccttcacgatgaagaagaaaagacgcgaaaggcgcttgatgagcttgaggagtccatcacccgcctcggccgcgaagaagacgtgctgcgagcgcgcgaaatcgacttggctggccatgaagtgttccagcaggcggaaaagtatgaacagctgaaagccgaacggcagcgcctagaggaacggcgggagcggcacgagcagacgattgcggaaaaagaacgacaggaacgtcagcaccgccgccgcctcgatgaagcggaagcgcggctggatgaccttgagcggaagcttgaagacgagctggagcagctgcgtatggatgccgacgaaggatccttttccttgcatgaaacgaacgaagacgattttcaccgccatcgccaaaagcaacaagagttttcgtttgccgcgtggaaacaggaagccgaccgccatatcgagcagctcgaggagttggcgcgtctttggcgcaggcatgacgaggtgaaacgacgctatgaagaagcgagcagcgaagcgggcgaaaggcggcgggaaatggacgaatggcgccaccagcaatggaaatgggaagagctgttcgaagaggagaaagagcggtttgaacaagccgtgcttgcctgggtcgagcagggaggaatcgacgtttccgaaacggacattcaggcgtttttgcaacaaatgggcgccctctatgaacagtattcgctcgatgatttgaagcgcccattcgtgcaagcgtattacgatgccgtcggcaagaaaaaggatgagaaatggcggctcgagcatgacatccgtatgttggaagaaaaacgggcagagcgcgaggccgaactgcgtcaatggcgggaacaacgcgaccccgagcctgaacgggatgaacaaaccactgccgcccggttggcgttggaggagaaaggcattccgtttgtcccgctttatgccgcggtcgaatttgtcgacgatgtgcctgacgatgtgcgcgagcgaatcgaatcggcgctttcacacgcggggctgcttgacgccctcattactgctcgcgagatcgacgtcgcctgcgaccgtgtgctcattccgaaaccggtccatatggcgcacacgcttgctgattatttgcgcccagatgccaatgcccctgtgtcaatggagcggattgacgaagtgctccgaagcatcgtcatcaccgatgccgaccaagaaggcggcatgacgatcgatgaaacggggcgctattcgctcggccttgtccacggccatgcaccgcggggatcgaaggcgatgttcattggccgtgcggcgcgcgaacggtggcggcttgagaacatcgcggcgctggaagccgagatcgccgctgtggggcaagagatcgaccgtctgcgcggggcgcatcaggcggtggaagcggccatccaagcgctcgccgactggtttgcgtccttcccatcggaccgcgatgtgcgcaccgcgtttgacgaagcgcaagaagcgcgccgccaagccgaaagcaaagaacgggaatggaagcggcaagaagaaaaagccgctctcttggcgcgcgaatggaaacaaatcaaacaacagctccacgacgagtcggccgagctcgatttggcctttactttagacggctgtgaacaagcccagctcgccatgaaatcgtacgtccgccatgtgcacgaactcgaagtgctttaccgcgaaacgcgccataccgaggcgatgatcgcccaacagcgcgagcggctcgcggcgctggaaacggagatcgacgaagcgaaaggcgaacgaaatcggcttcgggatgaaaccgagcggctcgccttgcgaatcgcggagatggaacggacgctcgcgcaaatgggggcggatgacattcgcgccgaaatcgcccgcattcaagaacgattggcgtttttgcgccaagaaattccgcgccttgtcaacgaacgggcgcggacggaacagcggctcatgcgcttagtcgaagagcgggaaaaaggggcgcagcgggaagcgttcgcccgcgagctcgccgcgatgtgggaaaagtcgtttgcccgtgaagcggcgcttgggcttgtggatcttgatcgttcccgctccctcctagagcaggcgaaagaagcgaaacaacggtacgaagcagtgttaaaagagacgcgttcctcgcttctggcgcggctgaacaccgtctttttccaagagtcgtccaacttgaccgaataccgggcgtccttcgagccgctggaagaacaaacgaagcccgaatggaccgccgctgccccagacgatgagatggccatgaaagccgcggactggcgggagaaacaagaacggcacgtcatttacctcgactacaaaggcgagcgcgccacgccgtttgcggtgctggcggaagtggagcgcgacatcgtcttgcagcacgagtatatgaaagaacaagaccgcgagctgtatgaggacgtcatcttaaaatcagtcggccgcattttgcgcagccgcatccagcgcgccgaacggtgggtgaatgagatgaataaactgatgggcggcctcgacacatcatcagggcttgtgctgtccattcaatggaagccaaaaacggcggagacggaagcggagctcgatacgaaagaattggtgcgcctgttgcggcttgatccgcggctgcttagagaggaagatttacagcgagtgacgaaccatttccgctcgaaaatcgcccgcgcccgcgaattgcttgaagagcgcggccaaggcagcacgctccatcaaatcattaaagaagtgctcgactatcggaaatggttttccttcactttgtactatgaaaaaacaaacgagccgaaacgcgagctgacgaaccaccgcttttaccaattcagcggtggggaaaaggcgatggcgatgtacattccccttttcgccgcggcgtattcgcgctaccaagaagcgggcgatgatgccccgtacatcatttcgctcgacgaggcgttcgccggcgtcgatgaaaacaacatccgcaacctgttcggacttgtcgaacagctcggctttaactacatcatgaactcgcaggcgctttggggcgactacgacaccgtgcccgcgttgtccatttgcgaactcgtccgtccgcgcaatgcgtcgtttgtgaccgtcattcattaccgttggaacgggcgcgtcaaacagctcatggtcgatgacaaagaatgggagatgatcgaaacgtga

SEQ ID NO: 51679 - DNA, 1221 bp, Geobacillus stearothermophilus
gtgagcacggccaaggaggcggctgcctttttccgctctgaaccgggcttccgccgtctgtttatcgagatgaagcacaagtacgagtcgctcggccgcgtcggcggcgcggtgtctttagaggcgttcaccgatgaagagcgggaggcggtggccgcctttttcggcaaagacgtctcccgcgtctcccttatcgcgtttgaaaaacagctcggacagacgaggtttgcgggcgttgggcttgtcgagctgcttgaacagtacttcggcgccccgcttgtctcaaacaaagaacggcgccaggcggaggaagaggaacgggatcgtttttttgcgcgtctgaccgaggagcatcattgggttgagtcggtccgccctcagcgcttcgtccaaacggcgtacgaaaccgaccgccgcagcctggaggaggccatccgccttgtcagcgcggctttgggccgcctcccgctcccgtcatacatgcgcctcccgctctttgcccagcaagtggcgggcgacccgcatgcgttcgatttgtccacgctaccagggagattgttgctttcggcgttgcaagcgaccgtgcccggggattgggacatggcatctgtagagagcgtcaacgaattgctccagtccgtcggcttgctccgtgaggatatcctgaactttgtcacatgcgccaacattcttgctgaaaccaaggacggaccgcatcctgttttctccgctgcctgggaggcgaacacagcgctgaacatgccgcttagagatgtgctgtcgcttgtccgcgcccgccctgcccatggggggacggtgtacattgtcgaaaacgcgggcgtcttttcgacgctgcttgacacccgcgccccgcttgtcagcacgaacgggcaaatgaacgtggcgacgatgaagctgctcgatcttctcgcctcttcaggcgccaagctgtattactccggcgacttcgacccagaaggattggccatggcagagcggctgcaggagcggtatggacaggccgtcaccctttggcgcttttccgtcgaggattatagggccgccaaccctgtcgtcgacctcacccccgagcgcctcgccaagctcgcatccgtaacgtcgacgccgctgcagccgctgaaagaggagatggcggaaacgaaaaaagcggggtatcaagaggcaattatcgggaggctgacagaggatatcaacgggtag

SEQ ID NO: 51680 - DNA, 1497 bp, Geobacillus toebii
atggatgcttcctggctaaagccgatttcggaggtaaagtatttagcggtggacaatgcgtatcgctatcgcgcgattttgcgctatttttacacacagcacgaacggatgcggcaatatttgtttccggaagaagtgtatgcgtttttaaaacagcacgacgaatttcgggattatacggaagacgatctgcagcaagacttagatcaactcgtcaaatggaaaaacttgattgcgagacaagaaacaacacatattcgcacgatcgaggagtttaaaaagaagcgttttcgctatcaatgcagcccgtatacggtcgaaatcgagcgcatgatccgtacgctcgagcagcttggcgattcgtttggcgggtcattggaaaaaacgcgatttgaccgcctgtatacctcgcttgtccgcatcgaaacaattatcaaaaacggatttgcggaaaaacgagatgagatgaaccaagtatgggaagaaacatttgactatttcaaaaaaatcattcaaaattccgccgactatatcgcttacttgaacagcgaaaacatggaagaacaaatgatgtcggatgcgtttctcgtatacaaggaaaagttcacagcgtatttgcgagattttatcctcgcgttgcaaaaaacatcgatgcagattgaaaagctgttggaagatttgcaagaggaagaagtgcgtcagtttgttcatcatgtcgtagactatcaaatgacgattccgcgctgggaagatctttcgcttacaagagagcagatggtggaagaacggatggaaacgtggcgcagcttaaaagaatggtttttaggccggaacgggcatgacagtgaattggcgtttttgcagaaacaaacgaacgaggcgatccgccgtattacaagggttgtgcagcggcttggcgagcggcaccatcattttcgcagccgaaaaaaagattatttgtatctagcacaatggttttctaaactcgattcgctagaagatgcgcataaattgtcatcggtggtgtttggctgttttcacacaaaacatgtggtgacggacaatgatgcgaccgaagatatgtatcgcgacatttgggaagaagcaccaagcgaatggacggtgaagccgcgcgtccgccattaccaggaaaagaaaaagccgcaggcaatcgtagacaatgaaaataaaaagaaacaaacaatggtggagtttttacagcaaaaacagcgtgaagaagaagagctcaaacagttggttcaagacggcaaaattattttacgcgagttgccggttgtcgctccccatgttcgcaaaacgttattaagctggattgcgaaagcgatggcgcgcgaagatcgagtcgtgaaaacggaaattggctggaaggtgaaaattgttcaaaaagatgattcattcattgaattgcacgcggaagacgggacgatgatcatgccgaattatgaaattcattttcttgaggatagggaggactag

SEQ ID NO: 51681 - DNA, 1170 bp, Geobacillus toebii
ttggaacgtgattttgatgaaaaggcgaaaatagcgctaaaagtgttactggaaaacttttggattacccgcgagcgtgacccggaattgtttcagctgattcgcgaacgagaaaatatcgtaaaacgttatgtgcaagaaaaattcggttatcgcctcattgttcaccgctattttgccaaactcgaaaaaataccagcggaacctgaggcatggatgggaatagaatcatttcaagaaccgcttgattacgcgttgttttgttgcttgatggcatatttagaaggaaaggaagtggaagaaaaatttttgctgtcggatgtctgtgaggaaataaaagcgatgtatccaggggaagttccgcttgattggacgaactaccagcagcggcgcgcgctgatccgtgtattaaaaaccgctgaagaacttggggtcgtgaagcgggtggacggcgaaatcgaaggattcgcccagcgggaagaccatgaagcgctatatgaagtccccgtgctttctcgttattttatgcgttcctatccgaaagatttgacgcagtacaaaacgatggaagaattgttagaagaagagtggaaaaccgctccgcaagattatcggcgccaccgcatttatcggcaactgtttttatctccagttgtttatcgacaacaaaaagacgatcctgacttttattacttgcgcaactttcgccatcgattgcgcgaagatattgaagcacatagcgattttcgctacgaactgtataaaaacgccgcgttgttaacgcttccggaacgagaaaacgtatatacactgtttcccgaccaaaaaggaacgtcggatattattcttcatttcgcttctgttgttcgtgaacatcttctagattatccaccagacgaatacgggaaaatcagaatgacacaagcggattttcagcggctgcttacaatatgcaaggagcgctatggagaaggatggggaaaaacgtatcgcgacatgactccagcgcagttaacatcggtgctgttggaggaattaaaacagtggaaaatggcggatgtggaaaaagaaacgggaatgatcatgttatatccactgctcggaaggatagttggccattatcctcccgattttatgaagaaaggaatggatgatgatgatgacgaataa

SEQ ID NO: 51682 - DNA, 4131 bp, Geobacillus toebii
atgacgaataaatgggtgccccatcgcgcgggattattaaacttttggtattacgatgaagaatattttcattttgcggacggcaggctgtttctccgcggcagcaacggttcgggaaaatcagtgacgatgcaaagcttgattcctgttttgcttgacggaaagaaaacccctgaccgccttgatccgtttgggtcacgggcgcgccgcatggaagattatttgcttggggaaaaggaattagttgatcgtgatgaacggacaggctatttatttttggaatataaacgaaaacatagcgaccattatatcacaaccggaatcggtttaagggcgaaacgccagaaaggcatggatttttggggatttgtcatttttgacaaccgccgcatcggcaaagatattgcgttgtacaaaaaggaaaaaacgggggaaaaaatcccgctgacaaaacgagaattaatcacggtgcttggcgacggaggaacggttgtcgatacgcaaaaagagtacatggagcttgtcaataaatatattttccgtttcgaatcgctcgaagcgtttcaagaactgatcgaattgcttattcagcttcgcagtccgaaattgtcgaaagatttcaagccgacggtcatctacgaaattctcgaaagctcgcttccggcgttgacggatgacgaattgcgccatttatcggagacgattgaaaatatggatcaggcgaagcaacagctggaacagctggaacgggatgaagcgtcgctgcggcgcctttgccagcactatcagcaatataacgaatatatgatatgggaaaaagcgaacgaatggctcaaagcagcaaaacaagaggaaaaattaacggaagagcgcgagcagtgtctccgcgatgaggagcggtatgcagcacgaaaagaagagctggcaacggaaattcagagcttacaaaatgagcaagcggtgcttcgcaaacgggagctggatttagcgagccacgaagtgtttcgggccgaagaaaaatatcgggaaacgaaacagcgccttgcgaacgtgcaagatcaaataatgaaagaagaacgttatcttgatgataagcaacaacaagagcgcaagttgaaacaagagattgccaaaagcgaagacgttctttaccagtctgcgcaaacgatcgacgaacaactggaagaattgcgctatgccgcgcttgaaagtgcctttgcctcacatgaactaaatgaagaagactttcagcggcatcgaaacgagccgtttgactttacgctttggcgaaaagaagcggaagcgtatgaaaaacggttagaggaaatattgtcgctttggacgcgccatgatgacctcaagcgccgatacgaagacgcataccacgagcttggagaacagcagcgtttactagacaatctccataatgacgcgaaaaaatggcacgagctattggaaatggaaaaatcgcgcctgcaggaagcggtgtttgcctggaaagaagcacatcctgatattccgatcgatgaagaaacaatccaatcgtttttgcgttatttaaacgagctatatgaacgctatcattttgaagatgtaaagaaaccgtttgccgaccgatattatgaggcgttggaccagaaaaaagcggaaaaagtgagatgggaacacgaaatcgagctagtaaaacgagaaatcgcagaaacagaagaagagctgtgccgctggaaagaacaaaaagaccctgaattagagcatgacgaacaaaccgcacaagcccgcgcggctttacaagcacgaggggttgcgtacgtgccattttacgcaagcgtcgagttttacgaccacgtgccagaatcgttgcgcgaacgaatcgagtcatcgttataccacgcagggctattggacgcgttagtgaccgaaacagacgtttccatcgtgcatgaccgtattctcaagccaaatcctgtggaaatggcacatacgcttgccgaatatttgcgtcccgatgtggatgaagacctcggtgtttccgccgagcgcattgaatctgttcttcgcagcattcttatttctgatgaggcgcaagaaggacgatttgcgatggacgagtcgggccattattcgtttgggctccttcaaggccatgcgccgaaacgagaacaagcgatctttatcggccgcaacgcccgcaagcggtggcgcctttcccaaatcgcgcaaatcgaggaaaagcttcaacaactagatgaacttcttcagcaaaaaaaggaacagcttgcgcatgtggaagcaacaattgcctcgatccatgaagcgtttcaaacgttcccgtctgaccgcgatgttcgcgcggcctttgacgaatgggaccgtacaaaacgcgccatcacaagcaaacaacaagaagtggaacgaaaaagcgaaaaattgaatagcatcgcccgcgactggcaacaagcaaaacaaaggcttcgcgaaaaagcggaaggactcgatcttgaatttacaaaagagcggtacgaagaggcgcggcgatggatgaaattgtatacgggccatttaacggaattggtgctggaacaccgttcgtttctccatcaattgcaagtcagccgctatcatcaagaccagcttgaaaccgtccaagcggaaatcgatgaagcaaaaggcgaaatcaatatattagccagcgagcaacaacgcctccttttagaaatacaacatatggaacaaatgttaaaacagatgggagcggatgacattcgtgcggaaatctcccgtgtgcgcgatcgccttgaatgggtaaacaaggcgttgccggaaaagataaacgaacaagctcacatcgaacaaacgatcaaatccactcaccgtcaactagaagagttagagcgaaaacttcaatttgctagcacgcttgcagcagtatggaagcgatcgtttatcgcagaagcggaacacggtcttgtcgaagtagcggagaatgtagatccgcatgaacaagcaaaagatgttgttcgccgctacggatcaatcggaaaagaacaaacgcgttcatccgtgattgctaaattgaatagcgtattcttccaagaaagcgcgaatttagtggaataccgcctatctcaagaacctgtcgcattagaagaggaaaatccgtttgctggtatcgatttggacgaagaaatggagttaaaggtgagcgattggaaagaaaaacgggatcggatcattcttttgcttgattacaaaggacagcgcgtcactccgttctatttattaaaggaaatggaaaaagacattctccttcagcgggaatacattaatgaacaagaccgcgagttgtacgaagatattattttaaaaacggtcggacgtattttgcgcagccgcattcagcgtgccgaacgctgggtgaaagacatgaacgcgctcatgcaacagcgagatgcttcttccggattattgttgtccattcaatggaaaccgaaaacagcggaaacagaagaagaaatggatacgaaagagcttgttgaattgttgcggatgaattcgcgattgttaaaagaagaagatttgcagcgggtcacgatgcacttccggtccaaaattaaccgcgcccgtgaaatgttagaggagaaagggcaaggaaacacgcttcatcaagtcatcaaagaagtgctcgattaccggaaatggtttacgtttacgctctattatcaaaaaacaaatgagccaaaacgggaattaacgaaccagcgattttatcagtttagcggcggggaaaaagcaatggcgatgtacattccgctttttgcggccgcgtatgcccgctatcaagaagcaagtgaggaggcgccatacatcatttcccttgatgaagcgttcgccggtgtggatgaaaataatattcgcgatatgttcgatcttgttgaatcgctcggctttaattacatcatgaactcgcaggcgctgtggggagattacgacaccgtgccggctctttcgatttgcgagcttgtgcgcccgaaaaacgcttcgcatgtcaccgtgatccgctattattggaacggaacgatgaagcggcttgtgacagattgggacgaacaagaaatggtggtgaaacaatga

SEQ ID NO: 51683 - DNA, 1332 bp, Geobacillus toebii
atgaaatcattgccggaactagcggcggaagcggcgcaattttttcgcggtgaagctggatttcaccgccttttttgcgaaatgaaaaagaagtacgaatcgctcggccgcattggcggcaccatttcccttgcgaattttacgaaagaagaaaaagaagcaatcgcggcgttttttgggaaggaaatgacgcgcgtttcgctacaggcgtttgccaaacaactggataagacaagatttgcaggtgtttcactggaagagctgttagtccattattttggagaaccgctcgtcgcaaacaaagaaaggcgtgaagcggaacagcaggaaaaagcggcgtttttccagcggctgatcgccgcttacccgagtggggcggaatggcttacggcagcgctggagcatccgaacgaataccgtcttcttcaccaagcgtacgtccagcaacgcgatgagctgtatgcttccatttgcacagtttgcgaagcgctgcgccagcttcctgaaaaaggaacatacgaacgtctgccgttattcgcacaaaaagtaaccggagatccgcacgcgtttgatttgcacacatttcaaggaaaactgtttctatccgcgctggaattttactcccggaaaaaatatcagctttcgtccgtagaagaagtcaatgaactattgcaatcgttcggcatattgcgcgaagacatcctcaatttcgtgacgtgcgctggaattttggcagaaacgaaagagggcattcatcccgtattttccgccgcttgtgaaacgaatatggcgctgaatgtgccgctgagggagatagtggcactaacccgcgcgtatccagcgaaaggaaatgccgtctttgtcgtagaaaacgccggcgttttttctgaactgctagacgaagcgatgccgcttgtcagcacaaacggccaactcaatttggcgacgctattgcttcttgacttgcttgtggagtcgggcgctcatctttattattcgggcgactttgatccagaaggtctgaaaatggccgatcggcttgccgggcgatacggcgagaatctttccctttggcatttcacgtgtgaggactactttgcctcgatgccgagtgtgtcgctttctgaggagcggctggctaagctccaatcggtttcctctcccaaactgcagccagtaaagcaggagatcgagcggtgcaagaaagcggggtatcaggaggcgattttgccggtgcttcggaaagatatagagaaggaaaaggcgaatttaaaaatgaagatagacatcgacattcatgatacaaaaaatgcattaccatcagaagaatga

SEQ ID NO: 51684 - DNA, 1512 bp, Geobacillus sp. B4113_201601; identical to SEQ ID NO: 50883

SEQ ID NO: 51685 - DNA, 1158 bp, Geobacillus sp. B4113_201601; identical to SEQ ID NO: 50884

SEQ ID NO: 51686 - DNA, 4119 bp, Geobacillus sp. B4113_201601; identical to SEQ ID NO: 50885

SEQ ID NO: 51687 - DNA, 1239 bp, Geobacillus sp. B4113_201601
atgggagttgatcgagacatgaaccgggccgaagaggccgctgcctttttccgttccgaactgggctttcaccgtttgtttgtcgagatgaagaggaaatacgagtcgctcggtcgtgttggtggcgtcgtctccttggcatcgttcagcgagaacgagcgcgaagccatcgctgcctttttcggccgagacgtttcccgcgtttccctgcccgcctttgaacggcagctcgaacgaacacggtttgccggcgttggcctcatcgagctgctcgagcactatttcggtgagccgctcgtgccgaaaaaagaacagcgtcaggcggccgaaaaggagcgggagcggtttttcgggcatctcgcccacgagcacccttggcttgaagacatttgtggccaacggttcatccaagcagcgtatgaggcaaaccgcgaagagttggcggcggcgatccgtcttgtcggcgccgcccttcgccgcttgccgctcggctcgtatgaacggctcccattgtttgcccagcgtatcgccggtgatccacacgcttttgacctgtcaacgctccccggcaaggtgttgctgtcggccttgcaagcaaccgtgctaggcgagtgggatgtgacctctgtagagagcgtcaatgaattgctgcagtccgtcggcctgctccgcgaggatattttgaactttgccacctgcgccaacttgttggccgaaacgaagaaaggccctcacccggtcttcaccgctgccgtcgaagccaacagcgcattgaatgcaccgctaagggacgtgttgtcgctcattcgcgcctatccagccaacggcggcatcgtatacgtcgtcgaaaacgcgggcgttttctcgaccttgcttgacacccgcgccccgcttgtctgcgcgaacgggcaaatgaatttagcgacgatgcggctccttgatttgctcgcggcttcaggcgccaagctgcattactccggcgactttgacccggaaggtttgaaaatggccgaccgttttctcgagcgatacggctcggcggctgttccatggcgctacagcgtcgatgattacttcgccgccaccccatcggttcacttgcctccggagcggctcgccaaactcgcctccgtagcgtcaacgccgctgcagccagtgaaagaagcgatagcgaaaaccgaaaaagcgggataccaagaggcgatcatcagccgactgcttggagacataaaaagttag

SEQ ID NO: 51688 - DNA, 1491 bp, Geobacillus stearothermophilus
atggatgccacatggctcaaacccattgtcgaaaccaaatatttatcgaccgaaaacgcgcaccgctaccgtgcgattttgcgctatttctatattcagcacgagcggatgcgccaatatttgtttccagaagaagtgtacgcttttttaaagcagcacgaggagtttgccgattacacagaagatgacttgcagcaagacctcgaccagctcgtgaaatggaacaacttgatcgcccgtcaagagacgtcccacgtgcggacgattgaagagtttaagaaaaagcgattccgctaccaatgcagtccgtacacggtggagatcgagcggatgatccgcacgcttgagcagcttggggattcgttcggaggatcgcttgagaaaacgcggtttgaccgcttgtatgcttccctttcccgcatcgaggcgatcatcgcctccgggtttcaggaacagagagatgaaatgtaccaagtatgggaagagacgttcgattatttcaagaaaatcatccaaaattccgcagactatatggcctatttacatagcgaaaacgtggaagagcggatgacgtccgagtcgtttctcgtctataaagagcagtttacggcgtacttgcgcgattttatcgtcgccttgcaaaaaacgtcgatgcagattgaacaattgcttgaagatctgccggaagaaggggttcggcagttcatcgggcatgtcgtcgactatgagcggtcgatcccgcgctttgccgatgcaccgccgccgcgcgctgtgcagattgaagaaaaatgggagacgtggcgcagcttgtgtgaatggtttttaggccgcaacgggcgcgagagcgagctttcgtttttgcaataccagacaaatgaggcgattcgccgtctgacgcgcgtcgtacagcggcttggcgagcggcatcatcattttcgcagccgcaaaggcgactacttgcatttggcgcgctggttttcccgccttgaatcgattgaagaggcgcactgcctgtcagcggtcgtattcggctgcttccatacgaaacatctcgtcgctgatgcggaggcgaccgacaacatataccgcgacgtatgggacgagccgccagccgagtgggtgacgaagccgcgcgtccgccattacggggaaaagaaaaagccgcaggcgattgaagacaaagaacgggagaaagaagaagcgcgccttcgctatttggaagaaaaagagcgcgaggaagcggcgctcagacagcttgtgaccgatggaaaaatcgtgctggctgaccttcccgaggtgactccatatgtacgaaaaacgctgctcggttggatcgccaaggcgatggggcgcgaggggcaagcaatgaagacggaaaacgggttggtggtcaaagtggtgaacaaagaggggacgatttgccttcgtgcagaagatggggaactcgtgatgccgaactacgaaattcatgtgctttcgggaggtgagtga

SEQ ID NO: 51689 - DNA, 201 bp, Geobacillus stearothermophilus
atgtcggctgccgagcttgtccgcgaagtgcttgcggcgctcaacgaatggcgcatggccgatgtggagcacgacaccggaatgatcgtcctttaccccctcctcgggcgggtgtcgggacggtatccagatgattttgacgcgaaagagggaggagaacatggcgaatccatgggtgcttcatcgtgcggggctgattaa

SEQ ID NO: 51690 - DNA, 4107 bp, Geobacillus stearothermophilus
gtgcttcatcgtgcggggctgattaatttttggtattacgacgagcagtattttcatttcgctgacggcaagctgctgttgcggggaagcaacggggcgggcaagtcggtgacgatgcaaagcttgatcccggtgcttttagacggcaagaagacgcccgatcgcctcgatccgttcggctcacgggcgcggcgcatggaagactacttgcttggggaaaaagacgtcgtcaatcgcgatgagcggacggggtatttgtttttggaatacaaacgaaaagcatccgaccaatacgtcacaacgggcatcggcctgcgggcaaagcggcaaaaaagcctcgacttttgggggtttgtcatgttcgacaaccgccgcatcggctatgaccttcagttgtataaacaagaaaaaacaggtgaaaaaatcccgctgacgaaacgcgagctcgccgcattgctcggtgcgggcgggacggtcgtcgagacgcaaaaagagtatatggagctcgtcaataagcatgtgtttcgctttgaatcgctcgaggcgtttcaagaattgatcgaactgctcattcaactgcgcagcccgaagctgtcgaaagactttaagccgacggtgatttatgagattttggaaagctcgctgcctccgttgaccgatgacgagctccgccatttatccgaaacgattgaaaacatggaccaagccaagcagcagcttgagcagctcgaacgcgacgaacgggcgttgaagcgcctttgcgatcaataccgcctgtacaacgaatatatgatcgccgaaaaggcggcagaatacgtaaaagcggtcaagcaggccgaacagctcgccgccgagcaacaacgccttcacgatgaagaagaaaagacgcgaaaggcgcttgatgagcttgaggagtccatcacccgcctcggccgcgaagaagacgtgctgcgagcgcgcgaaatcgacttggctggccatgaagtgttccagcaggcggaaaagtatgaacagctgaaagccgaacggcagcgcctagaggaacggcgggagcggcacgagcagacgattgcggaaaaagaacgacaggaacgtcagcaccgccgccgcctcgatgaagcggaagcgcggctggatgaccttgagcggaagcttgaagacgagctggagcagctgcgtatggatgccgacgaaggatccttttccttgcatgaaacgaacgaagacgattttcaccgccatcgccaaaagcaacaagagttttcgtttgccgcgtggaaacaggaagccgaccgccatatcgagcagctcgaggagttggcgcgtctttggcgcaggcatgacgaggtgaaacgacgctatgaagaagcgagcagcgaagcgggcgaaaggcggcgggaaatggacgaatggcgccaccagcaatggaaatgggaagagctgttcgaagaggagaaagagcggtttgaacaagccgtgcttgcctgggtcgaccagggaggaatcgacgtttccgaaacggacattcaggcgtttttgcaacaaatgggcgccctctatgaacagtattcgctcgatgatttgaagcgcccattcgtgcaagcgtattacgatgccgtcggcaagaaaaaggatgagaaatggcggctcgagcatgacatccgtctgttggaagaaaaacgggcagagcgcgaggccgaactgcgtcaatggcgggaacaacgcgaccccgagcctgaacgggatgaacaaaccactgccgcccggttggcgttggaggagaaaggcattccgtttgtcccgctttatgccgcggtcgaatttgtcgacgatgtgcctgacgatgtgcgcgagcgaatcgaatcggcgctttcacacgcggggctgcttgacgccctcattactgctcgcgagatcgacgtcgcctgcgaccgtgtgctcattccgaaaccggtccatatggcgcacacgcttgctgattatttgcgcccagatgccaatgcccctgtgtcaatggagcggattgacgaagtgctccgaagcatcgtcatcaccgatgccgaccaagaaggcggcatgacgatcgatgaaacggggcgctattcgctcggccttgtccgcggccatgcgccgcggagatcgaaggcgatgttcattggccgtgcggcgcgcgaacggtggcggcttgagaacatcgcagcgctggaagccgagatcgccgctgtggggcaagagatcgaccgtctgcgcggggcgcatcaggcggtggaagcggccatccaagcgctcgccgactggttggcgtccttcccatcggaccgcgatgtgcgcaccgcgtttgacgaagcgcaagaagcgcgccgccaagccgaaagcaaagaacgggaatggaagcggcaagaagaaaaagccgctctcttggcgcgcgaatggaaacaaatcaaacaacagctccacgacgagtcggccgagctcgatttggcctttactttagacggttgtgaacaagcccagctcgccatgaaatcgtacgtccgccatgtgcacgaactcgaagtgctttaccgcgaaacgtgccataccgaggcgatgatcgcccaacagcgcgagcggctcgcggcgctggaaacggagatcgacgaagcgaaaggcgaacgaaatcggcttcgggatgaaaccgagcggctcgccttgcgaatcgcggagatggaacggacgctcgcgcaaatgggggcggatgacattcgcgccgaaatcgcccgcattcaagaacgattggcgtttttgcgccaagaaattccgcgccttgtcaacgaacgggcgcggacggaacagcggctcatgcgcttagtcgaagagcgggaaaaaggggcgcagcgggaagcgttcgcccgcgagctcgccgcgatgtgggaaaagtcgtttgcccgtgaagcggcgcttgggcttgtggatcttgatcgttcccgatccctcctggagcaggcgaaagaagcgaaacaacggtacgaagcagtgttaaaagagacgcgttcctcgcttctggcgcggctgaacaccgtctttttccaagagtcgtccaacttgaccgaataccgggcgtccttcgagccgctgggagaacaaacgaagcctgaatggaccgccgctgccccagacgatgagatggccatgaaagccgcggactggcgggagaaacaagaacggcacgtcatttacctcgactacaaaggcgagcgcgccacgccgtttgcggtgctggcggaagtggagcgcgacatcgtcttgcagcacgagtatatgaaagaacaagaccgcgagctgtatgaggacgtcatcttaaaatcagtcggccgcattttgcgcagccgcatccagcgcgccgaacggtgggtgaatgagatgaacaagctgatgggcggcctcgacacatcatcagggcttgtgctgtccattcaatggaagccaaaaacggcggagacggaagcggagctcgatacgaaagaattggtgcgcctgttgcggcttgatccgcggctgcttagagaggaagatttacagcgagtgacgaaccatttccgctcgaaaatcgcccgcgcccgcgaattgcttgaagagcgcagccaaggcagcacgctccatcaaatcattaaagaagtgctcgactatcggaaatggttttccttcactttgtactatgaaaaaacaaacgagccgaaacgcgagctgacgaaccaccgcttttaccaattcagcggtggggaaaaggcgatggcgatgtacattccccttttcgccgcggcgtattcgcgctaccaagaagcgggcgatgatgccccgtacatcatttcgctcgacgaggcgttcgccggcgtcgatgaaaacaacatccgcaacctgttcggacttgtcgaacagctcggctttaactacatcatgaactcgcaggcgctttggggcgactacgacaccgtgcccgcgttgtccatttgcgaactcgtccgcccgcgcaatgcgtcgtttgtgaccgtcattcattaccgttggaacgggcgcgtcaaacagctcatggtcgatgacaaagaatgggagatgatcgaaacgtga

SEQ ID NO: 51691 - DNA, 1221 bp, Geobacillus stearothermophilus; identical to SEQ ID NO: 51180

SEQ ID NO: 51692 - DNA, 1641 bp, Caldibacillus debilis
ttgatcccttacaaaaaacaacattcccaaatttccggattttttaggcagaaacgaataaccttgagtttaacgattttcacttatttattttccggattgaaggtgagcagcgtgaggatggaaccgtacaaaaaagtggtggaggccagctatttgaccgcggacaaggtttggagctaccgggcgatcctccattatttttacaaacagcatgaacggatgcgcgaatttattttcccggaagaggtctttgcctatttaaaagaccagccggggtttgaacggtacaccttcgaagaactacagcaggatctggatcaattggtgaaatggaataatttgatagccactcaggatccccgcaaggcacggaccatcgaggagtttaaaagaaagaggttccgctatcaatgtacgccctataccgtcgaattcgaacggatgctggaacaaatggaaaagagcggcgaagggttcgggggatccttggaaaagaaagagtttgaaaggttgtaccaatctttgggcctcctgcatcaaatcctcaccaagggggattacccaagcgacgatgaatgttcccagatctggaacgatttgttcggctatttccgcaccatcgtgaaaaacacttccgactacatggcgtatttaaacagcgtcgaagtggaagaaagaatgcagtcggaaagctttctggtttataaggatcaatttaccgcctacttgcgggatttcatcatcggtctgcagcaaacggcccaaaaaatcaaagccgttttacaggagatttccttggatcggctgaccccgttcatccagcgggtcgttgcccatcagctgcaaatcccccgttttgacggcatccaaaaagaacaaaaggaaaagatcgacgaactgaaagataaatggctctcccttcattcctggtttctcggcaacgcctacggggaaagcgtttatgaagaattggaaaaccgcacgaatgaacagattcggagaatcacccggatcatccagcggttgggggaacggcatcatctcttccgcagccgaaagcgggattatttgcacttggcaaaatggttcgattctctcgaaaatctggaggaagcccaccgcctttcagccgtcgtattcggcgtttttcatacccggcatttttacggcgaccagatcccgacggacaatatccataccgacgtatgggaagaagaaccgatccgtttcgaaacgaaaccgaaaatacggaattaccgggaaaaaacgaaggcgggagccatcgaaagcaggaaagatttaaaggaaaagatgcgggaagcctatttgcgggaaaaaaggctggaacaacaggcgatcgagaaatatatgcgcggcaacgagatccgtctggaagagattcccttcattgaaagccatgtgagaaaaatgtttttgacttggatctccaaagcgaccgcccgggcggacagggtgatcaaaaccgaacacgggcggacggtcaaagtccacattgccaaagaccggagaattctcttgcgctcggacgacggcgttttggaaatgcccgcgatcacgtttcagtttcttgatgccgatcgggaagaaacggtaccggcgaaatcatcgctctcctaa

SEQ ID NO: 51693 - DNA, 1344 bp, Caldibacillus debilis
atggccatgatccggaaacctttccgcaagcgccgggttcgatcaaggaaagctattgcaaggtgccccgtaggtgcgcgtcaaaaatccttctcgggttttgatcaaggaatcttttgcccgattccgatttccgggaaacgaccgcaagggagggtggaaaaattggaagaacggaagttcgacgaaaaggcggaaaccgccttaaggctgctgtttgaaaatttttggatcttgcgggaagaaaaccccgaacaataccagctgatccgtgaacgggaaaggattttaaaacggtttatcgatgaaaaattcggttatcccttgatcgttcatcgccattttatcaaattggaaaaaacccccgttgaaccggaggcctggatggggatcctggactttcagagtgtccgggattatgcgatgttttgttgcgccctggcttttaccgagtcgaagcaagtggatgaacaattcctgctttcggaaatttgcgaagacatcaaagacatgtatcccggggaatttcccatcgattggacaaattacaatgaccggaaatcgttgatccgggtgatcaaattcatggaaagattgtccctcttgaagcgggtggagggggatattgaaaaattcgcttcccacgaaaaggaggaagtcctctatgaagtgacggtgtatgcccgttattttatgcgcacctttcccgacgatctgagcgaatacgcctcggcggaagaaattttgcgggcggaatgggaaaggcaatcggatgtccggagaaaaagggtgtaccggaaactgtttttgtcgccggccgtctgccgggaaggggaggatgatgcggattttctgtacatgcggaatttccggaaccggctgcgggatgatatcgaatcccacacctccttccgtttggaactttttaaaaatgccgcctttctcgtcgccgacgaaaaacatccggaattcaccctctttcccgatcaaagggcgatatcggacattgtgctgcatcttggctcccttttgcgggagaagatttccgaattccctcccgacgaatacggaaggatccgaatgacgaaagtgcaattttccgacctcatgaaagagctgaagaacaagtacgggtacggctggagcaaacagtaccgggaagggacggcggcttcattggaaagcgatgtgatcgaactcctgaaagaatgggagctgctcgaagcggaggagtttaccggttcctatcttttcaaaccggcgatcggacgattatccggacattatccgaaggatttttccggggaggcaaaggaggaagttgatggtggagaaacggaataa

SEQ ID NO: 51694 - DNA, 4209 bp, Caldibacillus debilis
gtggagaaacggaataaatggaggctaagccgggcgggactgctgaatttttggtattacgatgaggaaatttttcatttttccaacggaaaattattgctccgcggggcgaacggttcgggaaagtccgttacgatgcaaagcttgatcccggttttattggacggaaaaaaatcgccggacaggctcgatcccttcggttcgaaagcgaggaaaatggaagattacctgttgggggagaaggatgtttcccagctggatgaacggacggggtatctgtttctcgaatacgtcaaagaagagacgaatcaatatttgacgacaggaatggggatgcaggcgaaaaaggacaagggcgtccaatcctggtattttgtgattaccgacaaccgccgcatcggcatcgacttcttcctgtatgaaaaagaatctcacgccgggaaggagcaaaaaattcccttgtcccgcacccaactgcaaaaccggatcggcggcgggggatacgtggttcaatcccaaggcgattatatggatctggtgaacaagtatatttttggcttcgaggatctggaggccttcgaagatttggtgaaattgctcattcaattgcgcagcccgaaattgtccaaagaatatcgcccgagcgtcatccatgaaattttggaagaggcgctgccgcccttatccgatgaagatttgcgccatttgtccgaaacggtcgaaaacatggaccaggcgaagcagcaaatcgagcaattggaaagggagcgggaagccctttcaaagctgatccggcgttatgatgtctacaaccggtaccgtctggcggaaaaagcccatgaatatttgcaatggcaaaagcggcgaagcaaagaagaaaagaagctgcaagaaaaagagagagaaaagggcgcccttgagggaatgatccgccaattgacggaaagggagcgggaattgcggcagcagcttgccgttttggaacaaaaacaagagaggcttgcgggacacagagtttggaacttggaaaaggagaagcgggaggaagaagaacggctccgggaattgacgggagaatacaacaagaaagacggacaaagggatgaaaaacggaaggccgaatggaaacagaaggaaacggtcggccgtttggaaaaagaattggcggacttaaaacgccggatggaagatcacttgcaggaaatggaaagcttggccgaagaagcctccttccgccaacatgccgccaacgcgggagaatttcagcggaaatgggaaagggaatttgatttttccttgtgggaaaaagaagcggaaacgcattatcaagagctggaaaacatcggcggccttttgcgaaactatgaacaattgaaagaaaaaatccaagaataccagaaaaggatcggggagatcaacagggaaatcgacgggctgcgccgggaagaagaggaatggcgaaaactctttgaaaacgacaagcaaaggaagatcgaggagatcttttcctgggccaaggatcatcccttcctgcaagttccggaggaagtcctgcgtcaggccgcccgttggacggatcaactgtatgagccgtatcattacgaagcggtccggcaattgttttttgaggtctttcaaaactaccagctgaaaatgaatgagaaaatcgccaaggtaaacaatcatctccagtccttgcaggaaaacatccgattgaaggaagccgaattggaagcgtggaaaggaaaacgggatccggagccgccgggaaggagcgacgccacgcgggaggcgagaaaatggctggcggagaatcactatccgttcattcccttttacgaagccgtcgaattccgtgaccacgtgccgaaggaagtgcgaaaccgtttggaggcggcgctcttggacgcggggattttggatgccctgatcaccgagcgaaatacgccgatcaggcatgaccgggtgcttgtccccgccccgaaaatgttggcccatactctggcggattatttaaagccggacgtcccggaggattctcccgtatcgagggagaccgtcgatgagattctcctttccatcctcgtggatgaccgttcagaggcggcggttccctttgccgtcagggaagacggttcctacgaaatcggattattgaagggacatgccgttcccgtcgattcggtccgctttatcgggaaaacggcccggaaacggttccgggaggagcagatcctccgcctgacggaagagatcgccgcactgcaaagggaaatcggcgattgggagggaaccttgaaatcttaccaggaagagatttacgccgccaaagaggccatggccgcctttcccggcgatgccgacctccaggaaagttttcatcagataaaacatatcagggctgacatcgaatggcgggaaaaggagcggagccggacggacggacaaatgcaggcgtccctttccgaattccagcagatcaaacgggaaatcgaccgggccgcaagggatttcaatatcgagaaaagtttagcggcttacgacgaagccaagcggtcgatgcggagctacgaacaaaccctccatcaattcaggcaggcatacaccaattaccgcgtgaaaagcgatcatttggccgcggcaaaagaatggcacgacaccctgattcgcgaaatcgatgagttgaccggcgaactgtatgccataaaagataaaatggaaatatgcaggacgaacgtggcggaaatcgagaaacagctgcggctggccggcgtggaagagattcggaaacagattcgggaagttcaacgggatttggcggaatgcaaacgggagttggaaaccgtccgcgacactttgccgcgcaaacaggccgagtcggacagggtcgcgtcggaaatccaagaatggaagaataagctggacttcacccgccatatgatcgaggcctggaaggaggctttttcccgcgaatggcagtatcaattcgttcccgccccggatgaactttccgattgggacgaacgggccaaatgggtaatggaacaatttggccgccttttgcaagaaaaagacaaccaatcggtcgattcccaattgtcccagatttttaatgaacaatatacgaatttgatcgaataccgaatgacggacataccggccgaattgcccccattcccgtggatggatggagattatccggaagaacaacaggccgtgatcaaattttggaaagaaaagtcaataaggcggatcatccaattggattatttcgggaagcaggtcagcccctattatgtcaaggaaatgatcgaaaatgagctggaacggcagaaaagcatctggaatgagcaggacgaaaaattgtacaaggaaatcttgtatggttcgatcggaaataagctgcgcgtgcgcatccaacgggcacaggaatggacgaaaaagatggatcatctgatgcaatcgcgggactcctcctccggcatatccttttccatccgctggaaaccgaaaacagcggaaacggaggaagaattggatacggaagagctggtccgcttattgcagctggatccccgcctgttgaaagagaccgattttcaaaaagtcgtggaacatttccgttcgaaaattaaccgggcgaaagaaacggcggaaggaaagggtgcgggaaataccctgctcgaggagctgaaaggggtattggattacaggcgttggttttcctttactttgtattatcaaagaaaaggggaaccgaaaaaggaattgaaagaccgtgccttttacaaattcagcggcggcgaaaaggcgatggccatgtatattcccctgttcagcgccatatattccagatatttggaagccgcccccgatgcgccccgcatcatcgcgctggatgaggccttcgcgggcgtcgatgaagaaaatattaatttgatgtttgggatcgtcgaggaattgggctttgattatatcatgaattcccaagttttatggggcgattacgagtcggtgaaagaattgtccatttacgaactcgtgcggccgaaaaaccaaaattttgtgaccttgatccgttatcactgggacggcaaccacagaaggctgatcacggaggatgaggaagatcttgaggatgattcgcgttcacctgcccaaggccgcccgtccggggatgaggaagaggaagttcttgagaaggcctga

SEQ ID NO: 51695 - DNA, 1287 bp, Caldibacillus debilis
atgaatgagatccggagagaagcggtcaactatttcaaaagcgaaaaagcctatcattccctgtttaaaaagttcagggaaaaataccaatccatcggccggatcggcgggaccgtccccgtccggttcttttccaaagaggaattggccgtgttcgccaagtttttcggtgtcagcgtttccgaactggaaaaaaaaggttccctttctttgcaaaaatttgaggagcaattggagaaaaccagatttcaggggatcggtctgaaaacgctgctcgacgattttttcggggaagtcatctattccaaaaaagaaatggaacgccggaaagaagaggagcggatagaaaaattttccgttctgaagaagagctatccggttttggccgaatggctcgattatgtttccgaaaaacacggggacagccggtggatcctccgtctggccgaagaggatttcggccgtttcaaagcgtatgcggaccagttggcgaaagcggtccggtcattgccggaaaaaccggagcgattgccctttttcagccaaaggattacgtccaatccccattccttcgatgtccatacggaattgggaaaaatgtttttgcatcttttggcgttcctattggacggtacggcctcccgctttccccgtacgacggaagaagtcaatgatttgttgaatgaatacgggatttatcgggacgatcttttgaattttgccacgatgagcgggtttttcgcggaaggggaggacggcgcccttcaccccgtgtggaaggcggcagcggaatcgcaaacggtcgtccattatccgttaagggcgctcgtccgtttgaagcggatttacccgcgaatgggaaagaaagtctggatcgtggaaaattccggcgttttttccatgctgctggacgaggcgccggaagccccgatcatttgcaccaacgggcagtttaagctcgcaacctggttcgtcctggaaaaactggcccgggaaggatgcacattttattattcgggcgatttcgatccggaaggattgggaatggcggaacggttgatggaccggttccccggccgggtgcggttgtggcgcctttcgctggaggattatcggaaaagcaggccagcggaagaaatcagcccgacccgtctggaaaaattaaaagggattgatcacgcggacttaaagccggtagccgaggagatggaaaaaacgaaaagggcgggctaccaggaatcgttgatcgaatggctggtgaaggatttgaaaaacgaaaacggatga

SEQ ID NO: 51696 - DNA, 1488 bp, Clostridium tepidiprofundi DSM 19306
atgaaaatagataacaaggttatgaaacaaattgatgaggtaagatatcttgctactgaaaatacatggagatatagaactattataaggaccatgtataattattatgaaaaaatgaagtattggttatatagtgaagaaatatatgaacagcttaaaaagaatgaacgctttagtgattattctgaagaacagttaaaaaatgatttagatgctttagtaacatggaaaaatttaattgctgttgcagatacgactaaggttagaactgttgaagaatttaggaatagaaaatttaggtatcagctttctacatatactatagaaatagaaagaatgttgttatctcttgaaaatatgacagttgaaaacaatgcttcacttgagggaacattagtggaaaaattttgtgctattcttgaagaacatagagagataatatttaaagaggataaagaagtatatgaatggtggaaggaattaaataagagatttaaagaattgaatgagaactatcaagattatataagcagattttattcacctaaaaccgaggaattgatgaaaacatcagaattcttgatgtttaaagaaaattttattaaatatcttagagactttataaaggatcttcaattaaatagttatactataaaaaatttgcttacaagtattgattctagcgaagttgatgaaattataaataaggtattaaatcatgaaaaaactattcctagtatagggaacacaataaaatatgatgaatttgttgatataaataggggtagatttcagagtattaaagagtggtttctttcatataaggggaatgagcctcttgttgaacagcttattgataatactaacgatatgataagaaagataactaggtttgcttctcaaattgcggataaaagaaataatagtgctaatagaaaagaagaatatagaaagattgcaaatatgttttatgagtgtagtagtattgaggaagctaataagttatcttcccttgtttttggagtattttctccaaaacatattaaggcaaatgaaaatagaactactgagagcataaatagcagcatatatgatgagccaccaacagaagttattacaaaaccaagagtaagaggttatagagaaaaactcataaagaatcctattgttgataaaagctataaaaaggaacaaaaactcaaagaaataatggaaaagagaaagcttgagagtgaattaatgggaaaatatatagtgaataatgaaatcgatttcgcaaatttacctaaaatatcgcgaaaagatagaaatatattattaagatggcttacaaagggcagaatttcaagggggagtggtagcaaaacagaatttggaagaaaattcacaattataaaagacaagcatactcaaacgatagagctcaaatgtgaagatggaatatttgtaatgccacactatatattaaaatttgaggaagaggaatga

SEQ ID NO: 51697 - DNA, 1137 bp, Clostridium tepidiprofundi DSM 19306
atggaagaattaagggtgcttttagaaaagtattttatttttaaagataatgataaggatacttattattcaattaaagataattataagaatttcaaaacatttataaaggataaacttggatatgaactattgataagaggagattttataaaactagagaaacttcctggaaaagctgaaggatggatgggtatagatgaatttgacgatattagggagtatatctttttgatgctgctcattacatttttagaggataaaaccaaaggagaacaattcctcttatcacatataacagatttcataagctcaaatgcggtgggcgaaaaagtagattggacaaattatagaacacgtcgttcattgataaaggttcttaaatttgcattgcaatataatattattgttattaatgatggtaaggaagaggattttataagggataattctgttgaagtgctttatgaaagtacgggattgtcgagatatatggttagaaactttccagtggatattatgaaatgcaagaattataaagatatagaagactttaatgttacatttttagaagaggagaaaggatttatagttagaaatagggtttataggaggctgcttatttctcctattgtttataatgaaggtgcagatgattcggattatatttacataaaaaaacatagaggtataattgaagaggattttagaaagtatttgaattgggatttacatgtacatagaaatggtgctttgattgttttaggtgaaggtagtagattaaaaaagatgtttccatcaaattcagctttaagcgatatagttttgcatttaaatagcaaaattataaaattattgaacgaaggtaagattcagagaaatgttgatgatgttattgttttatccgaggaagagtttaaagatattatttcagagcttaaatgtgaaagagcatttgggtggagtaaggaatacagggaatgtagtattttgaagttgatgaatgatattattgagtttatgaaaagctttgctatgataactcaagacgaaaatataaatgtataccctttaataggaaagttagttggagattatccaaaggattatgttggaggtgatagaaatggaaaatag

SEQ ID NO: 51698 - DNA, 4062 bp, Clostridium tepidiprofundi DSM 19306
atggaaaatagatggatagcaaataagtttggactaataaatttttggtattatgatattgaggaatttccattggaagatggtaaattgctttttagaggatctaatgggagtggtaaatccgttacaatgcagagttttgtgccactattattagatggtaataaatctcctgaaagactggatccgtttggaacaaagtcgcgtaaaatggagaattatttacttgatgaaaacacagatgaaaagacagcttatctatacattgaatttaagagaagaaaaacggataattatttaactattggtatgggaatgaaagctgtaaaaaatagacctctgaattcatggtattttattattactgatggtagaagaataaacaaggatttgtttttgtacaggaatgctggtaataatatacctcttacaaaaaagcaacttcaaaatgaaattggaaatggcggagtttttactgaatatcaaagagaatatatgaaaaaggtaaatgaatatttgtttggatttgatgatgttgatagatatgaggagcttataaacttacttattcagctcagaagtcctaagctttctaaagattttaagccaacagaaatatataaaatattgactcagtcgcttaggcttatttcagaagaagatttaagacctatgtctgaatcaatggagaatatggatggattacaaagttctcttgaagagttaaaaaatgccctaagtgcaacacgaaatattaagtatcattatgatagatataataaatgttgcttatatgaaaaggctttaaattttaagaagaaaaatgatgaagttttgcaattaactaaagaaattgaagaaagtaaagaaaaattagaaaacaatataaatcaaattaaaaatgtcaaagagaatattaaaaggcataagactcaacttcatgaggctgaaataatgtatgataagctgagagaaaatgatgccttaagggttaaagaagaactcctaaaattagaaaaagaagtaagagaactaaaaattgatattgaaaaaaaagaaaatgaacttcaaaacaaaaaaatcagtgaaagggaaaaagagtatactattaaaaaattagaagatgagtatgacataatagtacaagatattgaaaatattctagatgaactttacgaaattgcagatgaatttctttttaaagatggttttatgcttaaagaagatatgatgaatgatttaaagggatatgacattaaatacattaaaatatgtcttaacaagtattctgaaaaaataagaaaagctattaaagtattaaaaaaatatgaatactataaagcaaagtatgatgaagtattagaaaacaaagagagcattgaaaaagaatttgaagatgctaagaatgatattgctaagagagaagaaattcttttgaatacaagagaagatttaaaggttaattatgtaaagtggaatgatgagaatactattttaaaactcactgatgaagagaaaaaagagcttatttctgcaatagatagtacagaagatacattttcattaggcgatttaaataaagttgttaaagaaacatataataatattaaaaacaaattcaatatagctatcgaaaagaaggacagtaatattactgatatagaaaaagatatagacaatttgaagtcagaaatagaagagttaaagagagcgaaagaagtagaacctcctagatgcgatggttcaataaataataggcaggaattgatgaaaagaggtattccttttacagttttttataaagctattgactttaaaaaggatgttccagaagatataaggatagctcttgagagtgcatttgtagatatgggcataattgatgcagtaatagttgatgaaaaatataaagatgaagttatgtcatttacagaaggagcatatgacaggtacatatttgctaatggtaatataatgaaacataatattactaattattttgatgtagataaagatggattgaatggtgtagcatttgaaactgttgataatattttgcaaggtatatttttggttgaggattctatggcatttgtcgatgaaaaaggtaattacagcataggtattataaaaggtaaagcaagtacagattatacattaaaatatattggagctagtagcaggaagaaacacagagagagaattataaatgaaaagttaaatgatatagaaaaacttctaaaagacataaaagaattagaattagaaaagcttgaaatagagaataaaataggtattcttgatgatgaaatgggaaaagagccttctagcattgatttaagagaagctttgaagatgatatatgaatgtgagtcaaaagtaaaagaactgcatgaaaaattgataagagaaaatgaagcattgtttaatatatcagaagaatttaaagaatgtaagaaaaatgttatagaaatcacagatggtatggagctcgatgtgtctttagaagagtacgaagaagccaatgaaagagctaatgactacagaaatttgttgactgaattgactattaaacagggtaatattagaggcatacatgatagaatagaatctattagagaaagcttagaggatattagagaagtgatagatagtctttattacgatataacaagctacaagaataaatgtgataataaaaatgaagaaataaattcgttaaaggatgttctaaagaatacagatatagagcaaattgaagcagaaattgaaagatgcatagaaataaaatcagagtatcctaatataattaataatctttctaagaatgaaggtgaactagaacaggctatacttaatattaataaaacaatagacgataaaaataataaactattaagagaaaatcatatttgcaaaataaagaaggatatttttatggaagaatattctttaggatatgttttaccagttgaagacagtcaaaatgatgctatgaaaatattaaaaaaggttatagctgcatatgatttgagagaagataaggatagagaagtttattcaagagcagttatagatagtttaagcaaaaatcgttctgaactcagggaattctatattaaagttgatgatatttttgtaaaaaacaatatggaggatgagtcattaagagagatttataaaggtgttgaaagaatagatattaattgtaaatttagaggtaaagatatatcattttatgagcttccaagtatgattgaaaaagatatagaagagatgaaaatattgataagcaataaagaaagagccatattcgaagaaatattaatgaatacaataagtacaaaaattaaaagcaagatttatctttcaaaagtttgggtggataaaataaatgatttaatggagagtatgaatacatcaagtagccttaaattgagtttgagatgggttcctaaaaaagctgagagtgaaggacaacttaatatagctgaacttttggagataatggaaagaggagcagctgctaatgatgatgatatgaaaaaacttgctttgcattttggtaataaagtaaaagaggcaataagaaattgtgagcaaaatggtgaagcaagaaattactatactattataaaagaagtacttgattataggaaatggtatgaattcaaattgtattttacaaaaaaaggtgaaagaaaaaaagaattaaccaataatgcatttttccagttttctggaggggaaaaggcaatgtcaatgtatgtaccattgttttcagcagtgtatgcaagatatgataatgctaataaggattgtccaaaaattatttctatggatgaggcatttgcaggagttgatgaaaataatataagagatatgttcaaattgcttaaaaagttggatttagactatgtgttgaattcacagatattgtggggagattatgatacagttgataatctttcaatttgtgaacttataagagaagaaaatgatgacgttgttactgttataagatatagatggaatggaatagaaaaacagtgtttagtataa

SEQ ID NO: 51699 - DNA, 1284 bp, Clostridium tepidiprofundi DSM 19306
atggataaggttaatgaggcagttgaatttttaaaaaagaataaggcatacaataaaatactaaaggaaatattgattaaatataaaaaattgggcaaattatctggaatgatttgtatggaaaatctaacttcagaagaagctatgatattagcaccattaaaccataatttttttgcggagaagaagggaaagttttctgtaaaaaaatttatggataatttttcaaaaggcagatttgaaggtgttgattttgtcgaagttctaaaggtatattttgatgacaatttaattactaataaagaaaaaagggatttagagacagaaaaaagagaaaagtattttaaaacaattttagaacagtgtgaaggaactaggtttgaaatatggctgaatagggctctttgtgagaaaaaatatggttataaaataataatgaaaaagtattgtgaagataagaaagtattaaaagagatactcatgaacataaaaaaagcattgtgtcacatgagcttttcaagtgataatattactccaatagcactcttttcatctaatataacaaaggattctcattattttgacataggtacagtgtgtggaaatctccttatgcacgctatatgttgtattttagatgtggcatatccagaaaatgcagagaaaattaatgaaatattatatagcgttggcataatgagggatgaactttcaaataccactataacatatggattaaaagcatatactgattgtaaagagcactttggctttaaaagtttttatgattacaaagagcctcttattgtatcattaaagaatttaaataaaatcgatactgtaaaagtaaataataatagagtttttgtttttgagaatccaacagtattagttggtgttatggaaaaaacaaaacatatatacccttcacttatttgtacgagtggacagattaatatatgttcgctcgtgcttcttgataaaattgtaagaggtggtgcggtaatatattatagtggcgattttgatccagaagggttgaagattgctgataagttaaaaagaagatataaagacaagcttgttttgtggagatactcaattgaagattactttaatataaagagttctgtatcaataaaaagtcgagaaagtaaattatcttccatagaatgtgaggaactatttgaattaagggatattcttattgatgaaggtaagggtggttatcaagaattgcttattgaggaatatgtaaaggacattattgagctgacagattaa

SEQ ID NO: 51700 - DNA, 1596 bp, Bacillus cereus ATCC 14579
ttgaacacgaacattgaatctatgctagaaggttttaatgagcgaatgaagcatgtagcgatgttttcacccatcctgcgattagaacaaccaacgaagtttaaagaattgcctattcctacggttgctctctatatacttctttatatgctcgaaaacaaactagcatttaataaaaacacgacaaaagaagaattacaatatgtcattttagaagtggtccgacgatattggaacaagaattttaccaaagcagacgcagacgagctcgaagattggttggtttctaaaaaccttcgaaacagaggaagagcccacacatttacgtattacgatttcaataaaaaagacgaaaaaacttattattttcatctaattgaatatggagaaggaatgaacgtttttagtgatacagaagatcgtgtagacgattttacattatcttcaacgggattggagctgctattcaaaacgaaagaagtatttggagaacttcaaatcactatttctcaattattcttcaaacgacaatttgaaaagggacttttcaccgatgctttaaggagagttcacgaaatgcatacgttgatagaagatgaaaaaaagaaaataaaaaaattacaaaatactattatcaaggatgctcttggtgtttctcaacgttctgaacttgaagtcatgataaaaagaattgatgaaactttaaaatcagaacacgaacaatttgatgatttaagaaaattggtagaagaaaaaattgatgaattctatgaaggtagtctaacagaaaaagaacaagaaggaatccatataatccaagaaattgaagggaaattacttcaagcaattagtgtgcatgaatccttatttactgaaaaacaaaaaacacaaaatattatgagcgaatcacttgaatcttccatcattcacgcattttcagttcatttagattttgaaaacgaaatattaagggaactaatagaaacccctgctacagaagaagtattaaatgctatttctaaaccatttctacctttgaggcattataaaacgtttaatccgctacttgcattagttcctcaaaagagatacaagaaaaaacaactaaaagaagaagaaattgttgaagtagatgaagaaaaaatgaagttgcaagatgaagaagaagctaggaaaaaggaagaaatcgaaaacaaagaatatcgatatataactgctttattgaaacacttggttgagaaggataagtatctattaagtgatattttccaaatgattgaaactcaagatgaacgtctttatgaggatattctgtacaatccagatccactgttggggttaattgcagaactacatcagtccgaatacaatcgttttgaaaaagtgacttcagatgtgtggaaaaacctcccggatgataaaaagattaatagaatgttaataagactatcaaatgaatttgtaacattacaagagatagaatcctttagtttattagaaacaggtagatctcactatatcggaactatgaaatacaaggatatgttaattacaaggggtgatttttatggagtggacagaagaaatcgtaagtaa

SEQ ID NO: 51701 - DNA, 753 bp, Bacillus cereus ATCC 14579
atggagtggacagaagaaatcgtaagtaaagggtttgccttgtatgtggcccttagtaaaaaagggtttattacaagcaaagaagatgaatattttcagtggtatgaggaaaggggtgttcaagattttattcggaaagtaattgaacctacagggaaagtcatgatcttcttggatgaacaagatggcgttattcaaatggtgccggaggtcgagaatgaaacgatgtcttatacgaatgatgatttaaagaaagaattaggctttaaggacaataaggaaattcatctattctactttattttgttcatcttaatagcagagttagaacaaccatatgatacagagtctgctgatcggatgtatctcccaatggatgaactattggataaaatgaatggatacatcgagcaatatgaacgactgggcgaagagaagttagaagaattaagtgatgaatatgatgtggacgtggctgggattgtagaagcttggggcagaatggccgactttaaagaaggtgctacaagccatattcgaacaaaagataatcgacggatgtatatcgaaaaaacattgaaattcttagaaaaagaaaagcttatcagaataagagaacatactaatatttctgttaccaacaaaatgaaaaatattattagtcattattatcacaatgtcgagaacaagagcaaaattcatgatctattgctggtaacaagagaaggaactgtgggagaagaggaggaatga

SEQ ID NO: 51702 - DNA, 3642 bp, Bacillus cereus ATCC 14579
ttggatgatttccaaaggataaaaaattgtgctgaagacatggtaaaagcggtagaaaactttcaagtaaaaaagaaatcctttgcggaagcacaaaagcatgtagttacgttaaagaaaagcattgaacttcaaattgcggataaggaagaaaaaattgatatcttaatggatgatatcgagaaaaatgaagcattgatgtatgaagcggattggaagattgacagctataagtctcatattttaaaaggacagatcgaagcaaaagaaatagagctagttgctgctgaaaatgaacttaaaataaaaacagaacaattaaaacaagcaaaagcattactacaacaattggaagcaaaaaaagaatatggagattatctagatattcataaaaaggtactacagttaaatgaagacatatcttctttaacagcaagtaaaccagaattagaaaagagaagaaatgaatctaaaactctcttaacagaggcgttaaattttctcatagaagaacaacaatttgctttggatgatattaacaacaacatcaaatttatgatagaagaagtgaatcttaaagacgcagaacggaaacgattagagaaggaaaaacaagatttatatggagagtacaaggatgcagaaaatcatttgaataattaccaagaaggtaaacaaaaactgatagatgaattaggagaagaagccggatatgatccatctgtcacgttcaaatcactacatgaacaacaactacaatcttcagtgactattgcccaaaaagaagagaaaagtcgattaaataaacaggatatggatgaaaaacgtgagtttgtaacgggtcaaagaattgctatagacaacaaaaataacgaagttacttcgttaaaggctgaacataccacatttgaaaaggagaaatataacttactttcacttctttcagacgatgggaaaaatacgataaacatattcgaagatatgcaggagtttcttcggtattatcaatattcaaaagtggaagcggaacaaaaaatagataaacttaaacagtatattcatgatttagcaaaaaaacttagcctttgggaatcacacgatttctttgttcctgatgaaactttattaaaggttcaacaacatctagaacaaaaaggtgttattactatgttaggtagtgaatggctatcggaactttctagtgaagaaatgaaaagccagtaccttaattcctatccattgcttccttatacgttattggttgaagaagcaaacttaacagaagtcaaaaaatccttgaatagcttgaataaagaactgttaaacgtaccgttactgttttatgtaaagagtaaacttcaaattcaaacaaaatcagtagatgcaaaaatagatgaacttttccctctatatgatgagttatatctctatcatcagttagatgttcagtggttcgcatctagagctaaaatccaagaaattattgatgggttaaaaatggagctttctcaatataaagaacaattaacttttgcacaaataactctcaataattacaatgaaatattaactgcattagaaacattccatactcgttattctagtacattctcggaatccaacatgcaagctgtccagaaattatcagaagatataaaagagattcaccaacaaataaatgataccaatgaacatattaagatgttagaaaatgagaacgaattaattagtaaatttatctcagatgaaaaagtaaaaatagaaaaaagagattctcatataaagcgtcttcaaagctttatggacctttactcaaaccccgaagagctagttgaaaaagtaaaatatttaaaagaccaacatgaccaatacgggacaaaagttaatctgtgtgaagaggaagtaatagagcaacgtgaaacattagatagacagaaagataagaaacgaagcgttgaatctgttatggatggattagataaagaaagaaaacaccaccaattggacaagaaccttgaaccttctgatagttacaccagtgaagaaaagaatgagtacgtagcccgttttactgcagttcaaaaagattacgcggacaaaaatcaagcgaaaaattcttttgaagaaaatctttcagataaaaaaaatgaacttctaaaatctgaaaaacgaatcaatgatatcggatttactctagaagaagttaaagtgttctattctcaagaaatcaatctagaagagttaattacaaaacaaaaagagacagttaacacactttctatttctgaaagggatattgagatcgaaaaaggaaaagtaggagaaaatctaaaagagaaaaccaaacaattagaattagctaagaaggagattgatgagaagtacggaagagaagtattcctttatgaatgggagcatgaagaagaacttaaccgtttcaagcagtcaaaagaacaattgggcgaagctaataaagcacttgtaactaagaaggaattgttaagaaattctataatagatgctgaaaaagcaatggtacatttgcaaattgaaaatcttcctctatataatgaaagattcggtttaatacttgaagaagaaattatttcaaagtcaaaaacatatcaaaaatatgcacaaacccatgctaatgagcacgtaacaaagttgcaaaagtttaaagagggcaaaaaaggtgtatacctatcatttgaaacgtatttaaagaagattcaagaatctaataaccctaagactgaacaatttgcgaatggtttgtcaaaattgaaaacaagtgatcaaatatttgagttagagtttattttagaatcgtttaatcgcatctttgataccattaatgcctttgaagaagatttaaagcgaaagataacagaatgtgaaaaggataaggtaaaactggtagacttatgttttcagcgagtagaggctatttataagaacgtgactgaaatcccgaaatcctccaaagtgaaagtatttggttatgaattgcaattgattaaaatgagatgggaccgttttgatgatgaaaccactcatagtaatttacattaccatgttcaaaccattctggaaaccttacaacgaatgaagagagagaacaaactagaaaatgaattgaatgaatacctagtacaaaaacttgatacagtggtattattagataaaattgcacctatcaagaaatgttttgttagtatatataaaccacgaaaaaaatcacttatgacgaccagtccagaaaactggaaaccttgggatgaagtttctaaatggtctggtggagaggaattcagttcctatatgtccatgtttatgatacttgtaacgtatttgcgtaaaaaagttaacgctagagacgattcttggaaagtgattattgcggataatccttttggtaaagcttcatcagaacacgtagtaaaaccaataatggaactagctagaaatagtaaaatacaactgttttgtctaacagctcataacaatgaagacattcgttctcattttgaatgtgtcatgagtaatcgttattacaatacagtaggtattgaactacttcaagtggagcatagagaaaaaggggtttcacttggaatgtttgcttatgagcatgattaa

SEQ ID NO: 51703 - DNA, 1077 bp, Bacillus cereus ATCC 14579
atgagaaaatgggaaacgtttatcatagactatatgaataaatctaaaaagacctttgtgaaaacgatagatattgaacatcatcttaaaacattactcaaacaagaatatgatgacgatggtggatattttaaatattcttctacgttgaagaatatggtagaagaagagaaaattcaaccagtaaaagcaagaggacataaccatcagaccccaccggtatttaatgaatatagattagtaaaaaaggaaagaagaacgaaccccactcatattaaaaagttaatgaccgattatctattgttcaatatgactgctttttatgatgaagcagaatttgaaaaatggaagttctatatagatcgagtccatgcttttctcacacaaaacagtgataccaaaaataatattttaaaagcaaatgaacgttcttttgaactattcagaaatgaaaagtttcttttagataaagaaggaacaaaatttttagccaatttaggactcactctatcggatttaaactgtcgaagaacttatgaaccttttgtagagtaccaaccaaatccctcaaaaaagccaaaaaacattttaattattgaaaatagagatacctttgattcgataaaagagttaatgatagatggcattgatacatggagccgaattacctttgatatggtgatatacggggaaggggataagatacaaagaagcttctatttcttagaagaatacgagctagaagattacgaagtctattactttggggatttagatgcaagagggattcatatttgttccgaattaatcaaaatagataatagagtaaaaccatttattcctttttatatagaacttttaaatcgttatggtcatgagccttcaacgagaaccatcgaaagaaaattgaaacaaactattattgacgattcgttaaaattattttcatctttttttgaaggtgattatattgatgaactcaaaagatataccgatattattcagaatgttcaaatatatatcccgcaagaaggtttgaatttagtgattctccgtaaattaggggaaaggaggtag

SEQ ID NO: 51704 - DNA, 1566 bp, Ralstonia eutropha H16
atgagtgtgactcctccacgcgacaccctggctatgcatagccaaagtacctcctccaacgaatttgctccgctggaaagcgatattctggagcagatgagcgaacagggtggggcaacagtacccgatgcgatagaaatgggcgctctcgccccctcatcggggctgatcgacctatcccgccagcagcgcaacctgttgctgctgcgccccctctttcagcttgagcttaacaagcagcgcattggtgaagatggcaccctctttgagggaatcgacacccactacctcctgctaagctcgctcgaccgcatgatggagggaacgacagtctcaacgggttgtaccagcgacgaagtcctcactcacatagcagacaccgtcatggcaatgaagccttcgctatcagcggttcaatcgggcaaggtcgcggacaccgtgctcgcagcgctggacaataaggccaacgggtacaaagaattctcattcgagtacttccatgcaacgcataaatccacgcgcagcattcgctttcggttagtcgcctacgagcctgacattgaagatgtctaccgctataagccaaccgcagaaggatacctcgtctaccttggcatgcttgacctctcgccggaggacgcgcaggaactaatggagaagatgctggagttacttgtgcagcgcggccgattcgacgctgcgttggaaattgcccgacgcgcccgcacgctgtcaatcgagtatcgccagctcatccgcgacaggttgtatcaagcttaccgcgcgccaggcacagtcaactggaagcgcgatatcagcgctggtttggatcgggcgcgagaacatgtgcgacagcgccaggcagaggaccagcggatggaagagtctgttctgctggccctgcgacaggccgaggaacccaaggcgcgcgcgaacctggcgctcctgcttaagacgctgcaaggtgccagcatgctgcgttcgcaacttgtgggagatattagccgcgccaatgaccggttcctggaggcacagcgtacgttgtttcgggcccggcgcgccaccggactgcctgacctggagacacggctcttaccgcagttcattgaattgcctgtcaatattctggccgagcaggctgaaaacgcactcagtgcgatgtattcgccggcgctgccacgtgtgtatgaccttaattcgctgttctcgctgctgctcgagcagcgcgtcgaagacggcgacccaggggaagacgacggtgagatcacgccattcgtaccaccccctcttcagttcgatgaagccgtcatccgacaggtgacggactggttgaccgagagattctcgctggggcagtcctggcggttagatgaactgctggatcaagccgaggacatggggttcgatcgcactattcgacgctgtctagtattgatgctgtttcgggcgtactcccactcggagacagaattcaagaacatgcgggcggacgcactggacgagttcattgccgatgtggcacgcggaaccaatctgcgctttactcccaaagagaggcactcgtga

SEQ ID NO: 51705 - DNA, 4419 bp, Ralstonia eutropha H16
atgcagaaaatatcgcgtatctatctgggaaactgcggctacctgatggcctggtatgacgggttgttgttcgacctgacggatccggaaacgcaccaaccgaccgacaccatcatcaacctcgagaacggaggcgggaagacgtcgctgctcagcctgatcttctcgtgctttgacacgggccaggaccgctttctcaagcatctgcaaagcaaaaacaatcatttctcgcagtacttttcgcaagacggcctgcccggcttcatcctggtggagtgggagatgccctcgcgcacggctggcggtgagccgtaccgactggtcgtgggtcaggtggtgtccatcaaggcgggcaacgacgtgccggagagcgaccggatgttcttcagctttgaagcaacaagcggcttgatgcttgaaatgattcccgcgccgaagctcggcaccgccccggtgacatcactggcggaattctcgcgctgggtacacgaagaacagaggaagcaccccgacgtctatgtcacccgcaaacaagccgattggcagcgccacctgcgtgaagagcgtctcatcgacctggaaatgctgcagatgcaggtcaatttctccgtgcaagagggcggtttcgataccggcttcctgaacttttccagcgaggcggcctttctgcagaagttctttcatctgacgctggacgcacaaagggccgccgccgtgcgcgacgccgtcgcagcagcctgcgacaagttacgtcgcaagcctcactatcaggccaagcttacggagctaacgaagttccgtgccgtgcttcgatcctttgaggagacagcgcacgcctatcgactatccctggccgaccagatgagtgtgctggtcaacggcgcgcgattggcgttggcactacacgaacgggcgaacacgcggcggagcaagcaacaggccgagctaactttcgaacgcgaccagcgggccgtggcggcgaccgccgcgtccgacgtgcttggttacagcagccaagccgccagcatggccagcctgattcacgtgcgcgccgtgcgcgccgccctggagcgcaccaagcaagccgcgttgagcctgacagacctgcaaaacgatatcaagtatgtgagggctgcacgggtactggcggaagtggacgccgccgataagcgcttgcagacacttgaggctcaggccgacctcgccaaggaaggcttgcagccgtttcgcgaccagctggaaacggaaggcgcgctgcttcgcaccgctctgttcaagcacgaacaggccctgcgcgagacgcagcgcaaaattgagaaggagtccatagaccgcaacgacacagtgaccgggcaccggacggcacttgccgaagacgaaaagcgtcggcgcaccgcagtcaacgaacaagccaagcttaccgagctggaaaaggcctgggagcgcgagcacactcgcatggtcacctcggggctcctgtccgacgctggcgaagtgactcaagtagctgtggcgcgctggggcgagaccgagcagcagatgcggcgagaggaagcagcccacaagattgcgcaaagccagcatgaacagcaacagggccactggagcagcgaggaagtgcgcctgggcagcgaagcaggtcgattcgaaggcgagattcagtccaccgcagacttcatcggcgagggtaccgccgagcgcgagcggctgtcacaactaccggcgatcctgctagctgtcgaatccgacacagcgtctccagactcccctgcattgccgtcggtgctcgaacgcgtagcggcggcgtccgcctcggaaatctccctaagcgatgtgcgcctggccgaattgcacgcgacgatgcaagccatccacgaaacaggtgtggctggtagcagtccagatgttgcgcgtgtcgtagcgcgactacgtgaggccggcgtgcgctcggcccgccccttcaacgaataccttgctgacgcattaccggacgcggagcgcgctcgtggcttggtgctgagcgacccggctcgtttcctgggggtttccgttgcacaaagtgaaatggaaaaagcccgtggcatcgaatggcatggccagaagctgacccgtccggtggtggtttccccccttgctctcgaatcagcagctgccgcccccactcgcctggtggtacctgcagcaagcgacgctgcatacaaccgggccgcggccgagacattggccggcaccctgtcggaaaccatccgcctcgaagaaaatcgtcgcgccggatattatcagcgccagactgacgcactggccgcgatgcaggcactccaaacctatgtgcttcgctttggtgagggcaaactggcagcggcgaacctccggcgcaatgagcttcagagtcagctgcgctccactttggagcgcaaggaaaaggctcgcgagaaggcggccgcggaagcggcagaagcaaagataagcaacgaggccgcagtcaaatgcgaccgcctggccctcgaagcatgctcccatcttcaggtacttcaacgcttcatggcagagtatgaggccaaccgcgaggagcggctcctccgtctcgatgagctcgaagtcatactggaagatctcgaggtccgacgcctggcgaccgaggatgaaatccagcgtcttgaagacattacgcgtgaacagagcaaagtcgccatcaaggccgagaacagcgccgacaacctggccggcgagcgttccagaattgagttctacgacaagacactggccgccgatgagcatttgaaggccaatccccgagacctggagatgctgcgtgggacgtactccgatgcgctgacggtttacaaggcgaaggcacaggatcagctgggtgtgcttgaagtgcagatgcaggaagcacgcaggcgccgcgacgagaaaaagcaggaatacacccgcgactaccccggcgtcacgcgtactcatgtagcgccgttcgagggacaggaccactgtgccatgctggttggtctggaagccaaacgtacgctcgtcaacaaggaacacctggacgccgtttcagccaagggcgcggccgagcacgcatcagaagactggcacaagaataatcgcgatgtaccgccggccactcccgacatcgaggcgctggatgctgctgccctcgatgcccgaaaggacgaggcagtgcgcatgagtgaagaggccggcgcgcgccaaaagaacgcatcggacgtggcggaccgggcgcgcggcaccgccatgcgcctcggagaagccgctggccaggacgaccgcctggcggaattgctcaagagcacgatgaagctggaggccacgccgaaccccgaactgcttgcactggagatcgccagcctgacgggacagccaccagtgctgctcgaacagcttggcgagttagtgctcgaggaggacgcgagcgaccaagtcacacgcgccgtcaagaatcacggcgctaaatcgggcctatgcgaccgggctcgcgataatgcgcgtacggttttcgatgcggtcaagctggccgccggcgaccccgagctccagaaagtcgagccggagcttgcgattgccatgctggctaacgagttcacagcggcttgcagcgatgccgcccggctgttggaaggtctcgaggatcgcattcataccacccaggacaacctggacaagatgcaggctgacttcgatgcctgcgtcgaggaaatgctggcgctgtctcgcattgccctggggttgctgaactcggccattgacaagcgtgtgcccgccaccgcgccgtatgtcgcaggcaaggcagtcctgaagatgcgcgcgaacttcgcggccatcaacgtcgagagccgacgacaggcgctcacgcattacctggacagtctgattcaggctaacgtgcctccgggcaagggctcggacttagtggctgaggccgtgcttcgaatgtacggcggccgcccgctgggcctacaggtgctacgcatggttatcgacgaaagccaacagtacgtaccggtggagaagatttccaactctggtggcgaaggtgtggtgatggcgttgtttctctacgtagtcatcacccagctacgcgcggagacccaagccaagctgcacaagcttgccggcggcccgcttatcctggacaacccgttcgccaaggccacctcgccgaccatgtggaaggcgcagcgtctgctcgcgcaatccatgggggtgcagttggtgtttgccactgccatccaggactacaatgccctggcggaattctccgccttcgtccggctacgacgcgctgggcagaacagcaagacggggcgctggcatttggagtctgtccgctaccgcctcaatgaggagatggccaatccagagctggcggcgcctagtacgattgaggcagcctga

SEQ ID NO: 51706 - DNA, 939 bp, Ralstonia eutropha H16
gtgcagctcaagcagttgtacttcgagctgtatccggagattcagaaccaccccgaacgtagccgcatgttgctgcaggcccttcaggcgctggccgcaaccggcgccataatgctgccagctcgcgccagttgggagaaagtcggccagccggcgttgccgatgtggatcaaactcgttcgcacgcacaatgaggcgccgaaggaggatttctccaaaattccctgggtgccagagctgggcttctggcctgagctaacgagcgcccaactcgccgcggcaaagtgcattaacgagttcctgcttcaacgccgcggaaacctccagcgaatccccatcaaggaacgttcgcttgagatctttggagacgagaagcggctcgacgctatgaggcagggcaacacactgttctcaggccgattgtcgcttgatacgctaggtgcgttcaccgtgcctctaccgcttccgtaccgaccggcacccgtatcgggcaaaccgctgctcgtcgtcgaaaaccacaacagctactggagcttcggtgagtggaatcagcgagccctacgatattcagcggtcgtctacggtgccggggaggcatttcgcagcacgggagcagccctaagacaggttctacatgaagtgaagggcaccgatgtcctgtatctaggagacctggatcctaaaggcatcggcattccgcttgactttaaccgctcgtcggcgagtgatgagcccaaggttgcgccagcaatggagtggtatgagtggctgttgtcgcatgggtttcggcgaaagaaggctgtttgcacaaacgctcacccgcaatccgccattgattggctcggagaaaccttaggcgaggaactcgcggagctatggcggggagagtgctggattccacaggaggctttgggtttcgagcagctaagcgctctgtga

SEQ ID NO: 51707 - DNA, 1650 bp, Clostridium perfringens SM101
atggattttgattttttagatgttcaacatataaggatgaaaagaataggtgcttatgcattattatttagaaatagtatagcaaaaggtacttggaaaaagtatggattttcagaaggatatgagcaggataatttaatctttgcagtattactttatataatggaagaagctttaaaagatgatatgtgtacaatagacaatatagggtattttattgatgaaataaacagtattcattttaagaaagaattatcttatgaggaatgtaaagagttggctgaatttatagttaatacgattttatgtgatgaaggtaaagccatgtattttaaagcttataattttaaaaaggtccagtatgaagatataaatataagctttattaaaaatagtatgaagtatatagatgatgttagaagagtagtatattcattaactgatgatgggtattcatttattttatcaaccttagaagtagaagaaaatttaaagataactatacatgaaattttgcttaagatgcatttagaaaaggcttcttatgataaagcagttgatgatataaaaaatatatttaaccagtatagaataagagttaaaagcattgaagatgcaataaggaaaattaaggagaatccactaagttatacaacagaagattatgaaaagatgatgtcaggaaatctcaatcttttaaatgaaataaaaaaacaattaataattcatagaggcatggttgaacttaggataaatgaatttttagagcgtgatatacacattaggaaattaaataagaaagaagaagaaaatttaaataatttaaaaataatacaaaattatttaggaagaactatagatgaagatcaaaaattattgaaaaaacattttgatttaaaagatgtttatggtatggagctagaaacaatatcaaagatggcattgattgaaagatttaattttagaaatgaggtttacgataaaatattagataatcctaataaattggaggatatagatatctttttaaggccattattaaagagggagttgcctaaaaagtataatataaataaatctttagaatatcaaaaaaatataaataaaaattattctgaagaggatgaggaattgtcttttgaagaaagtgattttattgatgaaataaataaaaagaaaatagaaaaacttaaaaaatataataatgtaataaaattgattttagaattatccatgaaacagggaggaatttcacttagagaaattcaaggattaataaaagagagtaatgaactaatgaaaaaattaattccaaccgttgaaatctttagagaagttattatagaaatgcttaaacacagaaatataaatataaatgaaattagggaagaaagaaagaatgctattgaaaatggagaaattgaatttcaacttaataaaagtatattagaagttttagataataatagtgaacttgatagtataaaagaaattaatataaaaaagttaattgataaggatgatattaaacttgaaggagtaaaaactgaagatggagaatttaaaaatttcatctgttcagatattttatttgaagctataaaggaggataaaaatggcttattctatggaagaaataaaaataagtaa

SEQ ID NO: 51708 - DNA, 708 bp, Clostridium perfringens SM101
atggcttattctatggaagaaataaaaataagtaataaaattttttattatttattaaagcatggtgaacttaaagaagaagaaaatgatttatataaaagttactcagaaaataataatgtaactgaattagtaaaagaacttggtgaatcttcagaatgttacataaaaaagtatgggggagtagtgtaccttattcctagagaagaaaatgactttttaggatattctaaaggggaattaaaaaaaatattatgcagatcaaatgctaatgataaggattattatttgtctcaatttgtgattttaacattactagtaacattttataattctaaaggagttagttctaagggaagagattatatgaaaattggagagtttttgaacataattacagatagattaaatgaaggagctgaaaggacaaaggaagaggatagttctggaatagctttttcaaacatattagagagatttgaggctttaaaaagtagtgataagagaagtacatcaaaaacaacaaaagaaggatttataaataatatattggattttttagagaaacaaggattaattgattatataaaaaatgatgatatgattaagactactaaaaagttagataattttatggattggaatattttaaataaaaataattataatagggtgctgaaggcgttaggagaatctgttgatgagtaa

SEQ ID NO: 51709 - DNA, 4392 bp, Clostridium perfringens SM101
atgagtaaaataaataaacttagatttgttaatttaaattataatcataatacaatgaaaatagatgatgaaactttttatcttgatggccaagatacaatgttaaacttaagaaatggaggtggaaaatcagtacttgtacagatggtaatggctccattagtaaataaaaggtatagagcattaaaagatagaacatttgaaagctattttactacaaataccccaacttatataatgatcgagtggatacttgatgatggagctggatatttattaactggaatgatggttagaaaaaaagatgtgttatcagatgaagattctaaagataagctagacataataaattttatacatgaatataaagaaaaaaatgaatatgatataaaaagaattcctatagttgaaattaataatgggaagaaaatggtgaaaagctttttgaattctaaaaaattatttgaggaattaaaaaagaataaagaagttagatttaattattatgatatgaataatacggtaactactaaaaattattttgaaaaattacaagaatataagataaatcataaagaatgggaaaccataattaagcaaataaatttaaaggaatctggattatcagagctttttataaaggctaaagatagttctggattagttaaatcttggtttttgcctgctgttgaaaataaattaagaaaagatgaagatagaattaaaaattataggaatttagttaaaaggtacatagaacaatataaggctaataaagctaatatagataaaaaggaaaaaattgaactttttaataaattatcagaagatattaaaaatagctgtgatgagtttatattaacaatagaagaaagaaaagggttggaaaataaaatagctaatattattaggattttaaaaaacaattatgaggataaggaaaatgaagaaaaagaattagaatgtttgataaatcaattagtagaaaaaatagctgaattattttatgaggaatattctattaaaatttataggaaagaagataaaatagaagagttagaagagtatgttaaagaattagataacttagtaaataaaagtgaagaagaaaaaaaggctttaaatagaaaaaatgaaattttagaatgctcaaaaatacataaagaatatcaaagtagatcacaggagttacaaagtttagagagcgaacttaagattttgactaaaaagaaagatgataatacacctcatataaataatatagggtttactattagagaaattttaaataaagaaatatctgatatgaaagaaaaagttgatgaaagaaaaacagatataaatgttttagaatttgaaaaagaaaagcttaaaaatattttgaatgaaaatagattgttaattaataaattaaaagggagagaaggatttttaaaagctagtttagaatcttttgataaaattcaaagtaattttaatgataaatataatgaaaatataattaggaatatatctggatattttaatgaggaatcgttactatctattagaagaaacatagaggattataattttgatttaaataagaatatgaaaaatattactgaagatattttttataataaagaaatattaaaaagcaaaaataatgaaaaagaacgaaatataaagttaatgtttgattttgaaaatcaattaaaaaataatgagagtttaattgaagaattagatgaaaaagtaaaaatatgcattgatgttataaaatatattgattttggcgaagagcgagtatttgatacagaagatattttaaatgctttttatacaaaaatagattttttagaaagagaaaaaagtaagttaataagacaagaagaagatatattagatgagttagataagctagaagggggtagagttttagaacttccaaaggaaataaagaaaaagcttgaatataaagatattaaaattatttatggtatggaatggcttaaaaagaatggatattctactgaaaaaaatattgaagttgtaaaaaacaatccttttataccatattcattaataatgaattctagtgaaattgaaatattaaaaagggaaggactagatatatttatatcaaatccaatttctataataaataggttagatttagaaagtaattttcttgaagtagatcaaagtatggtgtcttttaataagttgaatttttttgtttcctttaataataagcttttagatgaaaaagaattgataaagttaatagaagaaaaaaaacaatacctagaaagtattagaagtaatatagagaatagaaaaaatgaaattagatttttggaaaaaaagaaagagataattcaatattctaagctagacaaggaaaaatatgaaaatgtaaaaagagaaaagacatttttagaaaaaaagattatagaaataagagagaatgaaatatctatagctagagaatttgggaaaatagagattaatatttcagagttagaaaatactaaaaaagttttggaagaaaatataagaaaaaatcttgaaaaaattaatagctttaatgaattgatagaagaatataataaatataaagataataaagatgaactgagtttaattgaatttaaaatagaagaaattaataagtttttaaaagaaaatgagaatagagaattagaaattgataagactttaaaagatataaataatattatggtaagttacaataatagcttagagaaattaaaaagtgaagctatagaatttagcttttataaagaaggattatttataaaaaaagataaggaagatttattagcagagttttatgttttgaacaagcagataacagcttcagaaaaagatttaaagaaaagaagagaagaaaaaagtagagcatttaaagaaattgaagatgaattaaatgctaaagctaataagtataatgtagcagaagctgaatatattaatgaagtttacaacataaatagagattttgaattgaaagatttaatagaaaaggaagataaaaattacaattatttaaaagacaaaagatctaatatacttcaagagattgctagtgaaaaaagtaatgttgaaaatttatatgaatctttagaaaaagatcttggaaaaactaaggctaaaagtaaggctttgctttatgataaaaactttaaagaggaaatagcaaaattaaaaattgaaaaagcttctaatgaaaagaaaattaaggaagtaattaatgaaaaaaataaaattgacaaatatttaattgatttaagtcaattcaatgaatttgtcatagagaaagaagaagatatatttatagatataaaggatttagataatactataggaagtattaaaagagatttatttgaaaaaaaagacttagagttaaaaagagaggctaaattaaataattgtatagttgatattgagaataaagatagttttagaaatgaaaatatatttaaaagttctatacaatctttaaagtctttagtaagtaaaccaataaaatttaaagaacatttaaatcttgtaattaattcatataattctatcattgaaaagttattaattgatattaaattaattgaggatgaggaagagaaaatattggatagcattttagaatatattgaagaggtcaataaaaatatttctataatagatgataattcaactataaatataaataataaaagagtaaaaatgttaaatattacagtacaggattttgaaaaaaataaaattaattatagattaaaacttaaagattatattgaagctattagagaaagagctattaaggaacttgagaagaataattccattgaagaaataattagtaataatataactttatttaagttatatgatgaaattattggagttgaaaatgttgagattaaattatataaaatagaagagaatagacagagaataataagttgggatgaagtttcaaaaaattcaggaggagaagggtttctttcagcatttgtaatattaactagtttactatcttatatgagaaaagatgaaaatgacatatttagtagaaaagaggatggaaaagtattaataatggataatccttttgcacaaacaagttcttcacacttgttaaaacctcttatggatattgctaaaaaaagtaacactcaattaatttgtctaacaggactaggtggggattctatttataacagatttgataatatatatgttttaaatttagtatcatcaaaattaaataatagtattaaatatatgaaaagtgagcatataaaaggagataaagaggagaaaactgaaattattgtttcatctagattaaaaatagaagaacagactagtttattttaa

SEQ ID NO: 51710 - DNA, 1002 bp, Clostridium perfringens SM101
ttgagtttaagtagttttaaaagaaaaagaatagaattagatgagttagaaaaattatttaaaatagatacttattgtgatttatatgtaaaagttaatgagttaataagtgagaataaaataaaacctataattagtagtggacaaaatggtaagagccctactttatataaaagatatacgataattgatataaaagaagataataaagaattaatagatgaaattgaatataaattaattagtaaatttaatattgagtattacagaaatcatttagagaagtatattgatcatagaaaatatatacttcaattaaatgatttttttataaataaaagtgagtttttaaattatccagtatcaatgaatgaaagggcttttcaaatatggggaagagagaagtttttgcaaaaagaagaagggaaatcaatattaaaaaacttaggtattgatttaggaatgctaaattattatgatacttcagagcctttagcatattattcaagaagtaagaatactcctcaaaatgtattgattatagaaaataaagatacatattatacactaagaaattacttaataagcaacaataaaattttaggtaaggaaataacaacaataatatatggagcaggcaagaatgtttggaaagcgtttaaagactttagagtatctgtagaaaatcatgtttctaacaaaaataataaattcttttattttggtgatttagattatgaaggaatattgatttatgaaaaattttatcacatgttttctgaagaatataatataagaccatttataaaaggatatgaaaaaatggtagaaaaatcagaaatgatggaaattaatttgcctaaaaccaaggcaggtcaaaataggaatatagaaaatgtatttttacaagaatttagtgaaaaacttgatggaaaaatattgaagatattagagaataatttatatattccacaagagattattaacttaacagatttatag

SEQ ID NO: 51711 - DNA, 1443 bp, Polaromonas naphthalenivorans CJ2
atgctgcccgcctgtgaattgcttgacctgggtcggcagcagcggaatctgctgcttttacgtcccctctttcagctcgaactcaacaaacttcggattggtgacgaggcaaccggcgacaaaggacttttccaggccgttgacacgcactatttggtgctctctgcgcttgatttcatgatggaggggacgaccgtcaacatgggaagcacccagcaagaagtgctcagccatttgtcagcggtggcgcaggtcatgaagcctgagttgactgcacagcaagccacccgggtcgctgaggtggtcctggataccttggataacaaggctcagtcttatcgtgagttcatttttgaccacttcgacgccatgcagcgcaagcaccgaaccttgcgttttcggctggtggcctaccagcctgacctggaagacatttaccgctacaagccgacgtccgagggctacctggtttacctcggcatgctcgacttggcgccggaagattcgcaggaactgatggaaaaaatgctggaccttctggtcaagcggggacgcttcgaggcggccctagagattgcacggcgtgcgcgcaagctctccctcgaataccggcaactcatccgggaccgcttgatgcaggcttaccgcgcgcctggctccgtgaactggaccaaggacatggcaggaaaactgaccgcagcccgtggccatgttgcagggcgccaggctgaggaccagcggatggaagaggccgtgcgggaggcgctccagtcctccgatgagctgaaaacccgccaggatttgtctcaactgctgaagacgctgcaaagcgcgagtcttatccgctcaaacttggtcaatgacatcactgtcgcgcctgacaagttcctcgtatcccaaaggtcgttgtttcgggcccggcggccctctagcctgcctgatttggaagacaggctgtttccccaactcatcagcctgcctgccaacgtgctggtggcgaatgccgacaactgtattagcggcctttatccggcttcatggccaaaggtctacgacctcaacaacgtatttgcgctgcttttggaacgcagggcagatgagcccgtcctagacgaggatgacggagaaattacgcccttcgagtcccaaaaggaccagttcgcaccggaggttatcagccaggtcgagcagtggctcaagcggcagttcgccacaggctccacgttccgtatcgaccaactcttgggcatggccgaggcgcaggggatggacagccagttgcgccgctgcatggtgctgatgctgtttcgaagctatgcacagtccgagactctcttcccgggcatgaagtcagacgctgcaggccggttccagatggatatcgcgcagggaacgaacctcgagttctcgccgcttcaagaaaacaaggcagacaaaccatga

SEQ ID NO: 51712 - DNA, 4326 bp, Polaromonas naphthalenivorans CJ2
atgcaaaaaatcactcgaatctacgttggcaattacggcatcgacatggcgtggtacgacggcatcacttttgacctcaccgacccggatgacggttacccgacggacaccatcattaatctggaaaacggaggcggcaagacgacgttgctgagcttcatcttttcctgctttgagaccagtcaggaacgattcctcaagcatatccagaacaagaaccaccgattcagccagtacttcgccaaggatggactaccgggaatcgtgctcatcgagtggctcatgcctgcgcgggtggcgggaggcgcgccttatcgcctcgtgacgggtcaagccgtggcggtcaggacaaatgccgagcgggacgaggtcgaccgcgtgtttttctcctttgaagcaagccagggccttactttcgagacggtcccggcgcccaagctttgcttcgccccggtcaccaacatgaacgagttcagccggtggatgcatgagtcgaacaaaacgtcgcctgatttcttttatacccgtacccagagcgactggcaaaagcacctccgcgacgagcgcctcattgatgtcgaaatgctgcagctgcaggtgaacttttcagcgcaggaaggcggcatcgacaccggctttttgaccttcacctcggagccggagttcatccgcaagttcttcgacctgaccctggacccggaacgctcggcggccgtccggctggcagtcgtcaacacctgcgacaagctcagccgcaggccacacttccagcagtgcctgacggagctgaccaagctgcgcgacaacctgacccacttcgacgaggcggcgggtgccttcgccaccactcgcgcgtcccagggcgaggctgtccgccgaggctccgggctggccttaagcctcgacacgatgaaccgtgaccgaacgcagctagctgccgacgaagcggctcgggcgacagaccaggaactcctggccaacaagtcaggccaaatggcaagcagccgtgccgatgacgtcctggttcttacggccctgcaataccttcggcgcaaggagcaagccgaggcggcaaagaaacaagccgatgacctcttgagcaacgcgcgcaacaagctcgtccacgtgagggccgcccaagcccgcggcgagctcgatgccctggacgcgcaactggcgcagcttgaatctttgtccgcagtagcccaggaacagctcgagccttggcgcgacaacgctgaaaagcaaggtgctctgctacgccgcgcgctgtacgcaggagagcaaaaactgcaaaaagccgcagcgggagaagcctcgctagaggtggccgcccatcaaaaccaaattgccctcagcaaggacctggctacgctgaccaaggaggaacagtacctctttcaagtgcaggcgaacctgaaagcaatggaaaatgcgtacaccgcaacaaaggcgcaactcatccgcgaggggcagctggagccagaagaagagtccaccgtggcagccgcccggtatgccagcacggtcactgccaagcgtgcccgcgaacaggaactcatagcgcaggcccagggatttcgcgccttggaatcggcgtccagagccaaaagcaaaaatgagacagcagaagccgcacgcctcaaagcggaaattgggccgctccagcggttcatcgccgacgcagaagttgagcgcgagcagctgtcccagcttcccatccttcgacaggcggctgaagcagagacggccgacccggactccgccgcactggtacccgccctggaccggctgattcatggaagcgaaagcgaggtggcccagtgcgaggtgcatcttgctgcgctgcggtcgagcaaggctgccatcgttgagaccggggtttccggggcgtcgcgagacgtcaacgaggtggtgtctcgcctgcgagagcttggggtcaagtccgcagcccccttcaatacctaccttgcccgggctctgcccgacgctgacaaggcgcgcgccctcgtggcgagcaaccctgcccgatttctgggcgtgtgcgtggcatctgccgagcttgacaaagcacgaagcgtcttcagcccgtcccttcaactggtagcgccagtcatggtgtcgagtacggcgctggagtctgacccggtggaagaaaaccggttcgtcctgccagccgccgatgacgcggcattcaactatgcagccgccacagagcacctgacccacctcgacgtacgcatcaacacggaagagcagcggcgcgaggtgtatgccgggcgtcagcgcgcagcgctggccgccaagcagcgcctgcaggcctacggtgctcgtttcgggggcggcgctgtcagtcgtgcgggaattgacgcggctcgtttggcagcggagggcctagcggcttcagagcgtgctcaagaggccgagggactcgccagtgcctcccaagaaaaagcggaggccgcaagaaaggaggcagacgagtgctccaaggcagccgaccgtgcgcatagcgacgggcgtgccattgagcggtttgcccgggaccacgaagctggccgcgcggcgtgtctggctcgcctggactccctgctggtagaacttgccgccaagggcgacctgcgagaccgcatatccactgaactgggcgacagcgccggagcggaaaaagccgcataccgccgcaagcttgagcaccagaccgaagcagctcaccttggcgctgagcgcggagccctaaaacactacagcaagagctttgcggccgagcagcaccttgcagagcatccgcaggagttggcggtcctgcgagtcttgtacagcgacgcggagaaaacctacgacgccgaggccgagacccgcctgggcatcgtgcatgaaaagcaagactcagccaggaaagaccgagccagcaagggccaggcgttcacgaacgcgttccccggcgttaaggctagcgacatcagcccctacctcaacgcgaacttcgccgttttgctgcccgcgacccagcaggaggttgaagaaaccgataacgcgtcccgctcggctgacagcaagtgtgctgttgcagccaacgaacattcccgctatctcaaggccaacaaaaccaactctgccgccagtgctgagatgctggcgctgaacgatgacgcgctccatgaagctatccagacgtcaacgcaggaccaaatccaggctgcggcgacagccctggcagcaaaattagaagcaggccgttgccgagaccgtgcccgccaagctcgggtagacgcaacgcaggccctgaacacaaccagcgcgctgcgtgcgtcgctctcgctgcctgagctgctggatgctgagccagaattactgctcgaggacatcgccgcccaggcaaaccaagtcattgccgacttccagtcaaaagccaagtcggttgaaagtgcccgaaagaaggcctataaagcgttcgaggacctcaagagcacagcctcgacgccagcacttcaaaaagttgaacccgatatcgccagccagcttttgcgcaacgacttcgaagcggcctgcgcagacagcacccggctgctggagggcattgaagaccgcatcggcacgacccagtccagcctggatggaatgacctccgacttcgagaattgtgtgggcgagctgtccaacctcaccaatggtgccatcaccttgctcaactcggcgacgaccaacaagaaggtgcccgtgggtgccccctacgttggcggcaaggcgattctcaagatgcgcgcccgctttcacgaactcggccaggacgttcgccggcaacacctgcgcagctacctcgactccttgattggcaacaacaccgttcctgccaaaggccccgagctggtggcagaagcgctgctgcgcatccacggcaagcctctgggcatgcagatgctgaagatggttccggacgaaaaccttcagtacgttgcggttgacaagattcagaactcgggcggtgaaggggtggtgatggccatgttcctgtacatggtcatcaaccagctgcgctccgagacccaggccaagctcaagaaggccggtggcggcccgctcatcctggacaacccgtttgccaaggccaccaccccgacgctctggaaggcccagcgcatgctggcccaggccatggacgtccagctcatcttcgccaccgccctgccagactacaacaccgtgggcgagtttggccgatttgttcggttgcgcaaagcgggcaaaaacaccaagaccgggcgctggcacctggaggccgttgacttcaaactcagcccgcaggccgaggcgttggcagcatga

SEQ ID NO: 51713 - DNA, 1002 bp, Polaromonas naphthalenivorans CJ2
atgagcgaagcatttcttcatctccttcgcgggtcctcccgcaaaagggtgcccctgctggacgtcaaacgggcattctttgaggcccaccccgagacattgaccagcccatcgcgacacgagcatctgctatcagcgctgcgcggactggagtcatcctgcgcggttcaactacccgcccctggaagttgggaaagggtgggaaatccgccactgccaaactgggtccagcttgtccggagcgaaccggcccaacccagcccggattactcacaagttccctgggttccggaactcgggttctggcctgacctaaaaccctctgcacttgaagctgccaaggcagtcaatgatttcttgctgcgccgaaggaaaagtctgttgatggtgcctcttaaagaaaggtcactcgaaatctttggtgatgaaaaacgccttgatacgctcaaatcaggcaacacacttttcggcggtcggctaccgctttctgcccttggtgcttttcaggtcccacccccgattccctatcgcaaagctgatgctcccgggatgcccgttcttgtggtggagaaccacaacagttactggagctttggcgaatggaatcaggccgccaaacgctactccgcagtggtctacggctgcggagaagcttttcgcagtactggtgccgcgctgggtcaggttcttcgcgaagtgcaagcggtgggcgcggagtacctgggagacctggaccccaagggcatgcgcattcctcatgagttcaatggtgcgtctgcgataaccgaccccaaggttcggcccgctgttgactggtaccgatggctgctgcagcacggccgcaaacgtgaaaaaccggaattcgcgactgttgacaaggcgcacgcgttagcttggctgggtgacggcctaggcgaagaagtcgctgccgtctggatagttgggttgtggattccgcaagagggattagggtatgagcaactggcggcttttgactcatga

SEQ ID NO: 51714 - DNA, 1527 bp, Geobacter uraniireducens Rf4
atgccagatcgtaaccaaatgtcgctattcggctccgggccggacgccttctcgcaggaggtggacaggggcgaattcgataaaatcgaagctgcggcactcactacccgggcgcaaaccatagcgaccttatcgacgatagcaaccataattgcccaatcctcttctcctccgttttccctgatcgacccattcactgtcggcctgatggccgtcgggcacgtgatcgattcgctgaaactgctggatatcgaagacagcaatctgaccgtccatgacctggttgagcaggtcactgccgacctggaaaaccaatttcaagctctccgggcggagaaatctatcgatacgatgccatggcgttccgagattgaagcctggagtagagggatcgtcgacaagctgctgtgcaagaaggggatgggaaagaagatcgaccgcctgtttaatacggaaatgggccttttctacgattttcaacattcgctgctagaagaacgcgaaaagagtactgggaaaggcggcattcacgtcaagccgactacggcttgcctgaccctttacctggggaccctcactcagtcgatcggcgatgctcaggcggcgttcgcggcagtgattcagaggcagatcaggcgcggggagtaccatgccgctctgcaaagcgccctggagcaccagcgggtgactaaacagtattgcgtcgagatccagcagttccggcgcaaaatcctttccgatgccgggcgccagggctggtccgccgatgtcatgccgctcatcgaaaagacccagaacgaagtcgacgatgccatgtccagcgtaacggagctggaatcacacctcgatgataatttcgaggcgttgccgcgcgacaagcagtcactggcggaaaaggtgttgatggttatccggcaatcccggacagcataccgcgagcttcaggctataatgattgagctgccccggctctaccacaaatgtatcgaatcccaagggttcgcatcccggcatatccccctgccgtccatgcgtgatgacgtgttcctgccgcttttttatcaagtgaccgacagggaccagttcgggaaagtctgcgatgccatcaatttcgggtgcgcttcgcccatttctcccgtgctgtttgatcctatcgcatcgaccgaaatcctcctcaagccaacgacacaggaggagattcgggacaacagcgtcggcctggagtgcatggacgaggactccgtaacgctctccatcttcgacgccgaaaccatccagaaagccaggcatacgcttctggaaaactgtgaatcatcccccgctaccctctctcaaatcaccagggatctttgcgaggaggcgtattacgaggaagctatctgcgttgcgctgatggtaagtaacgcctgggtacaccgcaagctgatcgagggggctctaaaacctacccgtacctacggaagatacgcatgtgcttcatgcagcggtgacgactatctgattgcccgagaggagaccagtccatga

SEQ ID NO: 51715 - DNA, 4377 bp, Geobacter uraniireducens Rf4
atgcctaaccttctatccgtcaggttctcaaaagtcggctattccgacgcacggatcgacggcctcgggtatagcctcgcccgtgacggggaggcaaaaaacagcctggttcttaccggcaatggcggaggcaagacaacgcaggttcacctgctgttctcactgttccttccgcagagacgcgaactgatgagctatcaggacaataccggccgcaggttcgagtattacttcgaggaaaacgaaattgccttcatcgcgtcggagtggtctatccctaacagccagataccactgggcgggcgccagaggaccagggtcatcggccgatttacgcaattcaccaacagggagaagtacgagtacgaaacatatttcttttctttcatagccgacgatgagctggggatagatgatttgccgatcacctcgtccattcctcaccgagtaaaggcatactgccggaccatcagtgaggcaaagaagtatctcaaggagaccttcggtaaacaaccttggcgggagtttttcggcccgacagacaagatggaatactggcagaactatctgcggtccctcggcttcaatatcgacatcttccggctgatgcagatgttcaccatgagcgaaggtgaccccggagcctttttgaaacggtattgcagccaggaggccgtcctcgggatgatcaccaaggaagtcatggacagcaattccacggcgcggcttagggacatgctggtccagcaccgagattcaatcagcttggctccgatgacccgcgctcagatcaccgcctacaacgcactgtccgaattgttctccaagatggaacctgtggcggcaaagctcatggtcgccgatcaagccttcgccaaagccgtcgcagaactcggtaccgtagcggcccggatcaacgctacccttgcagtggaatcgcaaaaggtggcagatctatcccaaatccaagccgcggacaaggccatactggccgctgaaaagaagaatcttggggagatgcaggcagaactgcgcggggtgatcgagcgcctggcaagtctcgccagtcaagccgccagggcgcaatatcaggagatcacggagcagcttggaaagaaatccgcgctggtcactgccatgcgggcggtggtcgaccaggtcgaggttatgaacgcaaagaccacccgcgacgatctatcacgccggctggatgcgcttgcggaaccaacgcgaaacctggccgacgagctggccatggccgagcagttgctggctgaatacctggtccaagacctaaacgctgcctctacagcggtaaagaagctggaggctgatgagcgggaggctgtcgaggcaagaaaagggctggtcaacgaaaaacaggagctgcttgccgagctcgcaggacagaaaaaagaacaggcaatgctgcaaggggtggaggatgagcgggcccggtcgctggcggcaatcccttggcatgaatcgggcctccaggacggcacgcaggtgcaaccaagactggcggcgttggaggccgagtcggccgacctgaaggggcgtctggtgtcggcacaaaatgaacaggccgacctcaaggccgaattggtgtcggtcgagcaccgcctgaaggaccataatgagaagctggaagctctcgggaaagagcgtggcaaagcatgggccgcttttgaagatttccagaaaaggtacgcctcagtagcggaaatgccggggataaagggtcttttccagctggatacgccaaacctgtttcttaccgggctggactccagattgaagggaagcgtcgcctcctgcgagatcgacatccggaagctggaatgcgacatcgcgagccgggaagagcgcattcaggcgattgaaaaaaacggcggcttgctcccatcgtccatggacgtggagactgttctcgatgctctgcgctcggcgaagctcgatgcccactcgtactggcaagtattctcccagcagaacagagctcccgaggaagccgtccgggaactgggaaaggaccctttccgtgtcggtggggtcgcggtttcgggtccggtcgccctggaaaaggctcgcgaaatccttgccgcctgcaacgtccttgcgccggttgccgtatcggactactccgtcgcaataaagagccgcgaagagagcggatttgtagtatttcccgatgcagcgcttgctattgaccggaaagaggccgaaaggttctgtaccactgccaggggcgaaatcggctctatggaagcgaagatcgctatcatcaagacagctcgcgatgcggccgctgagtcccgtgatgctctggtctcttttctgggtggctacaatgagagctcggaagcgctgtttaagggtgatctcgtcaggctggataacgcgatccaggcgtgcagttccgagatcgggaccctgactgaaaagcacgcggcggtgcttgaacttttggctcaggtgaaaaatacctgcgacatgcttgccgacgctatccggaagctggaaccgcttatccagcaggtaagtaagcacatcgccaggtacgagcagggacgggacgaccgcctccggcgcatgcaacagctctctttggccaacagctcaacgggccgggccgttgagctgttggaagagcggattctggtttctgaaggtgtcgaaagggaggctcgcgatgcggccgagaagggtcgtgctctcgcatctggtatcacgagcgagctgaacaagctgggcggcatacgaaaggccccaaccgacatcttccggacactggccaccaacaccgcttcggcaagggagctgcactccggaaagagccgggcactggaatcggccaatgccaacgaggagtacctgcgcatgcaggcgatgtttgacgccgcgcaaaagacctatgaggagcgccaacggagctgggatagacgccacggcggcttgacagctgacgcactgtccaatgcccgctggcaggtggccagcaccgtagccacggaagatgattatcagagagctgttcaggaaaaaaatgaagcatacgagtcccaggtcacggcgaagcaggccagagacacgctcgccaaggaagaggagagccataaaaaagctcactttaatctcccggtcatcccatgctccctggaacaggtcgagggccgcacccgggaggcgtggctttccaccgccatagaggaactgacggcggcagtcgctgcacgcagcgaggccgtagccaacagagcggctgatctggcaagtgccgagtaccaggtccagttgctttctactcttgcttcggacctccaggtggcggatgaggtctgcgctccctacgcgaatttccaggaagcacagcaggacctcgctgccgctaaaaaggcggagaagctggcgtcgacagagcgggactcactgggtcgtgacctgggcgctctcaacattgatctcgccgagcttctggatcaggacctgtgcgcgccgatcgcctccatgggctcgctgatcaaggaagagcagcgcaggtccggtggagtgctgaaggaagacgtgacgggtttccttgacaggatccacaacgccatagagtcgttgaaatttgaactgagccagcatgagagaaacgagcagaaggttgtcgagcaggtcgtgctggacgtcaagaaggctttcgggtatctcagcaaactcgccacccgcagcaaggtaccggctctcggtggtatctgggcagagtggtccggcaaaccattcatccagttccggacccgcatcgaaatcgatagcgatacctcacggcaggcgattgccgatacggtaaccatgatctcgcagatacccggagtcctccccgctggagacgagataatccataccgccctgtcagccgttctcggtaaggcttatatcatcgagacgctcaaaccggacacttcgcccacgacagtctacaaggggatagagcacccgaccggcctaaacgcctggtccggcggagaaaggctgtccggggcagtgcttttttacctggctatatgcaacctgctgtcggtcgacggccagggtggcaacgtaatgctgctcgacaacccctttgggtcatgtaccaacatcgatttcattcgtctggtaatagccctgacgcgtcaatacggcgttcaaatagtcgcttgcactccgaccgaaaacgaagatatccgccggctgtttccgcttaacatcatgatcaggaaaggcggcacggacggcatcatcaaaagcaccggcaagcctatcgtcaggtacgaaaagacggtttacaacgagggggaaatagcgacacttgagatttcgcgggaggtcccacatgcaacgtcctga

SEQ ID NO: 51716 - DNA, 996 bp, Geobacter uraniireducens Rf4
atgcaacgtcctgagaccggccgattgctggaagcccttccctacggcaagacaatgttggacaagatatggatgattttgtcggaagtggctactgttcctccaggagaacagaggaccttgttgcgcagtatgcttgatgctatcaaagatgcggagttcatcgagttccccaggatgacaaccagctgggatcgtagcgcgctgccccacttgccgaaatggatcaatcgcccgcggaccaaggttgtaagacaatacgccgagcatgtcatctggtctcctgagcttagctttctctcttcgaagaaagagcttgccgactctccatggctgaagattgacaagtggctcaaggaaacccgaaactttatccgggactcggttcctgtcagggagcgatcgctggagatcttcggcgacgaaaagatgctggatgccctgatcggcgcgcaggcgttcaagtccagtctgattaccctcgacgccctgtcttgctactatgtgccggagccggccgcttgggaacgaggccctctgggaagtgagaagctgcccggagtatgtattgagaactcgacaacctatgatgtggtgaagaggttcaaccgtgaagccggtatatgggggtttgtcgtgtatggccgcggcaatggttttgcctcggttgttgaggggattttgccgatcatggaagagttcgggcattcacggattctgtattttggcgacgctgaccacgaaggtttggagattgccgcccggggtgcccgaaagttttcggctgccggcagagagctggagttggaggttcgtctgtaccgcctcatccttgagtgtgggaaatttgccgagtcgaagacaggcggtgtgctttcgcctggagccactgatttgatacggaaggctgatctgaacgagttgccagggatttttttgcagcatctccgggtttcccaggagtgggccgggtaccggaggcttaagagatattaa

SEQ ID NO: 51717 - DNA, 1521 bp, Frankia sp. EAN1pec
gtggtggatgacgagctctaccggcggtggcaggtcgcccggctgaccgagccgctacaccggctggagatccgttcggccaccaaggccgacttcaaccacgttcgctacgacctcgtccagctcgcgctgcgcgccatcgactacgtggtggcacaccaggccagcatggagggcaccgtcacccccgacgagctggtcgcccacctggccgggctggcccgccggctctccccggacgacccggaccggccctggacccaggtggcgaagctgacgctggcgaacctgctcaacgacggtcgtccgctgcgggcccggtggggcgaactggcagactccgacgacgagcgctccggtacccgcacctacagcttccggttgttacgcctcctcgacgccggtgactcaccgcaactgtccgccaccgacgaggcggtgatgctctacctgcaggcactcgacgtcgacctggcggaccgggaggcggcggcgaagctgatcctgcgccggcagatggaggcgggcgagttcgagcgggcgcggcgctccgcggtcgacgcgcggcgtaccgccgaagggctggccgcctcgctgcgtgaccggcttgacgagacccggcgtgacctgcgtggcgtcgactggaacggggacgtcccggcgcagctcagaggggcccaccagcacgtcaccgagcagctcggcctcgaccggcacatcctcgacctcgccgagcgcgggattgagcgcggcagcggcaccgagcgcgacgcgtgccgcgccgtcctcgcggaggtgcggcgcagccaggaggtccacacccggctcgagcggctcatcgtcggtgcgatccccgtctacctggcggcgcaggaggcgcagcgtttcgcgtcggcaacgtccagcctggctgtcgacctgggcgaagacgtgctcatgccttatctggcggcggacgaggagcgggcgagtaccgccgcgacggatttcgtggggcggctctgcgcgcgctgcccgcctgtgtggaccctcgacacactggccgcggtgctgctgcgcccaccggcgatctacgagcagtcgaagcccgcctgggacgatccgggtgatctcgacgagccggaggagcggggtctgccggcggatgtcgaggcggcggcgagcgcggtgttccgcgagtgccgcaccgcaccgcaccgactgtccgagctcgccgcgctcggtgcccaccacgcggaggacgtggcggacgtctgcctgctcgacgacgttatccacctcgcggcggcgggccggttcgtcgccggtgggggcttcggcgaggacgaccccggctcggcgtcgaccgggctggccgccgcgctggaagggctggccgcggaggccgaccgcaccccgctcgtcggcggccgatggcgcggtgacgatctgctggtggggcgggcctccggcctggccgtacgggaggccgaggggacagcgggcggcgcggtcgtggcgtcgggggagaggttgccatga

SEQ ID NO: 51718 - DNA, 4404 bp, Frankia sp. EAN1pec
atgtacaagcttcgccgtctgcacctggacaccgtcggcgtgcgtgagaaccggttcgccgcgctgaccctggacaccgtcgacgtggatgggaacccggccgacaccctcatctggatgcgcaacggctccggcaagacgacgatcatgtcgctgctggcggcgcacatccttcccgcccgccgcgacttcctcgcggcgcgcaagaagcgccgccgtgacgacgtcacgagaacgctcgaggacctcgtgctcaccgacgacacctcccacgtcgtcgccgaatgggaggcaccggacggagccctgctgctgaccggagcggtgtgggagtggccgaacaggcggcggccggttgaccacaacggcgcgggtgcgcagaagctcaggaagctgttctggacgatgcgcccggacccggcggtcgagggcacgatgttcgaggatctgccgctgacgcaccgcacccggggcgaggtggatctcgccggcttccatgcgtggatcaagagccgggcggtggcgggagcggacgccgcggccgtggaccagatcgacccgtggcaccgcctgctggacgaccgtggcttcgacgcaggtctgtaccggtacttcgtcacgatcaacgcgaccgagggcgggatcgacgctctcttcgcgaacatccgcagcgagaacgactttgcccgctacctgctcggcttcgtcgccgacgcggggcgggccgcgagcgtccgcgacctgctccgtcaggtggcgaccgagctcgcgctgcgccccaggtaccggacggagcaggagttctgcgtcgacgcgcagccccggctcgccacgttggccaccgcgcacgaggacgtggggggcgcctcccgggagcgcgccgagacggcccgcgcggcggcggccttccggctcggcctcctcgacgcggcgcacacggcggaggcgggtgccgagcaggcggcgcaggagcgccgcgacgtcgatgagcagcggctggagacgcaacgccaggctgacggtgcccgccgccgtcgtgacgagctgatgcgcctggccgccgggtactggttcgccgacgccacgatcgaggaggaggccgcgcgcgaggcgctcgccgcggcgcggaccaccgagcgggcctgggaggccgtgcttgccctgcaggccgtcaaccgcgcgaggatcgatgtcgacgcccaccgccgggcgatcgacgcggcgcggacacaggccgccccgctgctcgtccaggcggaccgggccgacgcggacctcgccgccgcgctcgacgcggagctgcgagccgtcgccgtggagatcgaacatctcagccgccggatcgacgagaccgggactcgtgccgaggcggcagaggaccggcgggatcaggcggccgacgagatgggcgggctgaccgcggaagctgatcagctcgcccagcgcgccgacgagctggagcggaagagaacgcgggccgtcggcgcgggtctgctcgtcgacggagtcccggtggagacggccgtcgccgaggcggagaccgtcctggagtcgctgcgcgccgacctagacgcctgtgtcgtggagctggacggggcggacagggcggtgcgcggcaccgccaccgcctacgacgaggcccgcgggcgacaccgggacgcacagcacgcggcggacacggcggcgacgactctgcatgggctcgaggagcgggccgcccagctgaacaggtccgatgccgcggcccggctggcgcagacctccgacctcgatctgctcgccgacgcggggcgcgtcctcgcgctgggcgaggaggcgatcgcgacctcgcagacgaggctgctggaacgcggagtcgacgcgagcagcctgcggctcgctgtggccggcctggaggagacctccctgctgccgcctcgccccgcgctccggcaggtgctcgaggtgctggacgatgccgggatccccgccgttcccggttgggtctacctggcggagcacctgccgctgaccgcggcggcggcgctcgtccaggaacggccggagatctgtgacggcgccgtcgtctacggtgacctcgcggccgccgtccaactcgccgccgagctcgttctcgacgacccggtcgtcctcgcgccggtgacggtcttcggtgagacgcccgtcgttcgcgacggcctggtcgtggtcgggccggtcgccgcccgctacgaccacgcggccggggccgtcgagctcgaggctcgtcgtggcaggctgagtgagcatgaccaggagagcggtcggctgcgtaccgacctggacgagctctcccgcctcaccgcggatctgcgcacgctcgcggccgacgtcgcgacgcgcggcggtgccgcggtggtgcgggagcgggcaagccacaccaccgcggtcctcgaacaggccgaagacgcgcagacggcggcggccgacgcccaccgcgaggcgcaggtggtccagcgcgagctcgccgcgaggtgcgaggagctgcgtggcgcggtcaccggagcacaggggcgactggaccggctcaacgacctcgccgaggacctggcggctctcccgcctgtgcgggcacggctggaggagatccccgccctgcgcgcgaaggcggttgccgcgcgggagcgggcccacaacgaggcccgcgcggcccgccgggagcagcttgacctgagcgacacccgggcccgtctcagcaccaggagcggcgatctcaccctcgagaggggatcgctcaccgtgcacggagagcaccggggcgaagtgccagaaggcggcctggacggggcgcgccgagcccgggagcaggcacaccggctggcccgggaggcgttcgacgaacccgagctggtccgccggctcgacgacctggtcgacatcgccgcccaggcaggtggggcgtggggcgagtatgccgtggaggtacaggaacgggcccgggaactggccggggcgcctggcgccgccgacccggccctacggtcccgctaccgagacgaagccgcccaggccgcggaccaggcagccacccgtcatgccctggccaaagccgacctcgacgacgccggccatgccgtgcgggagcgccggccggtggaccggccgcggcatgccgagctcccgcacgaaccggtgaaccgcgccgacgcggaggccgccgcggcggaggaggaccgcgccgcggccaggatccaggatgatctccgtcgggtggagcagcggctggaagccctggagaaacaccatgacgcgttggcgtcacgggctgtgcaactgcggctgcgcgccgaccggttcgaccagtgggccgacgtcgccgtcaccgcgaccgcggtgtccaccgatccggccgcgctggacgagtccaccacacggatcctcgactgggctcggcgtgcggtggcccgccacaccgaagccgtcgacgcacgaggccgcgcgttcgaggccctgcgccgctgggccgcggacgaacggttcgcgctgaccaccggcgacaccgaagccacccggcggctccggaagatgttcctcgaccagcccgtggaaggagtcgctggccgggccggtgcgctgagcgccgaactcgaccagcgccgggcccgtatcgaccagcacctcgagcatctcgaccagtcgcaggagaacatcgtcacccggcttgtcgatctcgtcgacgcggcgctggcggacctcgcccggttcacccggctgtcccggctgcccgagaacatcggtccctggggtggtcacgagttcgtacaggtccgaccacgcggggaacggccgagccaggagcaggcgcgggtccgggtctccgacctcgtcgaccagctggtggcgcccggtgcgtccctcgacatggaaccggtggacctggtgtggcgggcgaccgaggcggccgtcggcggctcggggttccgggcccgcatcctcaagcccgacccggcgcagccgacgcagaaggtcgacgtgaccgagatgaacaagtggtccggcggcgagaacctgaccgcctgcctggtgctgttctgcgtcatggtgaaactgcgggcggagaaccgaggcggccgggtcgagggcggtgtcgccggcggtctcgtcccgctggacaacccgctcggcaaggcgaactacgtgccgttcctccagctgcagcgcacggtcgcggctgcgtccggggtgcagctgctgttcttcaccgggattggcgatctcccggccattcgcgccttcgacgccgtcctcgcctgctccaagcgtcggtcgcgaaccggcccgggaacgtacgtgaccctggacgaagccgaccgcccatctcgaagcgaggagattgacggcatccgcctggtacggcagcggacgacgagcgaaccctcgccgtga

SEQ ID NO: 51719 - DNA, 987 bp, Frankia sp. EAN1pec
gtgcgtgttcagacagatgtgctgatcagggcggccactgccatcgatcattccgggccgggcagcccggactggcgcgcccgggtcgccggggcgatcgaggagctcgtagccgccgggctcgtcgaatgcccgaggacgaaggctgggtgggaccgtcgtacccttcccgagcttccgcactgggtgcggcgcagcgcgccgccggtggcagcgccccggatgacggcgaaaccgtggcaccatctcctgcactgggtgcccaccgtcgactccgaacggcgcctcagcagcgccgaacgcggccttctcgacgccgtgaaccgctggcttcccgcagcagaccaggtcccggtcgtgccgatgcgggaacgctcatggggactcctcggcgacgacaaagcgctggagaagctgcgttccggccggttgttcgtcccgggacgtctcaccctcgagcttctgcgttgtcgttcgacctggccgccggtgcagcagcgggtgctcggtgccggaacctggctgatagtggagaactggtcgaccttcgaatcgctgtgcacggcggccgaggccgatggattcgacgggcggatcatcttcggctccggcaatcaggtgggcacacgcctcgccgcgctcgctgacaagggagacaccccggcctcgccggtcctgtacttcggtgacatcgatgtggggggtatccgtgccgcccggttggccgtgacaaccgcacagggggcgggctggccggcgatccggccgtgccggccgctgtacgagctcgccctcgcctccccgcaccggctgagggtgcaacccgcgtcggccgacacggtcagttggacgacggcctggatcgccggcgagctgggacagcaggtcgctatgtgcctcacgcgcggcgaagcggtgcgacaggaggcggtcggcctggagattctcggaccagctccgttcgccgcgctcgtcgcggacgtctga

SEQ ID NO: 51720 - DNA, 1548 bp, Lachnoclostridium phytofermentans ISDg
atgaaccatacactacggagtgatattgtaaataatcatagtactcgtatgcaatatttaaaaaaatacataccattttttttattgcaacaggtatctatgactcaatttaaggatggaaaatacgccattgttgacatgggatatgtcacaatggctcttcttcgttattttatcgaagagaaccactttaatgaaaggagtgttacctatcaggaagtagcagagtttttatcggaattattaagaaatgatttttccttatccttctatggagaggaagaaaaggaattaattgattacctttttgataagataaaaaacgatggaaaaccatttgttatggattattttgatccggtagaaaaaaaacaaaaaacaaccagagtaaaactaatagagagtaaattactagctggaagtgtagtgtactctgttaccgcagatgcaatcgagttttatttagaaaccaaagaggtgaaggaagaaagtaagattaatatccaacagctcttactggaaaagatgattgagaccaagaattttaagggtggtacggaggttgttagacgaattaacagtgaagtcaatcgtcttagacttagaaagcaggaagtcttaagtttattaggtatcaatgtgtttgagggtgcaaaagcgttagaagattttcaaagaacgggaatgcagtggtttgacagagagcaaaaggcttttattcgaaacaaggagttaacggatcaagcgcttaaaaaagcaagtgcagctggggttagctaccaagcttctttaaaagaaatctatgagcttgagacagaactaaaaaaggcgatgaccaatcacagcaggctcttatcggattgtactgagcttcagttgcgctctgatgaaatgataagaaagcataaatatagtcgttttagaaatgcttttgactttatggattatgtagaaaaggtgaagaataaaaatgatgtatccttattaaaatctatcgtttcacctttattttctccaaagattacaaagacattttaccttggaaatattgatgaactcctaagctatacaggtcaaaaagaagaagtcggtgaaaccgttttagaagtggacgaagtgatttatcaattcgatgatgaagttgaggaagaaagaatatcacaaaattatgaggcgatgataaagacgctacttgatatgctgcttgtaagggaaaatttctcactagcacaattcaatcatgagcttgagctaaaattttttgatgatatctttaagaatagcgattattactccttcttagttcatctaagtcaaaaaaaggagtatgatctctcagagataagaaagcgtcaggataccttctttgatgggttcttagcgagctttcttgaggaagcaaggcatgagaggtaccgaaaattgcgcttttctctaaaacttctatcggatcaggagggagaagtagagaaggttacccacttaatcactgatatttcggggaatcgtgagtttgttacgaccaacattttatttgtacgtcattag

SEQ ID NO: 51721 - DNA, 741 bp, Lachnoclostridium phytofermentans ISDg
atgttaaataataaaaatcttgcaaaggccatggaagtttttcaggcattaattatcggagaagaaattagcttggagactggaaaaaatgcagattattatgaggcttacagtaacaatgctgaagttaatgatcttgtggaacagatggcgaaagggatgaatttaaaaatctacgattataattatagcctttttttaactgctggagaccacaatcgtgtatttggatacacaaacgaagaattaaagcgtgcgatgggactacgtctcaataaggagctatatctttgttactttatcatatacaacattatggttagtttctatagcgattctgcaacctatacctatacagagtatgtaagaattgaggaaattcttgaagcaattagccgaaaccttacaaatatgattcgtaacattaatatattagtacgaaatgaactagaagagagcagttttgaaacacttgcattaacatgggatgaactaccggtggttagcagtgaagatacgaatggaattcgtgctggtaggggttctaagtcaggttatgtaaagcttgtatttaactttcttattcttcagaacgtttttgtggaagcgcaggagaagtattatccaactaaccgttttcatgcaatggtaaaaaactactttgaagaagaaagaggcagactgtatgagatgcagcaacaactagaggaaaaggaggggcaggaggatgccacacattaa

SEQ ID NO: 51722 - DNA, 4425 bp, Lachnoclostridium phytofermentans ISDg
atgccacacattaatcgtatccgtgtaaacaacgtaaaatataactttggtacgcaggcgtatgatgattttatcatgaagcccttctgtcacaacacactctatgaccttgcaaatggcggtggtaaaagtgtattaatgctacttatgctacagaacatgattccaaattgtaccttagatgaaaaacagccgattgaaaagttgtttcgtaccggggacggaagccagaccatccattcattaattgagtggagattagatgattacgataccgaaaatagctttcgttatatgctgacaggattttgcgcaagaaaagcaacgaaccaggtaccagaagaggtaaaggataccgcctcgattgagtactttaattattgtgtgttttatagggaatataatgaaaatgatattaaaaatcttccacttgtaaaggacaaagagaggattacttatacaggacttagaaaatatctaaaggatttagaacgtgataataattatgaggttaaaatttttgaccgtaagaaggattatcaggcattcgttgcttactatggaatttatgaaagtgaatgggagatcattcgtggtattaataaaaccgaaggccatgtaagaacttattttgaaacaaattataaaactactcgtaaagtagtggaggatttattaatcgaagagattattcaaaagtcctttacacaaaaagcaggtagctctgaggaagaagaaacgatgtccaaaaccttactcgatattagagaaaagcttttggaattatctcgctgtaaggatgaaattgcaaattacgataaacaaatagatgtattacaaaatttctcccatcgtttagagggcttcgtcgatttatatcaggagaaagaacagtgcgaagaggaattaaggaaggtatatctaaaagcttccgatatgacagaggagtcgaaagcaaaatacgaaaatctaaaaaatcaggtaagagagagtgaagaaaagcgtgaggatttaaaaaaacgcctcgaaagtatccgagtatttgaaacaaagaaagagacgattaaccttcgtgagcgactagaaaaaactgaagaagagtatcagattctgcttgacaagttgcagttaaatgaagctcagttaatgaaaaaggaatcaatgaatgattaccttgaatatcttagcgagaagcagaagagaaatgaggtattagaatctattcgtgcggttcaaaataataattctgacctgctatcggagattcattccctagtatctgaaaagaagaagcgcctagatgcctatagaacagagtgtgtttatttcttggatagccttaaccttgagataattgaagtacaaaaggcgcttgaggtcgtaaatgacaaggcactatctggagaaaaagaatatgcggttgttacccatcaattacaggtgctaaatagtaagagacaggagctaggagaaaagattacgacccttttaagagaggccaatcttttattaatagaggaaaccgaaaagcaaaaacaggaaagtgaaacaaaactaagttcacttagagaaaagaagaaggtgacagaggagaaaaagttactagaagaagcgtcctatcaggaagcaaaaatcagtgtagcaaagctctcacttcaaagtactacctataaggatcagcaagaggaagaagaaaaacagattgaaaaaattgttatagagcgaaaaaaattagatcaactacttcatgcttatgggcaaagtggacttaaagagttaaagcaagagatttacaaacgacttagaaaagttattcaaacaattgcttcagaaaaagaaattgtgttgaaactgaaaaaagaaaaagaagacttagagttaggacgtttctctggcaatgaaggggtgttacagctagcggcttcaacactgaaatcacattatggcattgatgcagtgacaggggtagagtaccttcattccctagatgcaaagaaacgaagtgacttaagtttaaacctaccatatcttccatactctatcatccttaaaggagaagtaagtacagaagaaattatgctaaaagggaaagaatttgaggaatatgtaatcccggtaattctggaacaaagtttagattgggtagataagttatcactaccaaaaggaattagcttattgtcaaaggatcagagtattctttttgatgaggaacgtattaaaaaggaagttaataaacttgaggatgaaattaaggatagagaaaaccgcatctatcgattagaagatcaggaaaagacatattcagaagatgaggaaaaggtgtctctctatcagggaaatcaagaagaagtatatgagcagttgatggaaagtactaaagcacgaaagcacaaatttgaggaagtagaaattgagcttagaaaaagacgtgaagagtgtgaagagagagaaaatcagatcatagctttcggtcagttagttgttgaaatacaaaaagagatagagtcaacaggtagagagttaagaaatttagaggagttacttattcttaagaaagagtttacctcttgtgaaactgagctttttagggaagaaacaagaaaacaaaagataaaagaacttttatctcaagtagcacaagaaaaggtaatgttatttgaaaaaggtaaggagcttgaatctgttagaaattctaacaaagaagccttaaataaacaggaactcttatgggaaagtaaataccagatttattataaggacggggagcataaaggaatatctcttacagaagaagagctaacaacgaaactccatggatgtttatctgcgttagaatcaaagcatacagatttagaagataaaaatcgtttagtaaattcttatgtgaatgctatgaatcgttgtcttaagagtattcaaggtagaagcctctccgtttcattgttagaacagatgcaacaggaaaatcgtctttttgaaacaagcgaaagtgagatttcctcattaagagaagtttgtatatcactggaaaaggaaactgaaagtgcgaaggcaacctgcgatactctccgttcggattatcaaaggcttcttggtaagtgtgatcaagcggttagtgcattaaaagaacagtatggggatggtccttttgagtcttttgatggctttgacttagaaagattagcaattgataccaaagagcaatttaatcgtttagaagcagaggcaaagaaatatcagagcgtattggaagcttgtaaaaaagaagaagcattattcgaagagatgaaaaaagacatcgttcgtatgcgaaaagttgcagatacgtccacatttgagaccaccatagactctaatcgagtaaaatacacagggcttagcgcagatgagatattctcagaattgaaggagcttgagtcacatttcattgagaatgaaaaaagtgtaaaacaaaagcaggaggaatttgctcataataaaggtaagacgatggattccttaaaacttctaggtgccgttatgttagcggatgagataagccagaatgtaaagcgtccgaacacagagtctgagaccagaaaattaattaatagccttagtgaggtcaatgactgtttaacgttagaaaaagaccgtatctttaagggaattgaagatatgcaaaatatcaaagacaactttgaaaatcagtgtttacagcgttgtatttatattaaaacagaactggaacgacttcctaagctttctcgtattactttggaaggagaattaattccaatgatttctcttcacattccttatgtgaaagaagagttttataaggataagatgtcctcttatattgatgaaattgtaaagggagcggattctatgaaggatatcaatgataaacttaagtttattcgcaacgcactgtctttaaagaagttattttctgttattgtcactgatatgaatgcaattaagcttagtttgtataagagagaacgtatcaaagaacaaagccgacatcttcgttatgaagaagcggttggaagcacaggacagtcacagggtatctatacacagtttttaatttcgattattaactatattacgaatatcaattctcataggacagaaaatagtggattacgtaaggttatctttattgataatccattcggtgcagcaaaggatgtctatatctgggagccaatttttgaacttcttaaggcgaatcaggtgcagttaattgttcctgccagaggtacaacaccagcgattacgagccgatttgatgttaactatatccttgggcaaaaattaattgatcaaagacaacaaactgttgtggtagattatcatagctcagtagaagcaagagagactgaatttactccattaaagtatgagcagacgagttttgagttttatcaataa

SEQ ID NO: 51723 - DNA, 1467 bp, Escherichia coli SMS-3-5
atgtcgctagggtttttggagcaggctcgtaatgaatcaatggcacgtcgtgagctgtctattcagtctcacgccttactggtcgtgcggacgctggattcaatatatagcgcccttcagcgaaatccgttcgatggtgttgagcttgatgcgctggcggcaatcatgtatctctttgacgccatgctttattatgctgaccgcgagcgccagcctggaatgacgcgtaaggaagcggagttatgtctggttgggcacctcaatgaagcctatccgggacaagaagaacccgactacgcacaagtggccagcaagatttttgcggcgatcaaagatcctttccgcctccgttattatgatttctcgcaacgaacgcattccgaagagcagatagtccgtctggtacgctatgaccagctatccggctcagatgatattctctggtcgctgactgatgaaggaatgttgttctataccctgcgcttggatgaaacgccgatagaacgcgctgcgattctggcctggcgcacgcttaaaaccatccgtcgcggagagatcgacaaggcagtacaccagatccaatcaacacagcggcaactggagcaatatctgattggaatgcggatgaaagtgcgtgccgcccagtctggtgatttgagtgcatcttatgcacacgatatccgtcccgtactcaatgattcctttgataaaacccgagaggttttggaacatatccagaactcaatgtcggccattaccgaaatgctggttgaaggaagttcgaaaataaatcccgacaaattaaataagctacgtagggcacaggagatttttgctgaggtctgcgcttttacgcagcgctatcaagactgcttacttgatgttaacaaagattttgagcgagctcgtctgaaactcattattcccagagataataccctctttcgggaaacactggaaaaaggtgcactcaagcccttgctgtctcattcccccgacactgtcgaaaaggaaatcgatgatctcaccgcacgcctgttggctccccgaagacaggatgatgatcggcacattctgtttgaccttgaggcgctgctgaacctttatctcgatagatttgaacaggcgcttccacatgagatacaggacctcaccgatcagcctgtagctattgaaaccaacctgcgaggtatccctgaatctgtcattaaaaaatgcagcgattgggttagtgaccgattgaagaattgggggcatgtgagctttagagatgtttttgacgcctatgagggcgaagaattatccgaacaagagcaacaggtttgtttactccatattggcagcctggcagctaacagcgatcccgcaatagaagtggagatagacggcgctatcgaaacaacgctctggcgggctaacaatatcaaactgttaacggttgctcccttatacccctttgaggagtag

SEQ ID NO: 51724 - DNA, 4437 bp, Escherichia coli SMS-3-5
atgtggctgattaaacgggtttatatggatggtgcaggccatgaagaagctttctacaaggacctcacactggactatattggcctgtctcaagcggtcagtagccctgttgttgaaggcctgcgctcgcccgtcaggaatgcgaaggtggtgaccagtacttatcagcagcttgtgaatgggggtggtaagtcgacctacatcgcgctgctgttatcgatttttgagccgtccgttagtgacttcacccaatatctggcaaatcatcgccagagtgaataccactaccgcaattacttctataaagaactctctgttgttttggttgagatggtcaatgaatcaggacaaacgttattactaggacatgctcatcagcgtaatggagatgatgttgaccgcacactgtttatttgtgatgcgcccgactccctgatgggcgcgccgtttgatgaagtcccttcttattcccgcgcggaacgcaattctgagctgcgcccctatgccaatagcctgcgcagttttgatagctggcttaatctcaaggccggtagtgaaggcggtatgcattggcgtaaaaccaccagacagaacgagtggcgcgcatttttactggaacaacaaattaacgttgatcttatcaaaacaatggtgaccttcaactccgaagaaggtggcctgacccgttttatcgaatacaaaactgaacatgatttccttggcgcgttcttcgcctgcaccatgtctaaagatgcggctgagcggctgcgggaactggtagcgcatgaagttgaacgtcagggagagttagaggggattcgtcgtaacgagtccttcctgaaggatgtgctggctaactggctggcgtttcttgatccggctaaacagctggaaagcatccaggcacagcagcaactgctggatgatggcttccgagaagcaatgcgcgatctcgcagcctttgtcggggatgctcaggttgaacagacacagcttgaagataacatggatagtttgcaaacgcatattggccaggcgatgtctctgcgtgagcagttaggtaagcgcagagcactgcttgaatatgatctcgtgcagcatcggttcaacaaacaaaaagcgatagtcgatgcgcttcaagacgaggccgataccaatcagcgccagattgagattactcacgctgctatagactacaaagcctatgctaaggccctgaatgagtaccgccaggcagatgaagatctgaaggtattccaaagtgaaacggaaaggccgctacaggtgattttcgagcgtactgctggcgaagccttgggcacattagagtgggcaatcgacagacatcgccagcaggaggctacgcttgaggaagaattagggcagatggacagggaaagccatgtcctcagacagtcatacgataaaatacaaaagacgttgggtggtctggaaacggagcgtgacggatataaaagagacaaatttcagggcgaatcgcaacggaatgaattatgtgaagctgggttgatccagaaggatgaaacaccagtagcagcccaataccgactggaattaaccttacgcgatgcaaagcagagtgaagaactggctaatacaattcttcatcagaaagagcaggcgctggaagcacagctgaatgttgtgcgggaggcatcaattgagaaaagtgaggcccagcaaaaactcattctggctgaacaaaaacaccagtcggctgtggatagtgctttagttttagcaaaaaactatcaaaaactgccaacgtcaacgcgacatgatctggatattgaagacacgagttggcacagcgagctgtgtggattgcagctcgacaaagtattgaatgcgaacgctcaaacgctgaatggaatgaaagagcgtttactgcaagcccggcacgaactggacgagttgagggtgacgggacatgaactggttgctaagcaggtcaatgaggcacttgaagcgttttatgctgcgggcattgcacgggataagctatggacatttccacactatttggcctctgcttacaacgatgatgcacaaaagattgcagcggtgatcgatcagaaccctggccgctacctgagtctggtcgcactcgacaatgtaacgtttgaacaggtccataaaattagtgagatcctaccctggaagaaggcacctattgctatttacttgctggatgaagcacaagatctccgccgagaaacgtctgaattagtacaggttgtcctctcaaaccccgataagcacggatatagccaggccgcttacgaaacccggctgcaagacctggagaatactgtagcgtcgcaggaagtcagtgtgaaggctacggagagcgcccttaaagtactggaatctttcaggaatgactggagtcggcattacgaacagtatggtaagcattgggcgggactgcttgaccaacgggagctggctctattaatactggaaaatgctgatgcagcacttaagcaagctgagcatgatgagcaaacactgcgtgacgagaagagagatgtccaggtgcgtttaaacaacgcccaacagcagaaaattcaggcagaaaaagcacatgataaagtgagtctttttgtagaaaaagaatgggcgaagcgtgaaacggcgataatgaaactggagcagttagctgcacagattcagcgaagcaagaacactctttacacccagagagagaggctggaacggctgagcgagctcgagaagaacaaacgctccgagaaaacccttttaattatccagataggtagctggagtaatctgtgtaacgaaccgttctattcagagattacggcgactgaaggtatggaaggacgaagccctgaatatgcccatgagatggctgctcaggcgcacaaaaaattgctcgaagcagccaacggtgatcaagtgaccgttctcaagcaacaactgaaagatgctgaacaggtacaacgttacgcctctgatcgtttgaccgctcaacccacctacaatacatatccggatgaggtaaaagctgcggccatcaatgagctaacggtaattaataacagcatcgtacgcctcaaagaacagcaaaagcaattcacgcaaaatctaattagctctcaggtaactctgcaaaaattttcccaaagctgtgaggaggctagtaaagcacttgacgaggattttgtctgggaagagaagcccattgagatagaggcaatccaaacgtctctggctgaaatcgtcaataacctttatgcgattgaacaccagatcaagttcctactggaacaaaagacactgctgttgagaaagattgaaaatgtgaaagagcggctacagaacgccaaaacagctcaagcgatgatccagcccattacgccgagctctgccgcaggtctacctggtaggatcctgagcatcacagaatatgctgacgatctggctgcacaatgccaagtgtatgccggtttaaatgaaacgctaaaacagcaaaatatgcgcgtctctacggtctggggaaaattccgcaaacgcatcgaagaagagttggccaaggatccagacgcccgagccagtcaggaatacttacggcagttggactcaatcgcaacttatcatgaagtgctgggcgatttggagagggtcggtacagggatctcgcaggtattcgaagctgtgcaggacagcctcgagcaattccaacgttcgattgatctgactgtcacccatctgactgctcatctggaaggggcgattaagcttctcaggcgcgcgatgtcggtcaaaattcctgaggattgccccgtactgcctggtcggcccattattaaaatgaccgaccggttgaatgatgttgccgctgatctcaggggttttgccagcagccgcttgcagcagtggatagccaggggacagataccccgagcgcccaatcgggacgccttgacagctgatttggttcagtcggtatttggcgaaggggaactggaggtgcgtttgctgaagacgaatgccagccgtccacaatggactcctgtcacccgacttgaaggttcgggtggacagcgccttacatctgcctttttactgtttgtgacggttggtaaagtacgagagtacgatacgggtatttcaagtgcaggattcttgttagccgataacccgctgggtaaatcgaatgccaatgatctaatgcgcattcaaacccaaatggccaaagcctataaaatccagctcatctacctgactggtatttcggatgaaaacgcccaatcaatgtttgataaccatctcttcctgaataaagttcaaaaactgaggcggcgcgatttggtaaccgttgataaagaacgccatgccctgtgggcggcttctctggctgctaagccacagttcgatccagtcatttaa

SEQ ID NO: 51725 - DNA, 1056 bp, Escherichia coli SMS-3-5
atgagtagcgtaatgatctggctatcccgactggagtcgacagccaataaacatcgtcttgccgctggtaaggccgcgcgtacagtgaaagctaatgcggtgctggatgaggtattacgcgcacacaaccaggaggccttgagccaggaggtgcctgatttgctgagtcaggctgttacacaactgcttgagagggactggcgggctcagcctaagcacaaagcgagttggcagcgctactggcggggtatgagcctgccaagtacttttgtttacgaaggtgccatcgttcctacgaagacaacatcagaaatagcctggcatccctggttggcccgacgtattacaggacaacttacccagccaatcaaggcacgcttacaacagttgaatacatatctttttcgccaaaccgggggcgacaagtcgctattcccgggcttgcttggacatcgtgagcggtctctgcttatatttggtgacgaaaaagctctggactccttgccacctgatggctggaagcatgtcactctgactttggctgatatgggcgcgtttcgacgtgcgccgcctttaccgtatgagtcatctcgttgccatgatcttccggctatcattgttgaaaactccgatgtgtattatcggctatgccaacttaatcgagcacagactcgctggtcactggtcatttatggcgcaggtaacaaagtttccggtcaggcggaatgcgtgtcacaactccttgaggtcgaacaggtagaacaactactttattttggcgatctggatgttgcgggcttaaaaatcgctcatcagttgcgttgtaagttgcttaatgattacggtatcagcttgcatttagatgaatggctttataataaactgatcttaaatggcctgatgacagcggaagggaacgccaacaacgaacggtttgatttcgagttacagtgtggctggatgccaaagtttgttttacgagaaatgaagactcttctggcgatccaccagcgtctaccccaagaaggtgtggcttctttaggtttatttatatag

SEQ ID NO: 51726 - DNA, 1449 bp, Desulfobacterium autotrophicum HRM2
atgatagaatatcccaatgatcccatattccagaggtcgtatgcccttgcaatcacgaagcctgtctgtcagttgcagccccatcgtgaaacatctcctttttatgttgtcgatcatttttcgctttttgtgaatacaattgagttttgtctccattcccttgcccttggcagccttgacagtgagttacagcgggatgacctgaaaaataaagttttcagtctgatccattttcagtttcaggcacttaagaacgaaaacccgagaacaaaaatcccagggccagctgaaattgataaatattccagcgaatttatcaatacgcttttgaatgtaaaaaaaggcaaggagtttaccgatcgtatttattcgatttccgacaatagattctatgaaattcgattccggctgttatacgaactggatgcatttgacggttcattcaccattcagccatcggtggaatgtatcaatttatacttgcaggccctttcccaacccctgattgacaaaaccattgcaacacaggccattcttgaacaccagcttagatcaggaaaactgagccaggccattcagaccgccgaagagcattataaaatcacgcttcagcagaaacagtatctgatggaacttaagacgagcatcagtatcaatctgaaaagtgttcattggacccgggacattataccccgggttgaaggggcagaagaaaatcttgccctgtttctggattcggataagcgtattctttctcatattgaaaatgatcccaaccttgaaggggagagtgtcgaacagctggccttcatccgcaaaaaggtcatggactgcgccaacacctacagccaattgttaaccgaaattaccaccatgggttcccatctcaggaaagcccaggatgaccaggcatttattgattcatcccggtatgaacatctcccgaacattatcaacgacattttccttcctttaatgggacttccgaaacaattgatccccacgttgaacgagaaactttttccagccattattccgccgtccctaccctacgtggatgatcttacctttatcgtaaaccgtgcgctggttgaaagaaatatggatgaaaatgccgtccctgaacaagacgagttccaggaattcctacgggaggaagaaccgcttgtttctgaacaggatttgtccgagatcctgtctttgctggatggtatttgcctaacccgggagagcgtgcttctttcgaatttgcttgatcatcttgttgacgaaggttactcccaaaaagtagccgctgttttgcttgcacattttatatttcaggcgcccaggaactaccacggatttaccgcagagaaaacagatacgacatttaaatttgaaaacttttcatgcgatgatgttttgttgagccggtcgataatagaaaaggcagaggaagcgttatga

SEQ ID NO: 51727 - DNA, 4431 bp, Desulfobacterium autotrophicum HRM2
atgccatatttattgaatacatggttttcaagggcgggacatccggctgcacgcctctatgatctgaaggttgaatgttgcagcccggataatgcatcagagtatacagataccattgtcatggcggaaaacggtgatggaaagagttccatcattcagctcattatttcagtttttattccaaacaagcgcatgattaccggtggtaaagggtttgatgatgttcgcaccctggattcatactttaaagccggtgaggtggcctgggttgtccttgaattcacggttgatgacaaacaggagtttttgtttgacgataagcccactcgcattgtcgggttcatggcatacaaatccaccgttcgggatgatgccggcaattttgaattaaaaaggcattttttcagttttaaaaccggatccggcttgtccgctgatgatatccccatgaaggagaaaatatcgtatattgaagcgtgtgattgggcgaatggtattttaaagcagcatccaaagtcagagcctttcagccacaagcgccagtcccaatgggctgatttcctgaaaagtatcaatattcatccggagcttatgaaaatgcagcttttgatgaataaaaaagaatccaatgcagatgaaatcttgaaactgtcaaatatcaatgaatttgtggatcttgtgctgaccccgctgatagaccccgaaagaacaagcgcccttccagagaccattgaggcccaccgtaatgagcttgccaacattccgaatctgcgaaaagagcaagagtttatgaataaattggcccggcaggtttctttacttcaggggccgggcaagaatgtaaaacgccttgaaaaagagatccatggatcagaaaagaaaaggggagagattgcagataaaatatccaacacggttttccacctcaaagaaaaatcttcaaaacttcaatcagatacgcttgcctcaaaaaatgaagtaaatacggtaaccgaccaaataaaaaggcttaatgccacccgtctctggtttgaaatgaggaaacttcagatcctggaggagaatgccaggatagatgaagcgtcgtcaaacaaaaggttggaacaggccgaatataaactcaaattgcttaaagccgcttcgtgcctgggggaactattaaaggtccaagccacgatccgttccattgatgaagccatagccaaagctgatctgcccgcaaaggcaacccttgaacaactccatggggttggagccgccctttataccttatgcaacaaaagaatccaggcgattgatagggaactgtctgatattcgcaaaaaactggcagacgcccgcaatgaacaaaagacgctggtccgcagggagtcatgcctgaaaagtgacaaggtgcataacagtgaaatcatttccaagattgaagagtggttatcagaggcaaaactcgaactaaatcatcttgtggaatcaggcgtgatgctggcccaggaaaattttgtacaaggcaaagaccggtgtttaagtgaaatatcggacacggaaaaatccattgaagacaagaaccgttccatggggcaattggaagagcggctaacggctcttaacaaggatacatttgagagtaaggttaacaaggaaaattgtaaaaataaaattgagagaatcagggaaaagattaaagattacagggaaagccttgcaaaaatagagcacaatcagactcttatggaactcgaaggcgtggatgttgttatcccctatgacgctggactctgtgcacgtcttgaaaaatatatcgacgaacaaagggctgaacatcagatattgacaacagccctagagtcggatcaattggatctggaagcccttgagcagaattcggtgcttccgccgtcaaaggatgttgtccgggtccttgattatttttcacaccaggacattgcctgttttgggtttggacagtattttgcgcaaaaccgggttcttgcgcctgggaaagtaagagaacttttgtcccaacaacctgccaagtacagcggcattgtttttcaatccccggaggagtttaaaaaggccaagaaagtgcctgccctggcgcatttgcgtgggccggttgaactgaccctccagcaagagggtctttcggtaaatagcaatttttcagatggtgtccataagcacgtggtgctgccggataccgatgcctctttcaatggagacgccgctgaaatctacaaacaggaactgaaaaaaagactttataaaaatgaatccagattgtccgaggtcaacagtcgagcaaagagcgcttctaatattttccatcatttaaagcgtcatctgtcaatttatggggttctgtcattggaaacaatgatttctgatttgtcagctttaaaggaggatttgggtaaaatcaaatcccgtatccttcatatcaacgcacaaatagatgacaccatccatcttaaaaaaaccatggaagttgaaattgtttctttccgagaacagcttggagaaaaaaagaatcacctgaacgagttccgtgtctatgaagaaacctatcaccgcaaaattgttgggcaaaaggagattatcgaagagaaaaagcggaaaaacaaggacatcgatagggcactcaaaaagatagtggcggatcggctgccgcttgacagccttattgataatctggaggaaaagaaagagcggcaggtcggtctgcttgaatcaaagaagatagataaagacagcatccagtattatgacaggcaggtgggtgatggcaaggattatgccgaagttgatcaccatgaattaactgaaatgtacaaacgaacaaaagatcaatatgagagccagtcggaccttactgccaaattgaggggggaaagggaagccactgaaaggcaacgcatgggcatggaaaagaaatatgccaatctcagggggaatctttctgatacagaggtcagggaggcttttgagaccgacaccccaggcattcagcaggagagtatttctgaacaggaaacttttgtaaatacgttaagggagaatgccggccagaaaaagcagcaatacaaacaggcaaaagagaacctgtctgaatggcgcagtcaatatcctaccattgaggaaccggtggaggctgggcctgtctcaaccgttgaacacgctgaaactgttttggatcgccttgaaaacgagctggttcagacgaatcatctgcttgaagagaaaaaatcgacccatgaacagtttaaaataatgcacaacaactgcctgggtgacatccgaggaattgagcctgttttgcagctttcccttccccatgccaaccatcaggataatggggaccaggttttttccgacattgaagaggctggccgtgcctggacgcaaataggacaaacaattgccgacattaatggggaactggataaatcaaaagacgctatcgccgggattacccaggcgatagacagaattctccatgatgaatcctatcaggatattgccgagaaaataaaagcccggattcggaacattaaagacagcctttaccttcaagcagagcactatctttctgaaatcatccagcgggtggatagcattcatgacaccatcggcaagatggataagcgtatcgagacaatcgttgaaatctaccagcaatatgtgaacgaggccctggcaaatttcaaagcccttgaatcctcatcgcggtttcccgtgaataccggaacctgggagatctggagcaaggaaccttttttcaaggttcagatgaaccccaaggtgaagaatccggactatgtccgtacccagttatcctcgttcattgaacagatattgagaaatccccaggtgaaattgagttcaaattccgtacaattgattctacggggggtacatgaagtgattgggggtaatttctccatccgggcgctcaaggtccagtcaaatcccaccagggaacgggatgacattatgcagacactggcccattcagggggagagaaagccacggcagcgatttatttatatacaacactggcccgtatggttggcaataactgctaccagcgcaaaaatttcccgtcttttttgattctggacaacccgttcggtcaatgtaacaagtcctcttttttgaaattgcagagggaaatggcgcgtatatcaaatgttcagctcatctattttaccggcatcaaggacacgagatcgttaagtgaattcaaccggtttgtgaccttgaaaaaaacagaacggaccacaaggggagaccagcgtgtccaggcggttgaaacccgttttgagtcaatcaccgcagatttttccccagacccgataacagatccttttgcccctgtgcttggcatcaaggccggtgccgatggcaaaaacacggaaagaatcaattaa

SEQ ID NO: 51728 - DNA, 1011 bp, Desulfobacterium autotrophicum HRM2
atggatttaaccacaacattttttgaaaaattacccgataaacaaaagattgatctttcagaactgtgggatgtttttgaaaaggtggtgccggctgatatgtgcctgaactcccggaaaaaattatcggagttgatcgacaatatggtaaacgcccatgggctggaactgccaaaatccaaggcgcagtttaaccgttcggcacagcccccattgcccaaatttatcaagcgtaaaccaaagcatggaagtcaccgggaaaagctaaaccccaagcattctctgtggcatcctaaattggcgtttcttccagaatcaaggctgtcctcttttgacaactggctcaaggtcgatgggtggttaaaaaacggcgggcttgaaaaagaggttgtaccggtaaacgagcgctcctatgagctctttggtgacgaaaaatatctggacaaacaattttcccagacggttccttttacaaaaggtcagttctcccttgatgaccttcgctgccggcgtatttatcatcccctttcctgggaggcaggtcctgaaagcgcaaggggtaaaccctgccttgtaattgaaaatatggcaacctggttttcattgaaaacccttaatgatgagcaaggatggtattcgtcggttgttttcgggtggggagcaaaatttgagggtaactgggtgaaccttgaatttattatgaaaaagtgcaggttttcagaggtctgttattttggggatatagatgaaaagggcttgatgatccctttttatgttaaaagccgttttgaagatcaatttgatatgccatttaaccttgaaccttttctgtatgaaaaactgttgtctctggaagttacgccgggtcccgacaagagccataccggaaaattcgattttaaaaaaatagcgcccatcattcctgaaaagatccgttcaacggtcttggatctaatccaaaataaaaagcgtatcccccaggaagcgctccaacctttaacgatgttgtaa

SEQ ID NO: 51729 - DNA, 1548 bp, Kosmotoga olearia TBF 19.5.1
atgggtgagttatccgggttttctgacagagttaagggtgttgctatttttcagcctttgctggagctgaagaatcttcgaaagtatgaggactttgatcttttttctcttggtttttctatcctcctctttattatggaaagtatgctgtataaccgggagcgttgtggttatcccgagctttcggcctttctccgggaacaggtttcgattaattatcgcaagattttatctgaagaagaaagcctggaactggcgaggtttcttatggatcatctcaggaatagtggttctccatggtgctttgaatatctggatctggaggatgggaaaccgaagaaatacaggttccatcttattggtttagctgattacgaccacggcccccatggtgacagggatatttattttaagctcacagatgagggacttgatctcatctttaaaacgaaagagatttataaggagttacggataagtatttcccaattgtatttcaggcagcagattgaacgaggtgtttttgataaagctctggagactgtcagggagctgtttacccaggtcagaagccgtatggacgagatggagaaattcaggcgaaggatggtcatgaatattggtggggtttttacagaggagtatcagaaacaggtgaaggagatatataaccagttggaaagggaacaggaggtattccagtctctttctgaactggtcaaagaaaagaaggaagcttatttgtatgagaggttggaagagattgaggagaagaatcttgaccaactcattgagatttcaaatatgctggatattgtgataaatgagcatagcaagctgtttgggatcaagcttcggacagatgaacagttcaggaaagccctggcagagagtatccagaattttatacaatcgaagattgatttcagaaaagagatacttgagaaggtaattgcttcggaaacccggggtgatgatctgagaaggcttttgcagcctttactgactccggccaggttcttgggcttcaatcctatgaggatttttatcccgcagaggcttcagcagaaaagggaaggtttcagcgaggaagaattgcccgtggatcagagttttgcaatggagctggaaagggagttgaaaaggaaaagagagagagacaggagattcagagagtatattgaggttgtttttgagcctttgaagtccaggaacaattatactcttaaagaggttttggaaggtctttctcagcagaagagggaagagtttagtaacagagctgagttttacagttttcttgttggtttgcaccaactctcgcctgtggagctgagggttgattctgaaatcagggataaggttttcgattctgaagataatcttccttttctgcttctggaatatcttgagaatcaaaaattggacagagagaagaggttccttgaggttcaagcaacctgtgaagagttgagttttgagaacggttgtgtggttaccaattatcgttttcatgttattgaggaggatgaattgaatgtacgatag

SEQ ID NO: 51730 - DNA, 717 bp, Kosmotoga olearia TBF 19.5.1
atgtacgatagttataccagggaagaggttgaagcggccttcaggatttatcttttgctgcagaaaaagggagagttgagaagacgggattttatggacctttttgaaaagtacagcagtaatccgaaggtgagagatatttttgttagtgtatttgaaccgatggcagaggcgaaggtgctggaatccgaagatgtgctttatcttgtcccggaaccggatagtgattatcttagttacaataacgagcagttgagggaattgatgcggctggacaacaatacagagctatactgtgcctattttgtgattttgtgtttgctttcggaattttttggtgccgattttctggatgaagtcctcagggaatatattctggtgaaggatcttgaaagggttgtttcggcttcttttgaaagtatagaacctcatatggatgaattggaagttgattcggggttcaatctcagggcagcttatgaacactggaaatctatggaggaatacagggaactggaacggatgaaggcgagcaagacgaatcgatatagttttattttgagggtttgtagttttcttcagtctcagggattggtgaatctggttcaggaaagggagatatatatcacccggaaaacggagcttatagtcaggaatttttacgcaggtaaggaaacgaaggaaaagcttttgaagttgatcagcgggaggctttga

SEQ ID NO: 51731 - DNA, 4368 bp, Kosmotoga olearia TBF 19.5.1
atgccgagaatatggagaatgagactggttaatatacagtatgatgccgggaagaaggttttcgcggatgagctttttaattttgggggcaagaacactctgtttaatctggcgaatggaggaggaaagactcttctcgtccagcttatgcttcagacagtccttcccaatgagaggctgaataagaggcgcctttcggatctgcttcagaacaggaattttacagggcatatagccgttgaatggcgtctggattcggctgaggctgattttttgcttacgggtttttgtttcaccagggggaatgatgagtcgggaaggttgagatattttatgtacacgagtcattataaggaagctaatccatatgatataaaacacttcccctatgtaaacgataaacgtcccctcagctatgacgaactgttgaggctgttgaagaatttgaagggaagttatttcaaggtgttttacagtgattcaaagagaagcgattatcttcgggaattgagtacttataatctcttcgagaaagagtggagacgtattaaggagaccaataacaatgaaggtggaatagatgattttttcaatagtcttcaaagtacggatcagcttctggataatcttttgattccggtagccgaggagttgttttacgatgatccaagggaacaaaaagaaaatctggtggaggctttcaacaatctgaagaataagcttttgaatatcccggaactggagagaaatctaaaggatttggcccttgtaagggaaaagggacaggtacttcttgaagctttcagagagcgtgaagatgctagcagggagtttgaggagcggaaggttaatctggcaatgtattctaactctcttgaacactggcataactgtgttgttgaagagctcaaggagattgatgaggaattgaggagtatagagagggaggaaacgaagaacagatatctccttgagtcggtgaagtattccagagagtatgccgctgttgaggagaaacgacaggagctttttgagatcagttctaaaaaagaggaactctatgaagtgattcaaaaaaccaaaggggaattggatctttctaaagctgtgaatctttggtttgaaaagaaggatctggaatcgaaaaatagagctttgaatgaaagtatcggtaatatgtatctcggaaaggaagagaaactagaaaagctgatgatttacgcggcaactgtttatcaaaggttgggtgaagagatagagaaattggagcggaggctcagagaagtcgaacaggaaaggattgagaaagagaaaaaaaaggaaagtcttcaggaaaggaatcgggagcttaacaggcaaaaaagtggtattgcggtggaaaagacaaggcagcaattgaagattgaggaaagggataagttttccacttctttgtttgagattcacaaaaatgaacgctggcaattgttgccagatgttgggctggaagagtcgcgttctgagtttagcagactggttgaggatctaaaaagtcttgaggttcaaagagacaaccttgaaagggaaagaacaaagattctcgaggagatggatgagttaaagatcagaaaacccgagttgttagcgaggattggagctatcgacaaggagatacagggatacaggaaaaaaaggcagcaggttagagatgtgctaagaaggcatgaaatcagctatgttgatctttttaaggagaagtctctgatagaacttaaacttgagaagctccagaaagagctggaagaggagggcttcgtcaataagtcaagtcttcaagacctcaggaatcaacttcaattgattgagagatacgatttttatgtgccatctgaagaggttataaaactcaagaagtatctggaggattccggggtttcctgtcgaacgggtcctgaatggttgaaattacaggggttttcggatgagaaaagggttcagtatctgaaaagatttcctcttttgcctttttctttggtcgtaatcaaggaggaattgagcaggctggcgaagctttcgattgatgttgaggagtttgccggttcttatccggttcctattatccttttgccgaagggttcgctagacacaaatgatgacaaacagtttttggagatatttgaagggcagtatatcttctggcaaaaggctcatgagtatgcttcttcccgggcatctctggattttgttgctgctgaacttgaaagcaaaattgaaagggtcaaggaagtacttagcaggatagagaattcaatggagaatctgagaggtaccagggagattgtgtacgctttttttgctgattatgcggaggatctggagagtttaaggttgcctgaattggaggttttgaagactgaacttgaggctcttgaagatagggaacatgagttgaaacgagctgcgatttcagcagaagagcgtttgtccgaacttgctgacaggtggaaaaaattgaattcgaggaaggcagatgtcgaggaactcatcattaagttcgaaaggttaattgaactcaacaaacaggcttatgaagcagataaggaattgcgaaggctcaaagaaattgaaaatgcgataggtaaagaattgaaggacaacgatgacgccatctcaagatgcgatgaagaacttaagaagattcacgcgcttaaggctattctggataaagatttgtctgatcgtcggaaagaaagggagttttacagagaaaagggaaagggacgtaatcctgtttcgctgtctttaacggaggctatagactcatacagaaggttggaatcggaactgggaagccatagtgcaactataaagcactatgaagaacaaataagggagaatatcaagaggatagagtctgtggaaaggaaactgtcaaaattcggattttcggagacagagtttgaagaattcactatgagggtttcggatattcagatagaagctctagaaaagaaactcgatgaattggagaatgagtatgtcggattaagggaaaaagcttccgggattcgtggggaattgagggaaaaagagaagaatattgaaaacatgaaaaaacgtatcgtttctgagtattctaaggaaccgacattactggaagaacctgatgaacaggagaaaaggtcgaatgaggatttaataaggcttgatacggataagaaacggtggatggatataagaagtgaatcggaaggttttgaaaaattgctgggagagctcattttgaaagtaagcaatagtatgatgcattataaagttgacagggtggatggaggaattacagatcgtagtttgaaagaggtcaaagaaaagatcagcgacgaggttgatgcggtgattgattctgttggaaaggcttttttgcgtctggaagaatcaaaggagaaggttcggaaagctgttgggaattatatggccgtgtcaggagaggcaaacagtgatattgttgccgggttgctgagcaagatgacgtatgaagattattttcagctttcctattctgaggtaaaagaagcttttgagtatttattcggacaaatttcgaaatatgagaagcagattcatgctgagcttgttcaaaaagacaaagataagaagctgtttgtggaaagttgtgtgaggcagacaaggagacttgcagaggagatagaggctattgattcgtcgtcgtatatagattatgccgggaaacattggaaagctgtacagataaagctggacaactgggatttgccggatatgagtgcgaagatggaaatttatataaatcgttgtatagaagaattgaagactattcccgatgagaaaacccagcaacttgattatataaagaacagactctcttcgaagaatcttttgaatgttattacggatttgcgtagatgcaaggtaagggtgttgaaacccgaagccagagcggagcattcgacgttgcagccctgggattcgatacagaaatggtctggtggagagaaatatgctgcctatgctgctatgttcatcgctgtgataagtcatattagaaagaaaaagagtaatctgagtaagccatggaaggtgctgatagctgataatctatttggaaaggcatcgtcagcccacatacttgaatatgtctttcagattctggaaagaaatagggttcagctcatcgcgcttactgatcacactaaacaaacgatttataattattttccggtggtttatagcttgaaactaagaagttatttaaacagagattatgtgtcttcaaatctggagaagggatattatgatatagctcctcttgaagaagagctccgttctgaaaggcaggagagtttgtggtga

SEQ ID NO: 51732 - DNA, 1047 bp, Kosmotoga olearia TBF 19.5.1
atgaatgtgaagaagattttaatgggatttctggatgaatttggtggggtttttgtagaaagttttgagctggaagagtttttgcgttccagagacaattttgattatttttctttttatgaagcgatttctgagttggtttttctcggagttctttcccctgtcaggaattctggtttcaacggcagaaatcctccactgtacaataagtatcgtaagaggaaacctgggctatctgcagaagatagggagtttcttgattctctggatcctgccatagatacttccaggtatcggaagagtcccgatttgctgaatagggataaaggttttcttgagctgctggataggtttttaaaggcttctgatagagagagtttaagagttccttcttctataaatgaacgttctttcgagattttcggagatgagaagtttctttccagcgcagatggtcatgcgtttttgcagaatgcttcgatttctgaggattttttgaatgtttaccgtacccctgaaccttttttcttctcaagtgattctgcttattctggaagtttgtttaatgtacttgttattgagaacaaggatactttttatacgataaagcgctgtttttttagcaacggatggaggttgctaggtaaggttttttctcatcttgtttatggtgaggggaagaagattatcaagagttttgaatttgctcttgagattggtttgactcctgatagttgcagggtgttttattttggagatcttgaccctgaagggataggtatcttcgagagtttcagagagaggttttctgattatgatatttgtcctttcgttgagctgtatgaggaactcctcactgtgaatttttccagagctccaaagttgagaaggaagcagagggtaagtgctgagaggttttcgaggtttcttgagaattttccccgggaggtttctgaaaggataatggaattgtttgattcggaaaggtatttaccccaggaggggttgaactttcaattttttgataaggtgacaggaaatgggtga

SEQ ID NO: 51733 - DNA, 1539 bp, Desulfotomaculum acetoxidans DSM 771
gtgcatgaatgcctgcgtgatttttcagcaagagtaaagtcattgtcagtatttgagccaatctggcaattaaaaggcttgcgcaaataccaggaatatgatcttgtttcacttggtttggcggtacttttgtatattctcgacagtatgctgatgggacgcagtgagtgtgaccatgaagggataagcaaatttctgttggaagtgatgcgctgtcattacaataaagaattgagcagtgaagaagcggagcaacttacctatactgttttggatcaactgcgcaataacggcaaaccgtttgaacatccctttaaagatttggaaacgggcggctctgaaaaactgcgctttcatctgatagagatagccggctaccaaataggaggaaagattaaatttaagctttcccaggagggtctggatttattgtttaagacaagggagatttaccaggaactgcgcgtaacgattgcacagatttacctgcgccagcagattgaaaggcgggtttttgacggagctttacaagctgtagatgacctgtatttgcaggtgaaaaaggtatacagttccttgcaggatatgcggcgggcaatattgagggatgtccacgccgtttccatagatcggtataaacaactggtcggtcgggtacagcggcagtttcaggatgaaaaaaaggttttttctgaattaaaagaactggtacgctctactgagcaggacattcgctcgcgctacctgcgggaaaaagataggttggctttaacccaattactggaagtggctcggcggctggatattgttgtaaacgagcataccaggctgttcagtgaaaagcttgacttaagcatggtgctggaagagactatggagtcgcatattgcccatgcctttcgtaccaagatcagttttgacagggaactggtggatggggtgatcagtaataatgcttctctggaaaccatgcgccacttaattcaccctcttttaaagccaaaaccccctaagtatttcgacatgcaaaaggtttttgagcccaatttgattaccagaacggttgaggagcaggaagaagaagttgtctccgactatgatccggaggaggtcatggaacaacttaagcgggaaaaagcattaaaagaattgcgggataagagaactcgatattatatagaaatttgtctgtcacctctggaaaaaagcacctcttacaccttgctggatgtgctgcaatctatggaacctgctgcttgtgatgacctgatcaatcgggttgacttttatccttttctggtacaattgcaccagacgggcactttgcctatggaagtaaccgaagagatggaatcaaaaacctttgattcaactgaaggtaccaacctgctttttttgctgctgcaatatttaaaagagaacgagtacctggcagataagggtgttttggaggtatgcggttctgaggatgttttgactttggctaacggctgccaggtgacgaattttgtttttcgggcgttaagcgatgttttgtaa

SEQ ID NO: 51734 - DNA, 747 bp, Desulfotomaculum acetoxidans DSM 771
atgtataaagctgagaatgtaaaggatgcctgcgctatttttatgacacttgtcagccggggagtagttgacgaaaagtcctcccggttattgcaggcatataaaaatgttcccgaggtaagggagattatatccggagtttttgaacctgcagcagaagtcaaggtattgaatgcggtggacaagctgtatatctcaccgggcattgataaccgtgtgtttggctacaccaatacagagttgagggatttgctgggcttaaagacaaatgccgagctttataccgcatattttataatactctgtctgatggctatgttttacgacagcgaggatttgaacgtggttacccgccagttcgtgccggtaatagaattggaatcatttgttactgacaaaacagaaaagatcgggcagttggaggaaatagctgttatagaggaagaattggagttcggtttttcacatgctgtttatctgtggcgtgatttgcctgattatgatgataaattaaagagcctggcaagaagtaagaacaataaggtgagctttattctgaaagtctgcaattttttgcaggcgcaggatttggttatcgtacatcaggacagggagatttacctgcgtgacagactggattgcatggtgcgccgctactactcggatacctcgagaaaagagcaattgttacagtttctgctgtccggcgggcaggcggcaaggagggatcaggttgccgcaaattga

SEQ ID NO: 51735 - DNA, 4482 bp, Desulfotomaculum acetoxidans DSM 771
ttgccgcaaattgagcggattagactaactaatgtcaagtatgataacggtaaaaaagaatttgtcaatgatatgtttttgcctgcaggcagtaactgtgcttttattttggaaaatgggggcggcaagtctcttatggtgcaactgcttctacaagtagtgctgcctaatgaaagtatcggtgtgaggccggcttccgatctggtcagcggcagcgatcgctttaccggacatatcctggtggaatggcgcctggatgacccggaatcacgctaccttttgaccggtttttgttttaccaggggctacgaggatgaaaggctttttaaatattttatgtatacgattcagtatgatcagattcctaatgagcttgatatagagaacctgccgctgctggaaaatcgcaaggtccgttcctaccaggaattgttggttatgttgcgccgcctgtccggtgagggaggccgccgcctggatgtttttcaacaggataagggggaaaagcacaagtatgtcaagcatctggaaacatttaatatttacgagcgggaatggcggggcatcaagaccactaacggtgatgaaggcggtatggaaggtttttttgaaaagagcaaaaaaaccgaacagcttatggaaagattgattataccgggtgtggatcaggtgatttttaaccgggccggggaagaaaaagagttagcccgtgcttttaccagacataaggacaatcttttgagcatccctaagctggaaaaaaacatcaaagatttttctactatccggggtgagggagaaaaggtgttggccgccatcaaggcttacagtgactgcatattggagcgcagtgggcaaaaagaaaaagtagcgcgattgtactgcagtgtgaacaataggaaagaggaaatcaatgccttaaacgcaggactgtcagcggatctggaaaagcaaggtaaatggctccatgaattggaatataagctggacagcctgccatatatcagagtgaaactggaactacaggatttggaaaagaaatttattgctctgaccgaaagtattacactggttgaaaaagaggcaaggcagtctgcctatgaggtaaacctggctaagggtaaaaacctctggcttaaaattgctgcggagcaggcaaagataaaagcggctcaggttgaggcggaaaatctgacgcgcagcaaccgggaactcatggagcagttattaacctgccgctatacctggaaaaccaggcttaaagaaaggattaaccggcagatgccgggtgtaaaagctctgagggaggaattgttagccctgaagtcggaaacgaaagagaaggaggtaaaacagaaacggctggaagaaagtatcgaaaagagcggaaaacaatcaggcatggtggaaggctggctgaaattttattcagaaaaagaaaagacgcttttggccgggggatatgaggaagcctgggtaaaagatcctgcttacggaaaaaaggcagtgtcggaaattatacaggaaatcgagcgggcaaaggatgaaattgaagacagtataaaaaagattgttgaagaattgccgccggttgagaaagaaattgaagaactgaaattccggcaggcgtctgctgccaatcgcatggaacgcattaacgaaaatcgagctgtttttaattcgcaatatgaacatatccaggacagtttgacgcggttttcgctggatgtgggggatatatttgctaaccgtgctgacattgagaccaggttggctcaaaaagtaattgaggggcagcaagctatgctgcgggtcggggcaaaaaagagcaatattcaggagaaggccgaactgagcggcttggaatattatgtgcccaatcgggaattgctgctggtgcaggagaagttggaagaatggggtgttttctccgagacaggcagcaagtggcttgatctggccggaataagcggccgacagcgggagaattatctgaaaaacaaccctttgctgccatattctttgatcgttgcccgcaaggatctggctaatttgagcaaattggcggaaaagtggcagaagctggctttaaataaccctgtgccgctggtggtgaagagtgaggcagcgttgtccggcggtgaggtgaaagacagtgctctgctgccactgatggataactatgtttacctgccctggcatggcggttaccgttatgctctttcccgccaggcattggaagaattgaggctctcccttggcgagcagatggaggacgcggaacaggaaataagcaggctgcgtcaaaatagtgacttattggcggaattagagtttaaagtacgggaattttatctgagctatccgcaagacccaaccccggttttcgaaagtgagagcaatgctgttgttgctgagatgcaaaaaacagcttcacgcctggtgtatcaggaaaagcggcgtattcagaagcttgaagtcaaaacagtgctggaggaagatagggaaaagaagggagaactcttgactcaagcgaaaaatcactataaagaactggaaaacctctattgccagcacgaagagaaagtgagttatttaaggcaaatggaggaactggccggacaaattcagtccttgcacacagaattggcggattgccggaataggctgaacggtctgcaaactagaataaccgagttgacattgcggttggataacgagagcagaatactggatgaaatggagcgggagtgtgaaggcctggaagttttggaacatgacgggtggcggcagtctcatatgataactgataaacttcttaatatggacggtgacaacaggcgggacagtgcgctgcctcaggtcgtggctgccgttctgccggaattgagacaggctttgcctttgagctatgaagaagctaaagcacaggcgaccggtttggaaaaaactttggctggagaagtaaaagggctcaagtcgctggaagatgatattaagagctgtcaggagcatattagagaatacgaaaaaataattcaaaatacttacggactgcttttgcaagaggtcagccatgccgatagctatatttcaaatgaagtgatcggattattggaaaacaggcgggagtcatgtaaggatatgcatcgtaggatgcaaaaagagcaggcaggcatgaatgagcagcgggccggagctgtttcaaaaatggaaatatattgtgaggaagtggcggaaaagtacggacaggagccatatactctgttttctcatcccgacaatgaggaagcggttttgcggcgggataaattgcaggtgcggaatgaattgcagctcctgggggatttgcttgaaaaaaataataatgagttatccttgttgaaagacgcgagaatcaggttggatgaaaacatgaagagcaacagcataatgccgattgatgatgggctgcccccggaggtttggcagcaggccatgcaaaatgtcacggattttgtttcccggcaaacccgcttgttaaataagctcaaagatgaagagcagagcaagagccgggtggtagagaaacagttcgagatttttaaaaaggttttggaggcccgacacaacggcatcgtgaacagttttgttaaatctttgttagagcaggacaggcataaatatgattttgcgctggtagaacctgttttcagtaagtgttttgccactatccttaagtatgaggagagttataaacacaagctgaaggaaattgaggaggataaaaaggaactgatcagtcgctgcatacagcaggcttccagggtggccgatgaaataaattctatcaagaagttttccaagtttactttaaacgatcggaatttgcaggctattgacattaagctgagatcttgggagcaacaggctgcgccggtggtgacggacaattatattaatcagtgtatcatgatactaaacgatatgaaagatgaaggtgcggaggagcaaaaactacaggaatttattgagcacaaaatgtcctccaaggaattgctgaatgttctatcacctctttccgaggctatagtcagagttttaaaaccggaaaaggatcatgcctcctctcgctatgatcgttgggaaggtgtttttaaatggtcgggtggtgagcgttacgcaggcttttgtgctatgtatattgctctgatctcttacctgcgcagcaaggccagtgctatgtacaacccggccaaagttttggtggcggataatcctttcggtgccgcctcttctccccatatcctggatatggttttccaattggctgcggccaaccgggtgcagatgatttgtcttaccgctctgactgatcagaatatttttaagtattttgatgtagtctacagtttgaagctgcgcagtcttgggggcaaagagtttatttctgtcaaccggatggatacggggtactatcgcagtggagtgaatgaagactaa

SEQ ID NO: 51736 - DNA, 1086 bp, Desulfotomaculum acetoxidans DSM 771
gtgctggcaaaactcaggcaaataattataacccataaaacaaaaagaattgaaacttcttacatggaagatatggtgagaaaaaagagtgtctttatcgaaaatgggggatatgaggcgctggcggattgtattgaagatctttgcgccgagggactgctcacgccggtaaaagcgtccggcactaacgggcgtagaccgctgttgtacaaccgctatcatatccgtgaggagaaaaaggagactgacagacaccgattgattgcttaccatcccaggatatgcacggattattacagcaatcacccgcttggccatgacgaagatatagaatacttggatatgctggatgcttttttgaaagatgcaggtatgtacgataccttaaatcttcctttttccgtcaacgaaagatcctatcagattttccgggatgaaaaatttctaacgagtgcgagggggcaggagttttgccgtaggatcggactacagtggggtgatctgggctgttatcccacctttgaaccttttttctatgttatttatgaaaccgtatccccattaaactgcctggtagtagagaacaaagacagcttttttacactgaaaaaaatatttaaccggggaggaaactggcagaaaagtgcacttgacctgtctgacaggcaagccagagtcattgatggtgtaaaattagatatgcttatttacggcgaaggcaaaaagatattgcacagccttaagtttatggaggagattcctgattgcagggatacgggtattacactttattatttcggtgaccttgattatgagggcatttcaatttatagcggcttggcggaagcttatcctgaatataagataattccttttgtgtttctttaccgcggtttattgaagatatctccccggcccatggttaaaaaacagcggctcaatgacctgcatttagaaaactttttaaagtatttttctgctgaggaaacagaagttatattgtctgttttaagccaatctatgtatataccgcaggaagctttagcctatcctttttatctggaggagtgtgacaggggtgcatga

SEQ ID NO: 51737 - DNA, 1497 bp, Desulfotomaculum acetoxidans DSM 771
atgcaaggaacgatgtcctttctttcctttgacgagaacaatcgtgatgcccttcagcaaagctttaacgacctggccaacttgagccgcattacagactttttatatggcgagcacgggcaatttgaatggcagctggatttctttcgggttatgtatctaatttttcagtctgccttttctcctgatgacaggatccggcacgaaaacagcctggccaaccgttttcagcatcgattcggtcgcaagcctccggaagggcggttgtcgctgttaattggacgtatgcagacagtgggctggcttttgaaaacacaggacagttatatggttactgaactgggaattcgcatgatatcctttctatttgacttgacccagcaaaattttctctttcaccagaaagacgagctgcaaaaggccatatttttatcccaactgaccggtttgaaactggaaatgctgcagcagctggatatggatacagagccggagtttttaaccttgctgtacgctattcaaaatcttaccgctcaggtaaggaagaatattcccctctacgtgcagaaaaaaactgctgtagaggaaatcttaaagttgaaggatttgatggaggaatctgtagcccgtattgaaaaatatgtccggacagaaacagtattggagagaattgacgattttcgtttaaagtatcactatgtcaatgccgtcttaaatgaagctacttctgtctgccaggagggtcttggtgaggtaattagggcgattgaaattgcctcagctgaaattgcccattctcctattgctccggaaaaattccaagcctccttattgcaaaaaatcaaggaggaatttatcaaggagcaagccggagtgcagtctgtttatgagattattttacagatggaagtggagcaaaacgaaagatcgctggcctatctgcccgtgaaaatctggggcggtatgtcggctcatgatatatataaaaccattaaaatggccgaacagtctgaaattgatttcagtggcgcggcacgtcgcggcccgctgctggacggagaaaccttgctggacgtgccggaaccgcagtacctgacactggaagagatcaatcacctggaaagagaggaagctgtgctggaccgggagaatttctatgaccgggcttttcaggacattaccggctttgtactgaaccacccggaggaggaagataccgtgcaggattggattctatctctgcccggtgaagatagatttaatgcctcggtatttttggactttttgacttatatgcaaaagctcggtttgctggaaattgacctggaaaaacgccggcagccgcgtcatcgtcctctggactggtctttcctggttcctgccgggtacccctgggtgctgaccggccaagagttggtgaagtttcctcagagaaagcttttggaaggttatgacaggatgcagtataaaaagtttttgaagaaggaagaagaataa

SEQ ID NO: 51738 - DNA, 651 bp, Desulfotomaculum acetoxidans DSM 771
atgagcggtgatctttatcttactccgaggcaaaaaagggtggtacagtttatagcggctaccggaaatgtcagcttgatgcgccatcatacaggtgtaaccagacaggatattaaaaagatgctggaaatcacggataatcgcgatttggaagcatttataaaagtatgtaatcttgtgttaaaggaagagactgtcccggcacaggtattatatgacgacattttgaacagatatgtttacgtgcagacggttgatcctgtggttttgcttgaccgaattccggtgaaaacgcttcttttgtttttgttcatgtactaccagcagagggctttgggccatcctcagactagacttttagatttgctggagattgttgattcgtccctggtggagaatccccgtcaaaaggtgctggccgcactgaagccgctgctggactataacctggtaaaagaagatgacgaaatttaccgtgtcacaaaaatcggcgatgcttttatgactcctctttttctgaagaaaatgacggatgttacattgaataaaaattatgatctggatgtgattttggagttttatcgaaaggtaattcccagaccggaggaactgggggcagaggcaactgattaccagctttctttattttaa

SEQ ID NO: 51739 - DNA, 1296 bp, Desulfotomaculum acetoxidans DSM 771
atgctgccggaaaacattgtgctgtatttgcaaaaatatcttgccagagatgagacaattagctctaaagacgcaaccataagggatcgagtctatagtctgtcggccaaaacaataaaatcaagagtatcctatacgagcaaaatatttgaattatccggagaagcttcgcccagtattccgcccgcctttcagggcagccgctggcaaaacaaaaagacagcgaaacagctgaaaaactggcttaattaccggaattcatccctttcctttgaactcaatatacgcaactgggtggaaaacggtttactcattcgggttatcgaactggctaaccggggcacttccagcaaaggcgtatatttcattccggggctgcccttgatagaaagctggaataaaaaggagctgtctgaaaataacgccaaccgcaaagaagctgataaatatatgctgcgcctggaagcactggtcaacccttacgaccacccgggttttgaaaaaatcaggaattttgcccgtcgggaagtcaggcaaaatcttcgtgtagataaaagagcggaatttttattatcactgctaagcgccgcccaaaccatgccttttttcgattggaaggaaatcggtaccttttccgagacagaaaatatgcgcaacgccgccagcaagacttatgacggcaagcgcacactgtaccagacactgctggaggaaatattacaggacagtcctgaagctatagggctaaccacggtatcaggcaactatgctttaagcttctctgcccgctgccgtatagattttacatttggccgctgggatttcaacgaatgccccgttatatccaacatatccggcgaagaaatagctgaaataatctcactgcaggccaaagatgtacacacactatttttaaccgagaacagggctgtgctgagaaaactggcgggtcacatgccacatgaaaaacgccgccacgtgggaatgattgctttcgacggtcagattcgctccgctgtctataatttccttaaaatttggcaggctgccggcttaaataagctgcttgtctggactgatttcgaccaggcagctatatatatgctaaaaaaattgtacggccttggatttgcggactttaatgttttagttcccaaagaagacgaattaacgcttttagattatcctcaggctatcagtatgctggaggaatttataaaagaaaacatgctggtggagcaggaatcctacttaaaggatatgagactgctgcaagaattgatttttaattgttag

SEQ ID NO: 51740 - DNA, 1620 bp, Peptoclostridium difficile R20291
atggaaatgattaatattttagaaggctacaataagagagtaaactgtataggatcttattatcttattgcaactcttgctaacaatagaaataaatttaaagaatttgacaacattcaattttacaatttattaattcaagttttgtgttatatatttgatagatctcttagaagaaagaactgtttaagagatgatattaaggattttattgaagaaataaatcgtatggattataaaataatgctttcagaggatgacttaaaggatttagcaaactatataattaatggattaaccaatagtggtaaagtatatctatttacctactattctttagaacaagaaaaacatatagatgaaagtattaaaattatagaagataaaaatgtaaaaataaataatcaggaaagactatcctactccttaacaacagagggttatagattgttgttatcaacaaaagaatatgatgaactattccaaattcaaatatcacaaatgattgcaaagttaaggatagaaaagggtgattatcaaggcgcaaaggaagatatttacgatataataaataccttagagattcatcaacagaaaattgataattatataaaaataataaaagtaaatatactatatataaaagaagaaaaatattcaacagtaatagatacaactgtagaaacacttttagaagaaatggacaaatatgaagaattaaaaaaagaagtaaaactattaatcaaagataaagaggactacttggaaaaggatgaggatatagacaaagaaaagataaaaaatataagaactcaactattacaaatgaaagaattaatagatggaatagttttagcaaagtctacagccacaaatttgttatctagagttcaagattttagagaagaatttaaagaaatacttaaaaaactattaacaactccagtaattaaaagattcaatttcaaggaagaaatcttagatagacttgaaaaagacagtgattttttattgataataagagaattatatatatctttatttaaagtagagttgccaaatcgatttaatattggagtggcatatcaagaacagaaactattaaatactagagaaattgaaaatgaaatagttaataaagacgagttagaaattattgaaaataaagagaaggaggaacgtataaattattgtgaaaattactattttgatttttttaaatacttaattaaatatggacttgaaaaaggacaatttacattagaagaatttctaaaaaattatctgaaatatgacaaagttatttacttagaaataactaaagactccaaattgatgagagatataataatttacttcgctaatcaaagggaaagtatcaatatcaaaaagataatcagaatgttagaaaatagtgccttctcaccaaatacagattttcaaattgaaagattaatagaacgtttattagtagaagattttgaactattaaatagcgttagccatattaaaagtaataaaatatttgaagatgaaatgaaaataaatactgaaataaatttagaaactatgactgcagttaagctagaaatagcaaatataaaatttgaaataatctaa

SEQ ID NO: 51741 - DNA, 729 bp, Peptoclostridium difficile R20291
atgaatatatctttaaatgactataaaatagccaatgaaatattttatagattacttaaaaaaagtgagttaaaagaaaaagaagctaaagaattatttttagcttatataaataacagtaatgtaaggtatgctttagaggcaatttgtgaagtatctaaaataaaaataatattaatttcagataccttatacttaataccaaataatgacaatgatatttttgggtttgactatagaagagaatctttattagggaaagatttaaaagatagttatttaggatatttgataatgacaataatattttctgaatttacaaatggggtagcaccagcatcatatattcaagtattaaacttactggatttagtacaagaatccttagaacgttcaatagctcgtgataatctagaagaaatagaaaaatcatgtgagtttaatataactatcttaaagaactattgggaaagtaaaagaaagtgggacgaatctagtaagaaaggaatagaaacaacatcagcagatttccaaatagggtttattagaaaaataattaatttcttaaaaaatgaaggcttaattgtacacattgaggatgaagataagataaaaccaactagaagatttcttgatcttatgaataattattttttagatgaagaaaggaaagtattaatagaaaaactagttttaagaaaaggggaaagtattaatgccagtaattaa

SEQ ID NO: 51742 - DNA, 4356 bp, Peptoclostridium difficile R20291
atgccagtaattaataaatacaaaattataaattttaaatttggtatgggacaagaaagaatacttagcaacagaaccatggaactgtatggagaaaacttacaagtagaagcagaaaatacagcaggcaaaactatgagtattcaaactatcatacaaagtatttgtccactatcggatgtagccaaaccgtttactgcaatatataataaaaaagaaccattatactcaatgactgaatggttgctagatgatggtaaaacgttattattaacgggaataggatttgagaaaaaggctggatcatctaaagaagaagggaaagaaaaaaaggacgatttatacaaatactttatgtttattatagaagaatctaaagaaatggaggttgatatagataatatacctttattaaaaaacaatgacaaaggtataaggatagtacaacctttaacggcctcacaagactatataaaaatgctaagagataaatatggaaaaaacaaagtacacttctttaataattacttaagaaaacaacatagagaaaaattagaagaatatggaattaaccaaagtgaatggaaagaaattattataaaacttaatagtaataacaaagaaggtggactatcagactttgttaaagaacataatacttcagaaaaacttataagagataaaatattacctttaatagagacaagcttaacaacagaagaattcgctccaatattgcaaattaaggaacaagtaagaaagtgtataaataatattatagacatgaatgaaaaattatcagattataaaaactatagagatttaaacattagagttgaaagtttacaaaataaaataaataggatcctattcatagaagaagataaaaataatgtattaggagaattagctaatctatatgtacatatagaaaataaacgcaatgaattaaatgaagaaataaaacagtatcaaaaaatgaaagcatcaaaagaagaggaatttaagatagtagaatatgaagaagatagctatgagtattttagaaaagaaaaagagatacaagatactcaggtagaatttgataaagccaaaaatgaattaaatgataaaatagaagaactagaattagatgaacaatatttaaatatatcaaagttcaaaagaaaaaagaaggggctagaagaaggggaaaaagataagatagaaaaagaaagtgaaaaacaaagaaaagaggtaaatcaagaagaaataacggctattataaatcgtctaggtagcagtattcattattgtttaaaggaagaaagtattataaataatgaaaaacttaaagaaaatacaaacaacaatatagctatacaagaaaaaaagaatcaacttaatgatgacaaaagtaagctcacaaaagtattgataagtaaaaattcagaaattaaatatatagaaggcaaagaacgtgattttaataatcaactacatgaatttaaacttaataacactgatattaaaggctttatttctaataattttttaggcgaagtaatagattatactaggtatataaattatttaaatataaaagtaaaatcaatagaagaaaatcttgaatcgaaagtcatgcaaatagaagaatcgaataaacttaaggatgatataaatgaagctataaataatcttaaattagataatcatgaatcttatatgaaactgcaagtattaaaaactagaaagaaagatatagataattttaaagaaaaatataaaatcattaaaacaagatttgaaatagacaatgaattagataactctactaaactatataaagaggtaaaacaagagcttaacaaaatgaaacttcaagtacaggacttagaaaataataaaaagcaattagaaaaagagctagaagatttacaaaattataaagatataattttcgaagaagaaatattaacagatctagaaagaaatggaataaaacctattgaaggcatgaaatatctattaaccttagatggagatttagaatacaaaaataatctcatatctaaaaatccattgctaccatattctataataattacaaataaagagtatcaaaaactgaagcaaataaacttaaaaaataaaactaaaatctcaatgcctatatttgtaagagataacatagaagatacttttataactacatctagtaaccttgtaattagtaatggattaaatatactatcttctttcgataacaaagctttagatcctgaaaaaagagaaaaggatatgaatctaatcaaagaacaaataaatagtattcgagataaagtggagcaatataaagcagaaattgaaatattagaagaatttaaacttctaactaataaaattgattttacagctgaagacttatccatagatgtgaaaattgaaaattataaaaaaattatatttgaaataaacaataaaattaagagtaatgaaaataatgagaagaatttatctaataaaattaaagaactttacgaaaataaagaaaagctattaaataacaagaatatattatttaataaattgaaggacattagaaatatacaagatacatattctataattttagaaaataaaaatgaaataactaagttaaaaacaagtattgaaaaaatcgaagaagaaaaaaaagttattaaaaaatcaatagaagatattgatgttaatatatttaatttaaattcagaaaaagataggataaataggcatatagatgatacagaaagcaagataaataaatttaagatttatgaacctattaaacttgaaaatgctaaactagaagaattagaaataaaatacaagaaatacttagaagaccctacaaaaaaagagattgaaacattaaattatgaaatctcagtttgcttaaaaagaatagagagtattactatagagttagaagaatttagacaacttattagtagtgataattttgaaaatatacctatattattcacaatagaagaacttaataaaagaatagttttaaataaaagtaaggttgatgaactacgaaaacttaaatatagtattaaaagcgacatagataaaaatcaaggttcattaaacactaagagggaggagatacttaaaaaatttaatggaaaagaacctttatctactagcttaatagtgaactttaattttgaagaaagaaaaatagatataaaaaaagatataaaggatattggtgaaattatagaaggtaatagaactacttgtcaaaatctagaacaggaattaagagacttaaagaaatataaagtagaaagaaaagctataacctatcaacctgaagatatttttattgaaagtaaaaaactacaatcaaaactgcaaaatgttgaatataatttaattaaatctataaatagctataaaaatacaatattagaaataaaagaatttaattataagcacatggaaaaatacaaaaactttatagaaactttaaatgtaaataaagataattactctcgacaaaaagaacaagtagaaatagtattactagttataagagaagaaataagcaaattagaaaaacatagcgaacaactaagaaaagaaaagactataatatcaaggcaaataaaagattatgttatggactgtattgatgaatttaaaatcataaataaacttggtaaacataaaggacaagccttattcaacatatcactacctaaatctgataaaatagaaaatagtttgagcttagtagatatgctaatggatgaaattgtagaagaagcaaacctaggtgatgttgaacaaaaaataaataccttttatattttaaataagactcttaatatagggagaattcctgtatcagttataaaatatgaaataaatagaaatgaaactataaagtggaactctattaataacgaaacaacaggaggacagagattttgtatctcatttattgtgacaatattgttgatggaatataaaagatatgatagaaatgcaatagttgatgaaagtaaatataagggtaaggtactacttatggataatccttttggagaaacgtcgcagcaagatttccttaaagaaatatttgaacttgctaaaaaattcaacgttcaaattatatcctatactcatgtaacaaatgcttctataagagcaatgtttaataagatttatttaatgacagttgaaaaaactacttctaataaagaatttgtggatattaatgagattaagcaaaataaaactgatgaattggtgtatatgagtaaattttatataggtaataaagaagaattaattcaagaggatatatttagtttaatataa

SEQ ID NO: 51743 - DNA, 1011 bp, Peptoclostridium difficile R20291
atgattacaaaaataaaaaagacttatatataccttaaggaaatacaaaaaatatacaaaatcaatgagcataaagaactagtacacataataaaaaaactaataaatgataataaaataaaaccaataaaaacctcagatctaacacctcagcatgagcaattatatacaaagtatagaataataaaacaagaaacagaagaagataaaaaaatattagaagaaataaattacaaaatatgtgataaattaagtatagattattatagaaaaaacttagtacactataaaaataatagagttgcaataatggatttaaatagttatcttattaaaaaatctgataatctatcaaagaaaatatcgattaacgaaagatcttatgaaatatttaaggatgagaaattcataagtagtaaagtaggaaaagaagtactaaaaaacttaaaaatagatctaataaaggatttaaacgtatataagacaccagagccattcatatatttatcaataaatcgtatatctccacaaaaaatattaattatagaaaataaagacacttacataacaataacaaaaatgctattagaaggaaaagaaatacttaaaaataaaatagatactgttatatacggagaaggaaaaaaaataatcaacagtattaaaggattaaaggaagatataacaattgaatatcttacaaataaagaaaatgaatttttatattggggagatatagataaaactggattatcaatatacacttccctaaaagataccaatgaaattaataatataagattatttgaagttgcttatgagcatatgatagataaaacaaaggaaaataccttgaggaatatccccaaaaatcaaaaagataattttgaatgtggattagaaaatattaataacctaaacttaaaagaaagtattaaaaatattttagtacaaggaaaatacatacctcaagaagctctaaatagattcgacttggaggaatataactaa

SEQ ID NO: 51744 - DNA, 1470 bp, Xenorhabdus bovienii SS-2004
atgtcgctagagtttttggagcaggctcgtaatgaatctatggcacgccgcgagctgactattcagtctcatgcattgctggtcgtgcggacgctggattcaatctatcgcaccctacagcgcaatccgtgggaaggcgtcgagcttgatgcgctggcggctattatgcatctctttgacgctatgctttattatgctgaccgcgagcgccaacccggtatgacgcggaaagaagcggagttatgcctggttgggcacctaaatgaagcttatccgggacaagaagcctcggcctacgcgcaggttgccagcaagatttttgcagcgattaaagaccctttccgtctccgttattacgatttcacgcaacgaacgcattccgaagaacagatagtccgtctggtccgctacgaccagctatccggctcagatgtaattctctggtcactgaccgatgaaggaatgctgttctataccctccgtttggatgaaacgccgattgagcgcgcggctattctggcctggcgcacgttaaaaaccatccgtcgcggtgagatcgacaaggccgtgcatcagattcagtcaactcagaggcaactggagcaatatctgattgggatgcggatgaaagtacgcgccgctcagtctggtgatttgagtgcatcctatgcgcgtgatattcgtccggtacttaatgactcatttgataagactggggaagtgctggagcatattcggaccacgatgtcggccattacggaaatgctcgttgatggacgctcagaattacaccccgataaattaaataagctgcgtaatgcgcaagagatttttgccgatgtctgcatatttactcagcgctatcaagactgcttacatgatgtgaacaaagattttgagcgagctcgcctgaaactcattattcccagagataacaccctttttcgtgaaacgctggaaaaaggtgcactcaaacccttgctgttacattcccccgacattgtcgaaaaggaaatagatgatctcatcacgcgcgtgctggctccccgaagtcaggatgatgatagacacatcctctttgaccttgaggcgctgctgaatctctatcttgatagatttgaacaagcgctgccacatgagatacaggaccctaccgaccagcccgtagctattgaaactaccctgcgtgggatccctgaatctgtcattaagaaatgcagtgattgggtgagtgaccggttgaagaatcgggggcatgtgagctttagagatgttttcgacgcctatgagtgcgacgaattgtccgaacaagaacaacaggtttgtttacttcatattggcagtgtggcggctaacagtgatcccacaatagaggtggagataagcggtgacgctatcgaaacagcgcggtggtgggctagcaatttaaaactgttaacggtagctcccgtacaccactttgaggagtag

SEQ ID NO: 51745 - DNA, 4437 bp, Xenorhabdus bovienii SS-2004
atgtggctgattaaacgggtttatatagatggcgcaggccatgaagaagctttctacaaagacctcacgctggactatattggcctgtctcaagcagtcgatagtcctgctattgaacggcagcgctcgcccgtcaggaatgcgaaggtggtgaccagtacctatcaacagcttgttaatgggggtggcaagtcaacttacatcgcactactgttatcgatttttgagccctccgttagtgatttcacccaatacttggctaaccgtcggcaaagtgaataccactaccgcaattatttctataaagagctctctgttatcctggtagagatggtcaatgaatcaggccaaacgttattactggggcatgctcatcagcgcaatggggatgatgttgaccgcacgctgtttatttgtgatgcgcctgactccctgttgggggcgccatttgacgaagtcccttcttattcccgcgcggaacgcgattctgagctacgttcctacgctaatagcctgcacagcttcgaaagctggcttaatctcaaagcgggcggcgagggggggatgcactggcgcaaaacctccaggcagagtgaatggcgcacatttttgctggaacaacaaatcaacgttgatctcatcaaaacaatggtgactttcaactccgaagaaggtggcttgacccgttttattgaatacaaaactgagcatgatttccttggtgcgttctttgcttgcaccatgtctaaagatgcagctgagcggttgcgggaactggtagcgcatgaagttgaacgtcagggagagctggaaggtatccgtcgtaacgagtcatttctcaaggacgtgctggctaactggcagacgtttcttgaacccgccaaacaactggaaagcactcagacgcagctgcaactgttggatgacggtttccgcgaatcaatgcgcgatctcacagcctttattggggaagctcagattgaacagatacaactagaagaagacacgggaaacttgcaaaaatacattgaccagaagaggtttctgcttgaacagttgggcaagcgcagaacgctgcttgaatatgatttcgcgcagcatcagctcaacaaacaaaaaaccaaggtcgacgcacttaaagatgaagccgatgccaatcaacgtcaaattgatattactcgtactgctatagactacaaagcttatgcgaaggtgcgggatgcgtaccgtcaggcagacgaagatctgaaggtattccaaagtgaaacggaaaggccactgcaggtgatttttgagcgtactgctggtgaggccttgggcgtattagagtgggcaatcaacaggcatcgccagcaggaggcgaaacttgtggaagagcaagggcagataagcaaggaaagtaatgcccttagacagtcatacgacgagctacaaaagaagttgggcggcctggaggtgggtcgtgacagatataaaatagacaaacgccagggtgaattgcaacgggaaaaactttgtgaagttgggttgatccaaaagggagaaacgcctagtgttgctcaataccgactggaattaaccttacatgatgcgcagcagagtgaagagctggctaatactgatcattatcagaaagagcaggcgctggaagcgcagcagaatgtcgtgacaaatgcgttagttgagcaaagtaaggcgcagcagacgtgcactcaagcagatctaaatcaccagttggcaatggatagcgcgcagggcttagtaaaaacctatcaaacactaccagcgtcaacgcaacatgatcttgatgttgaggacataagttggcacaacgagcggtgcggattacagctcgagaaggtattgaatgcgaatgctcaaacgctgaatgaaatgaaacagcgcttactgcaagcacagcacgaactggaagagttaaaactgacggggcatgaactggtcactaagcagaacaatcaggcgcttgaagcgttctatgcggcgggcattgcacgggataagctctgggcatttccccactatctggcctctgtcttcctcgatgaggcggagagtatcgctgcagtgatcgatcatgatccaggccgctacctgagcctggtcgcacttgatgatgcaacttttgagttagtccacaaaatcagtgagaaattgccctggaagaaagcacctattgctattcatctgctggatgaagcacaggatctccgcagggaaacgcctgaattggtgcaggtcgtcctctcaaaccccgataaacacggttatagcaaggccgcttacaatgcccggttgcaagagttggaggacactgtagcgtcgcaggagaccagtgtgaaggctgtggaggacgcctttaatatactggaatctttcaggggtgactggcgtttgcattacgatcagtatggtaagcattgggcaagactagttgatcaccgcgagcaggctcgcttactgctggaaaatgctgatgtagcacttaagcaggcggagcattatgcgcaaacactgcgcgacgagaaggctgatgctctggcgcggttaaacagtgctcaacagcaaaaaattcaggccgaaaaagcacgtgataaactgaaccgttttgttgaaatggaatgggcgaagcgtgaaacggcgataatgaaactggaacagctagccgagcagattcagcgaagcgaggagactcttgttaacctgagggaggcgcaagagcggcagaaagagctcgcggataacaagagcgccgaacaaacctgtataagtatccagattagcgaatggaataatctatccaacgagccgttctattcagagattacggcgactgaaggtatggaaggacgaagccccaaagatgcccatgagaaggctgctcaggcgctcaaacaattactcgaagcagccaacggtgatcaggttaccgccctcaagaaacaacggaaagatgctgaacaggcacaacgttacgcctctgagcgtttgatagctcaacccatctacagtgcatatccggatgaggtaaaagcggaggctatcaatgagctagcggtaattaacaaccgcatcacacgccttaacgaacagcagaggcaattcacgcagaatctaattaactcgaaggtaactctgcaaaatttgtcccaaaattgcgcgaatgcccgcaacgcgcttgatgaggactttgtgtggaaagagaaacccgtcgaaatagaggcaatccaaacgtctttggctgaaatcgccaacagcctccatgaaactgaataccagctcaaactccaactggagaaaaaagcgctgctgttgaagaagatggaaaatgtgaaagaacgactacagaacgccaaaacagctcaggcgacgatccagtccataactccgagctctgcggcgggtctgcctagtaggattctgagtatcactgagtatgctgacgcgctgagtaagcaatgccaaatgtacgcaagcctaaaagaaacgcttaaacagcaaagtatacgtgtcgctacggtctggggacacttccgcaaaagaatcgaagaagagttggctaagggcccagatatccgagccagtcaggaatacttacgacagttggactcagtcgcaacttatcatgaagttttgggcgacttggacagggtcggtacagggatcacgcaggtattcgaagcggtgcaggacagcttggaacaattccagcgttcgattgaactgactgtcacccatctgactgcacatctggagggggcgataaaactcctcaagcgcgcgatgtcggtcaaaattcctgatgactgtcctgtactgcctggtcggcccattatcaaaatgactgaccggctccgtgatgtcacagctgatctcaggggttttgccagtggccgcttacagcagtggatagcccgagggcaggtaccccgtgcgccaaaccgggatgccttgacagcagatttggttcagtcggtatttggcgaaggagagctggaagtacgtctgctgaagacgaacgccagtcgtccacaatggactcctgtcacccggctcgaaggctcaggtgggcagcgcctcacatctgcctttttgctgtttgtgacagtcggcaaagtgcgtgaatacgatacgggtatttcaagtgcaggattcttactggccgacaacccgttgggcaaatcgaatgctgatgacttgatgcgaattcaaacccaaatggccagggcttataaaatccagctcatctacttgactggcatctcggatgaaaacgcccagtcgatgtttgataaccatctcttcctgaacaaagttcagaaactgaggcggcgcgatctggtaaccgttgataaagaacgccacgccctgtggtcggcttccctggttgctaagccaaagtccgaaccagtcttttaa

SEQ ID NO: 51746 - DNA, 1056 bp, Xenorhabdus bovienii SS-2004
atgagtagcgtaatgatctggctatcccggctggagtcgacagcaaataagcaccgttttgcagccggtaaggccgtccgaacagttaaagccaatgcgattctggatgagatattagaaacacatagccaagaggctttgcgccaggatgttccaagtttattgagtcaggccgttacgcaactgcttgaaggggactggcgggctcagcctaagcataaagctagctggcatcgctactggcggggtatgagcctaccaaatacttttgtttacgaaggtgccatcgtccctacaaaaactgcatcagaaatagcctggcatccctggttggcggaacgtattacagggcaactgccactgccaatcaaggcacgtttacaacagttgaatacatatctctttcgccaaactaagggcgacaagccactctttccgggcttgctcggacaccgtgagcggtctctgcttatatttggtgatgaaaaagcactggattccatgccgcctgacggctggaagcatgtcacactgactttggctgatatgggcgcgtttcgacgtgctccgcctttaccgtatgagtcatcaggttgccgcgatcttccggctatcattgttgaaaactctgatgtgtattatcgactttgccaacttaatcgagttcagactcactggtcactggttatttatggcgcgggaaacaaagtgtcaggccaagcagagtgcgtgtcacaacttctcaaggtcgaacaggtaaaacaactgctctattttggcgatttggatgtggcgggcttaaaaatcgcccatcagctgtactgtaagctacttagtgattacgatatcagcctacaattggatcggtggctctatgatgaactgatcttaaattgctgggtgacgcctgaaggaaatgccaacagcgaacggttcgattttgagtcgctgtgtggttggatgccgcgctttgttttacgacaaatgaagatgctgctcgcgacccatcagcgtctgcctcaagagggagtggcatcgttgggtttggtcatatag

SEQ ID NO: 51747 - DNA, 1620 bp, Peptoclostridium difficile CD196; identical to SEQ ID NO: 51740

SEQ ID NO: 51748 - DNA, 729 bp, Peptoclostridium difficile CD196; identical to SEQ ID NO: 51741

SEQ ID NO: 51749 - DNA, 4356 bp, Peptoclostridium difficile CD196; identical to SEQ ID NO: 51742

SEQ ID NO: 51750 - DNA, 1011 bp, Peptoclostridium difficile CD196; identical to SEQ ID NO: 51743

SEQ ID NO: 51751 - DNA, 1587 bp, Clostridium saccharolyticum WM1
atgaactacaatatagactattctgatgccagtaaccgtcaggaaataatagggatatattcgctgtattattatattgtgtcgggagcttcctatgcgtttgatattggcaatttagtaatatcacttctcatttacatggttgaagaagggcgactgaatgcatatgcgatgaaagtttatgaaatcaaaacttttataaatgagtacttaagtggtattgagtatgttgatgaatacaacttggatgagattgccgagaacctaatttccaagctccaaggagctaagccgaatggagatccaattaaatttgaatactatgatcacgatattcgcagtgtaaaatcggtcaaggttgcctatgtggattacagcctcaaagatgaagggttcaagataactgataaagggttggagtttcttatttcatcaaaggagattccgcaggaagctaagctgaccgtggcgttataccttttcaaactgcaattggaaaagaaaaagtataaagcagctctaaataccattaagagcattaatctggaaacattgagacaattggacattaagacggaaatcttgtctatgaacagatttggtcgtgaagaagcgagtagactttacaaaaaatattggggcgatttctttgatcttcgcagtgaagaaacgagtcattatgaagatgccaaggagcgcctgcagctttacaaggagagcgaatacctagaaaagaataacattacactcacacccgaagatatcgaggtgttaagagctattgaaattgaactcagcaagagttcgaaccttcaagccctgtatacaaatgaaatttcaaaaatgccagttgaaatgcttgaaattgataaatcatcgatgatcaatatctttctaagcctgttcaatttacaggagcactttgatgaattgacaaaactcgatacccctatcgataaatttataaattctgttcagccattactattgccgaaacgaaacaagcgctttggggttacggtcgctttatcggggcaaaaggttacaaggcaaatggagaacatagtacctgaagaaattaacgtaaaaccgcaaaaacatgaagactttgaaaaaatctatgatggccgaatgaagaacaattattttaaactgttcgagatgttggtcgaatacctggttaagataaatactacgatagaggatatctcagattttataagctatgttgagcaaggaaagggaacagctgcaatagggtcaattgactttttaagctttttattaagcttaagttatttgccggatgcacaaagagagaatgaatacggctctgataatgtgcaggtgatacaactgaatgaaagaaacttgataatagataaacctattgaagtgttccaagtacaagaactattaacatacttctggtttgagaaaatgaaaatggcttataatgccgagatccatattgcaactgaaccggatcaaaaggtacaaattaacggtgaagaagatagaacgattgggaatctaaaaatatgcctgattgagaaaggaagcttgaaaaatggccaagaatattga

SEQ ID NO: 51752 - DNA, 735 bp, Clostridium saccharolyticum WM1
atggccaagaatattgataccgtagggaatgctcttaaagtactgattgaaaaaggaagtctttcaagagatgaatttcccataatccatgaaagtattattaacgatggagatactctgagtgacttagaaaatctatgccaaacaatgggactatttttaaatgaaaaagctggaacattctacatctcgccgatacctggagtaaaaacatttggctatacaaatgaagagatgaggaaagaattcggatattcctttaataacgaagatttgtatacagctctatttatcattgcaaatgttataactgagtttttcccagaagcaagcccctcagcaatgaagccattcatgaaaagtaacgacctgatggatattgttgataaaaaggtagaaatcctgagagaacaagttaatctcgatgaaatctcatacgagaaatcatacaattttgaagttgtcgtaaagaaatggtctgatctgcccagagtaaggcttgataaaggcgaaggggatagtaggaaggaatatgggaaatcatcaaaaatccaactgcttaatacaacgcttcgctttatggaaaatcaagaactgattaagatggtcgacttgaatggagacaaagtaatttacattacagaccgcttcaaagctacaattttgaacgcttacaatgcagatgaaattcaagctgaaatatacaattaccttgataacctgattactgaataa

SEQ ID NO: 51753 - DNA, 4413 bp, Clostridium saccharolyticum WM1
atggcaaaattagagggttttaggttggtaaatgttcatgctaatcataactcgattgtgtatccaaacgagtatttctttattgatggcaaaaatgctctgcttgatatgaaaaatggtggaggcaaaactcttgcagcacagatgctgtttcaaactgttttgcctaattcatttttttctgataaaaaccaagttcttaatttgttttcaggggtaacactgggatcaacagtgcattcgttatctcattttagtattgaaggacaccagttcaacaatatctatcttgggtttgctgctatggctgagccaagaaatagtgatgaagcctcggatgcagtagataactccgacttgggactcaaatatatgaattacatcattgccggcaataatttagcggcagattcgttatcaattgaaacattgccattgtgcaaagaggacggtgacaggataacacctgcaaactataaaagtataaaggactttttgcaggcaaaaatgagaagcgataagcacggtcgctattttgtcatacaaacatttgaaaatgagaagagtcggtactatcaggagttaaagaaatttggaatcaactcagaagtatttgaattcttgagagaaatcaacaaagacgaaaactacattaagcagttttttgaagaaaaatgcaagcgccccaaggacctgctgatgaattttattgttccaaatacagaaaaagctcttgatgctagagcattcgtaatgaatctggaaaaagtggatcgatcatctcaactcgcggaatcgctttttgaaaaatcacaaagtctgaatgaacttaataaatttcaagctgataaagcagagtatgaacggttaagaggggaaattgccgcctttattgaatttgtgaatgggagagtaaatgctcttgaggagtatgatactcatttgaaagaataccctaagcaagctgcggcatatgtatttgctctcaggcaaatggaagagcgctcgaggggattggaagctgaacatgttggactttatgttctgaaaagtaatttcgagaaagacattgaaaatattgaaattcgtaagcttcagatagaacttgaaaaactaaacaagacgcttgctaataaaatagagatcgtgaatcaacaaaatactgaaatagaaaatatgcagcaagaaaagaccaaacttgagactattaatttgactattgattacaagcaacatgagtctgaaaaaaatgggatcgacgaaagattggagaaattaacgagcgcacactatgacgagaaaaagatcacagcagagtatgccaatacaatctatatgattgcagaaaaagaaatcgacaatttggagattcagcttgactcgaataagacgcgactggcacaagaaaatgagaaattagataacctaaagaaaacagaaggtgtgttgggagaacggttaaatcaatgttcgtcgaatatcgcaaatgcaaatgaccagaagtacagcttggaacgctctttatcagatatcgacaaggaacttagagaataccctaattacagtaattcgttgttggatgaagaagaactaaaatgccttgaagcgcttaaaataagtgttgcttctgaattgaaaggcacatctgaagcaatcaataagaacaaagaagatcaaatagaagccaaaggtgatgtaaccaatactgagacaatcatcggtgaacgaaaaagtcaactctcagagaaaaatgaatgggtggaagcatacagaaactctctcaaagacattaggacgaagacatccgctcaagagagtgatatcgaagaaatttgtggccagtttaaaaaacaggttgaaagccatgcttcaagatcgattgatatcaacaaatctatagagcagttaaatgatgaaattaaaatactcgaagactatgggttcctaagagcgagatcaaagtatgatgctttaaatgccattaaaggcgactggaaatatgcgaaatttggatctgatattttgaaagaattggatgaagagaaatccagaaaaatacttgatagatttccgggctttgctgaggtcttgatagttgcagatgatgactataagcgtgtttcagagggtaagaaaaccgtaagtataacggtagctcaagaaaacttggtgttaatgccttggtccgctataaagaaatttgaggaagaatttcaatttaattcactgtttctgcttacccgtgatggagagtattatagaaatcttctcaatccagaagtggcaattgaatcgagatgtaaagaaatcaataaattatcagaaaagcaaactgctctgacttcagaaaaggaaatgattgaaacacagattgctttgttaagcgcccatatgtataagtatcccttacaaacagtcgaaaaatatttagaatctgtaagtaaattggaaaaagaaatttctgcatcgacggcgacaaagctgcagcaggagcagtacattcgaacattagagcttaaagcagaggaactaaaggataagcttcagaagcttgaatacgaaaatacagaggtaaatgaaaagcagcaactactcatttccaaaataaaattaactaacgagattagtgaaattgctgctcgaattaaagatatcattgatgagaagtcaagtttagaatatgaaattgacaacaacaatgctgatcttaaccttgcccaaaaggaaaagggtcatcttgaaaagaccattgaaagatttaaagaaaatatccgcctatatcgtgactatgtagagggatcgaaaggttataaggatgaaagctttggcatattagaggaagcggatatagccaatctctacagcaagtttttagcagcaaagtatgctttcgatgaaaaggcacagaattatgaagagctggttggaaggcaagccaaactgaataaattgatgcaagatatccgagaagaccataggttcgggcagatagacttttcggaagtctacgcacttaattatgtgcaaaaggttgctccagaagagtttagggttattgatctgaaaattgaagacttgaataaaaagaaatccggatttgaagaagaaagaaacaatgtcaaagctgaactgatcgcctgcaaaagggattacgaaaaactagaaaataagattacagtgtactttgataaattcaaagctcttgatgcgcagcaattatctagcttggagagagaaagtcataaagagctattgaaggttaatgatcaaattgaaactattagaaaaacaatgaatgacataactgcggagcgtaatctatatacgaatgaactgggtcagttcaaagttttttgtgacacaaatgcattgaattggcaaaccgctataaaatcagatttcatgctttcttatagtgaaatgcaaaaaagctacgcaaaagtgaaagcagagtatgataaggcaattagtcgaataaatgcagagataaaaaagctagacgccatgctccataagcttattatcaacgagcagcttaagcttaagctcaaagaataccttaccaataagcggacgtttgaagaaacaatattgcttgtaaaactccttttacagacttctgatagcatcaatacgactattcgaaatttagaaacatcgattgaaaacatcggacgtcttgatgaagagattgctgaacaagtatttagaatgcttaaaacgatattggatgagattgcaaaaattccggagtattcaaagtttaagtacggtgattacacaaaagaatcatttaaaatcaacttaagtgatgagaatagctgcaggattgaaaatgatattgctctaagcagacttaaggcttatgtctatgaacttgcatattcagtccaaaatgatgggatgactaagaaggaaatcaaaaaccggcttagcattaacaatattattcagtatggaatcgattttgataagctgaatatccagatactaaagattgagcaagaaaagcccaaatactatagttggggaaggctttcagcatcatcaggtcaaagctatgtaacatatgttatgtttgccatcacgatggtcaagtattttaataatgtgactgtgataaatgacaagatgaaagcaccgatttttatgttcttggataatccgttcgcatctgcatcctcaattgagctttgggaaccagtaaggcgattcctcgataaaagcaatgctcaattactttgtgttgcgcataacgtgccaagttcagcacagatattgtttgataaacacatgatcattgaacagacaaagaatgccaaaggtcagttcatcaatactattcggaatgagaaaacggaatcaaaggaaatcatccaaatgaggctgttcgatcatttagagattgattag

SEQ ID NO: 51754 - DNA, 1029 bp, Clostridium saccharolyticum WM1
atgataaatattctaaaaaactatagtaagaaaacaatagatatatacgatctagctttcgaatatcgcaagaaaccagtattgcaatggtctcgtgaagaaatcaatgagtatattcagcagctccaagatttggatgaccaaagaattattcaaataaagagaagtggcaaaggtgaggcaaatttggattctatccagagaaaaatcactattaataaatggaatttggaaggtcaatctgaagccgtagatcttgatttgttttgccacgatttagggatggacgcttcatactatctgaagaatttagatcagtatcatattgatagaccccacattgagagactaacagcccttctacatagaaattccggagaattgacgctcaatgaaatttcatatgtggttttcaaagacgaaaaagcattatcacagcccgaaaaagcttcagtgaatggaaaacgtatccttaacaatctggggctagagattagcgacattccgtatgtggatacaatatcgcccttctattatccaacatcttccgatggtgatacggttctagttgtcgagaataaagatacctgcttttcactactaagactattagctgggaaagagtccaacatcaaaggtgttctcttcggagaaggaagagcagttattaagatctttaagttcttgcatgtatatagcctcgggaacaacgatttgtttttatactatggagatgttgatcaagaaggttttgatattgcaaggtctcttatagaaaagtacccgcaacataacatcaagctctcaagggctttataccatagcttgcttagctatgaaggacgagcgctaatcaaaaaacgaacgattgataactcaaaagctgaagacatactgacaaacctatttgacgaagatagaacctcaataatgtcaatattggagtctgaaggatgtattccgcaggaagcattaaactatgatgatatgaaggtgacaatggatgaactacaatatagactattctga

SEQ ID NO: 51755 - DNA, 1533 bp, Clostridium cellulovorans 743B
gtgagcttaattataagtaatgtaacggaaaattatcgtgaaagaattcaaagactagctttatttgatcctttatataaattgcaaaataaaaattcaaaggataatagcaataatcccattgattattttagcttaggcttactagctttattgtttttctttgaaaatatgcttatgagaaataaaaagaccggagtaaaggagttagctgcttttttgcaggagataactgacggagaagtagatttaaataaggatgactttgaaaaggttgcaaggacgattatagaaacctttagaccggcaacaggaaaaagaaattccaaggtgttttttaattgggaaacgagaaaagaggacagtgttcagtattcaattttaaaggcagacaaggctgatttaactaataatactcaatactatacccttgatgatcaaggactagagttgatttttgctacaaaagagtatttcaatgaatttcagttatcgataaatcaacttgttttaagaaaacaattagagaagggtgaattcgtaggagcattaaggcagattaatgagatgggccttgatgtaaagaatcttcaagatagaattgtaagaataaaacatgaggttaacaggaatattgtatccactgaaacctatgaaaggtataaaaatattattgaagatataaacatgaggcttaatcgtgaaaatgatgaatttgatgaattacaagcatttgtaaaggatacaagagaaaaagtgggcaatgaaattactaacgataaggatagaaaggcttatgaccttattattgaaattgatagagaattgggacaagttcattatgagcatagacttcttcttaaagaaagtattattctaaaaactacagcacttcaagctgctcaggatgccttatattatgtaggtatcgattcttttaactttgatcaagaaattactagcagagtattttcatctccacttcctttaaacgctaccagacgattaattgaaccttttatgtatttagaaaaatatgaaacttggtcacctttatcggtatttgccatgcagagacttgaaaacaaagataaagtggacagaactcaggaatttttatctctagcagaggatgaggaagcgaaattagaacttaaaaagcaaagtgggaactttaaggtgatagcagaccttgcaattaagactattagtgataaagctcaagaaacgcctaatattaatgaagttactcttgctgaagttattgaatatatgaaggaaaataaccatgagaaaatattagattatcgtattttctatgatttctggataatacttcatcaaaagtctcctattgatatagctacattagaaaaaagtgaagaacttttatttggagaagcgtttactcttttaatgaagaaaggaagtattttatctatagaagaagttcaggaagttcttgaggttacagagagatttactataaaaaatatgttattaagattggagggtaaagatgattctatataa

SEQ ID NO: 51756 - DNA, 738 bp, Clostridium cellulovorans 743B
atgattctatataataatgaacaagtgatgcaagcctttaaactttattctattctttcaatgcaaggctatggatcgaaagaagatttaaggctttatatttctgatgaaatgataaggggattggtggatcagtttgcccgtgaagtggattgtactattttcgcgtcaggagattatatatatttgattccagtatcaaggaattctatttttcatgtttcaaatgaaactattaggaaaaaatatttgcctgcaaaagcagtgaatttggatttatatttgatgtatgtttctataatcgttttattcggagaattttatgacagctatcagaccatggaagctactagggatttcttaactataaatgaatggctatcaagtttaaatgagaggattacagtattaagcgaccatgatgatgaaagattaaaggaattagatcgtgagtttgattataattggtctgccattatagaaaagtgggtggatatggatgaaattaaagaaaccgcaaagtctcaagatgctagaactataagtagaaaaagttttttaaatactgtaaagcaatttttagaggctcaggaactagtaaaggatatcggtaatgaagagcttgagttaacagaaaaatctaagaacataattcaaagatactatatggaatatgactataacagaggaattcttgattttatgtatagtcttgatcataagaagggagaagaataa

SEQ ID NO: 51757 - DNA, 1026 bp, Clostridium cellulovorans 743B
atgtataacacaatagtcgaatatctaaagaactataaaaaatcaaggataatcttaggggaacttgaaaaacttgcaccgggagatatggagtacattatctttgcacagaatataagaaagcttatagctgataatattcttgaagaaataagtcctaagaataataacggtaaggaaattcctctcgcctataaatttaagataaaaaagtatgaagttaaaaaggattatattaatgaaattcaaagctacatcttaaaggttgatggagctatagatttgcagaagtattttaagttaagcgaggaaacttggaaaaaggacgtaccgtttattgagaaaataaatgattatatagttaagaagggtttcccagaagatgatgccacctctcaagaaagatcttttcatatagttggtgatgaaaaatggattgatgagaaaggtggaaagacgcttttagagaggatcggtttatgggaaaaacttaatatcgttaataattcagatcctttgatgttagctattaatcctaagaggattattgaaattaacgatgataagtcattatcatattatcatcttattgtagagaacaaggctaccttcatggcgttgatggagggattagaggaaactgaatttacttctcttatttttggttccgggtggaagatagtttctaattatagaatgttagaattacagctaaatttgaagggcaatcataagttagtttattttggtgatttggataatgagggtatatctatatggaattctctcaatgaaaaaatacaagcttctttggctatagatttttatgtagagttattaaaaaaatcttgtgagctaggaaaagaaaatcaacttagaaatgataatgcgataaaaaactttcttagttttttcagtgagaaggataaaaatacaattttaggatgtttgggaagcgaaagatatataccgcaagaggctttaaataaggatgaacttaagagtatatggaggagtacaaggtga

SEQ ID NO: 51758 - DNA, 1530 bp, Eubacterium eligens ATCC 27750
atgaagaatactatggcagagaatatgacaggtgatatcatatcggatcaccgtgaacgaatgcttaatctgaagaaatattatcctttcttcagactgatagacacatcattttctaatttcaaggatggcaaatacgaaatccttgatatgggctatatagttatggcggttctccgtttctttatagaggagaataattttaaggaaaaggatgttacatatcccgaatatctcgatttcttaaggctgatacttaagagagatttcgggcttgatttgaatgaacaggacagcaaggagattgctgattatatatttgacaagataaagaatgatggcaggccatttgaattctcgtattttgatccggtggacaggaaaaagagagtttcaaggatgaagataatcgagagttcaataagagacaataccgtgtggtattcgataagccctgatgctattgaattctatcttgataccaaggaaatcaaggacgagagcaggataagcgtatcccagcttcttcttgaaaaaatgattaattcacagaacttccgtggcggagttgaagtggttgaaagaattaacgaagaggtcaaccgccttaagttaaagaagaatgaagtgctgacaatattgtcgggcgatgtatttgcaggaatagaggcttatgaggaattcgtcaagacaggaatgaaatggtttgatgatgaagaaaagctttttaagaagaaccgtgaccttattgcaaaatcaatcgagaagcttaatgcatcgggcagcacaggcgaaggctattacaggacgatgaacgaaatatacagtcttgagactcagcttaagcaggcaatgaacaggcacagcgagctgttaaaggattgtacagaaatgcagaagatgaccgatgacgcagtaagacgcgccaagcttggcagattaagaagccatatggatttcacatcggcactttcagatatgattaagagggacaatgcagatatattagtcacaatgttaagtccgcttctaaagccgaacataagaaagacatttgacctgataagcattgatgatgcgcttatggtgaagcctccaagatatgaggagaaagagcttataagcaatgaaagaccggaagatattgaattcgaagatgagattgaagaaaagagaattaaggataattatgtattccttatgaaaaatctcattgtgtgtttgaaaaaatcggacattataacactcggtcagtttgcagatgcaatgaagagggcgtatggtgagcagattttaagaaatgcagatttcttctctttctttgttaatctgtgccagaaggatgagtaccagcttggcggtgatgcgggagaagatacatttcttgatgcatacttaggggaaggttttaaagatacagaaagctttacatttgcaataagaaaagggcttggcgggcaggttatattgtcggataactgtatgatggcagatgttgaattggtacgaaaggaagcacatggagaatag

SEQ ID NO: 51759 - DNA, 717 bp, Eubacterium eligens ATCC 27750
atggagaatagaaatctagataaggcgctggacatagtttccaagcttatcacaggggaaaatgtgtctgagaggggcgagaatgcagctctttatcaggaatacaataataatgcagaagtgtatgacatcgttcatatgtcacttaagaaacttaatcttaacatatatgaatataacaatggtctgtatgtgagtgcaggtgataataacagggtgtttggatattctaatgaggaattaagaaatgtacttggattaagagttaacaaagaattatatcttgcgtatttcataatctacaacataataacagagttttattcagatacaatgagttcaacttatgctgagttcataagacttgaggacatcattaaaaatgttgataagacaacaggtggtattgtcgataagagcgcagggcttgtgcttgatgaggttgaggagaacagctttaagcagatagcacttacatgggacgagcttccggtgacaacagtagaggatcagacaggagcgagagcagcaagaaattccaagtcgggtatggtaaagcttgtgcttaatttctgcgttgcgcaggaacttttagttgagagtcaggacagatattatccgacagacagattcagaagtcttatagagaattattttgatgattacagaggacgatttgccgaacttatgaatggaggacgcgatgccacagattaa

SEQ ID NO: 51760 - DNA, 4434 bp, Eubacterium eligens ATCC 27750
atgccacagattaacagaatcagagttaataatgttaaatataatttcggtacacaggtgtacgacgatttcgtgatgcgcttcaactgccagaatactatatatgaccttgccaatggcggtggtaagagtctgcttatgctgcttcttatgcagaatatgcttcctaactgcacacttgatgacaagcagcctattgagaagcttttcagacagggaagcggtaatacatgtattcattctttggttgagtggaagttagatccatgttatcagaaggatggtttcaggttcatgacaactggtttctgtgcaagaaagggaagaggcacagacgatgagaatcaggatggacaggaacagacagctgcaccgacagcaagtgttgaatactttaattactgcatattctacagggagtttggcgataacgatattaagaatcttccacttgtaagtaatggagagagaattacatataacggacttaaggcttatcttcgtgaccttgagaagggcgggtacaaatatgttgttaagatatttgacagaaaaggtgattaccagagctttataagtaactacggaatatatgagagtgcatgggaaattgtgcgtggaattaacaagacagagggacatgtaagaacatatttcgagtcaaattataagacaagccgtaaggttgttgaggatctgcttatagaggagattatccagaaatccttcaataacaagctgtcagttgataatgatgagggcatgatggctaagactcttatggatattaaggacaagttagtggagctttcaaagaaacactcacagcttggagcatacgacagccagattgcagctatcgacagttttaaagaatatctgtcgacatatgaagcattttacaacagaaaagaagagatagagaagcagctttatgacctgcttcttgttgctatgcgggaaagtgataagaaggataaggaacttaagagtcaggacgatcttatcactaagatgtatgatgagcttgcccaagagaaggaagctatagcagttgcagaggttatgtctgaaaagaattcgatggcaggagttgagagccttgttaatgagacaagaaaggcacttgaacttaagaatactgcaattgaagaggcaagaggaaagctttctttgatggagtctgcgggtgattataaagattatgcagagtacgagaagtcttataaaggacttcagattgcgatagataacagattaagagaagatacggatataacagcagagttaaagatacttgttgcaggttacagaaaattctatgagacagagaccaaaagacttaaggaaaagcttgatatagcagctaaccgtgttaaggcgcttgaagtcagattatcagaggctaaggataaccttagaaatgctgacaaagaggcggcaggtcttggcagtctttcggataatcttgagaatgagatacaggaattacagacacagcttggagcagctttatcagatgcaggaactgtcgtatgtgaaaatgcgtctgaagaatatgacaagtcattcagcgataaagaactgttaaagaatgaagagacaagaatgtccgaaaaattcaatgatgtgcagcagcagttaatgtcacttaatgagacaatatctgccaataaagcacttattgatatattcacagagcagtcagaaaagctagaaaaggctgatgaggctggaaatgctgataacgagcgcatgggcaaaatccgtgaaatatatagtgcagataatgacgaggcaatgctttcggttattcttgagacttaccagaagatgcgcagtgaatatacagaagagtgtaaggcagcccaggaacttgatagctttattgacaatgcaagaaagggaacatatatctgtaagagtcctgaaagagacaggcttaaggaataccttgagagccagtatggttcagatgttgttgagggtcatgagtggttcgcagccctgaatgcaggacagaaaagagatgtattaaagagaacgcctttcgttgagtacgcatttataataaagaacgatttcgagagaatcaaagcagatgagatgcttaaggatttcggcaagggtgcggctgcttatcctgttataagcgagcaggtgcttattgatactaagttagagattaacaaagacctgattgtattcgcattaaaggatatgtcattccttcgtgatgaggcaaagcttgagacacagattaagcttgcacaggaggagcttgattcgcataaggcgcaggcaggaaagctggccgacagaatggggcttgtgtggaatgattatacatttgcacttgtatataatgctgcgtctggaaaggtggatgcgtccgaggcagaagcaatcagattaaagattgctgacagcgaggctgcaattattgaggctgagaagaagagaagtgcattaaatgttgcaaaggaacagcttgcaggtcagctttcacagacaagggcttacattgaagaaaaagaaaattcatgcaggattctttcacagattattgatatgaattcttctatagacaagaagtatgagaagttaaagtcacttaaggcagacagtgaagctgcaagaaaccgcatatatgagtgcgaggaggcagcagcttctgctaattctgagtatgatactgcaagagattttgaggacagtacaagaaaggaatatgaggaaatcattaagtcatgggaggagcagtatgcaccttattatgatgaaaatgtttcgatagaaatcgatgatgatacataccgtcttgataaggatgaaattgagagcagattcaccggattaaagacagcactttcacagaagaacagtgactttgcagataagcaggcgctgatgaaccatctgtctgcatctatgaacaaatgtcgtgatgcaatagagtacagaggttatacatttgacgatattaaggcaaagtatgaagccggtgagattatggcagcaggttcacagcagttaaggaatgccaaggatgctcttaataatcttgtgaagagcagtgatgctgtaagggaagaacttgagtcacaggaagcacttcttaacagacttgagggaagtatcgcgcatggtattaaccagattgagaataattatggaagctttaatgaattcccatgcgatgacccggatggattcattacacagcacaaggtacttattaagaagttagaggataacaccaaggttcaggaaaagacacgcagacagatgtctgattcattaaaagacatacttgtatgcagaaaagaccttgaaagaattgtgtcagatgcgggcatgcatgttccagaagaattccgtccggaggatgcacagggaattacagctaatcttacagaatatgaggctgttcataaagaatatgcttcaattaccagattagagtataagaaggttgatgaatttaataagaataaatctaaacttattgacctgcttaacggatttaatgcagtcgagcttgcagatgaagtaaggatatcgcttaatgttcctgaaaatgtggttaagaccagaagtatgattgaatcgttaaatgagacgaacacatttatacagttagaaaaagaccgcattgccaagggtatagaggatatgcagatgattaaggataacttcgaaaatcgttgtatccagacatgcagtaacattaagactgagcttgaccgtctgccacagttgtctaatatcaatcttgacggagaacagattgcaataatcagtctgcagattccttatataaaggaagaattatataaggaaaagatgtctgaatatattgatgaaactgtttttatggcggaaagttttaaagagcctgcggaaagactcaagtatataagaaacagactgtcatggaagagacttttctcagttattgtcacagatatgaattcaatcagaattaatctgtataagagagagagaatcaaggatcagagccgttatttaagatatgaggaagcggttggctcaacaggacagtcacagggtatatatatccagttccttattgcgattatcaactacatatctaatatgaattcttcaggtaatgaaggtgttgagggtaagacaatattcatagataacccattcggtgcggcaaaggatatatacatatgggagccaatattcaagctgcttgcaactaaccatgtccagcttattgttcctgcaagaggtgcaactcctgctattacaggaagattcgatgttaattacatacttggccagaagctggttgattcaaggcagcagactgtggttgttgattattacagcagcacgaaggaatcagaattggaatacacgagaatggattacgaacaggcaacatttgattttttgtaa

SEQ ID NO: 51761 - DNA, 1638 bp, Clostridium sp. L2-50
gtggcaaagcagtacgtgatgatcaatgacataatcgaagaacataatgcgagaatgtataacttaagaaaatactacccgttttttgtgttatcggaaactgcatttacacagtacaaggatggacgatataacagtttggatatgggatatatcaccatggcggtactgcgtttttttattgaggaaaacaacttcaacgagagggacatcacatatccccagtgtgaagcatttataaaagagctactgatccgtgatttcgatattgagatcgaggacgaggatatggcagacctgatcttatatatatttgacaagatcagaaatgacggaaaagcatttgaatttacattttacgatccgggtaagaagcagaagaagaccggacgtgtcagactgatcgacagccggatcacggatggaaaagtgctctattacataactgcggatgggatagaattctatcttgataccaaggagatcaaggacgagagcaagatcaatgtagaacaggttttgcttgagaagatgatcaccggagagaatttcaagggaggtatcgaggttgtcaagcggatcaacagcgaagtgaaccggcttgtaagagaaaaagacgatatcgtagatctgctttcttacgatgtattcgccggggcagaagcttatgagaaatatatgaagacggttggaaaatggttttccgaggaacagaaattatttgcgaagaacaagacgctggtcgataaggcagttgcgaaagcgaactttgaccacctgacaaaaggttctacgttgttggatgagattagtcagttggaactggaattgaagaagaccatattaaagcatggaaatctgatcaacagcaccatggaattacagaatatatcggacaacattattcagaaggcgaagttaaagcgtctgcgtccggtatttgattttgaaaaggaattacagaagatgatcagggaggatcggccggataagatgggcatgatccttgctcctttatttgcaccggcgatcgcaaagtcattttcgatgacatcgatcgacaatcttcttacgctcaaatcagaggatgaggcgaagatggtgacagcaaagaaagaagatgtaaatgcaaacttccgctatgaggatgagatcgaggaagaacgctccggcaggaactacggtaagttattctttgaactgatggatgtacttgtccgctggaagaaactcagcctgaaagaattcaacggattccttgagatacgatttggaaaagaaatctatgagaatgccgattattacgcattccttacccatctggcacagaagaaggaatatgatatcagccggatgttaaagaagcaggataccatgcttgaaaagctggtagttgacagcatccgggaatatcagaaggttcgggacagcatcggagagcagcagataccacaggctacagccgacagcatttcaaccgtaagcgtaccggacatttattcggaagatgcttatgctccggacatctcatttgagccatacaaagatatgcgcttcacgctgacctttgacagcaccgaggagatcccggttggagaggatatgtatgtgacgaacatcctgtttgaagtgcgatag

SEQ ID NO: 51762 - DNA, 726 bp, Clostridium sp. L2-50
atggacagcagaaatttggataaggcgattgagatctacgccagactgatacagggcgaaacgatcgcgaaagcaagcagagaaaacagtgctctgtacgaagattattatggaaatgcagaggtctacgagattgtaggcaatctgttaaagaaactgaatctgagtatttacgaatacaatgaagcactttatatcactccgggtgaaggcaaccgggtatttggttatacaaatgacgatatgaagcgcatacttggactgcggctgaataaagaattgttcctatgctatttcctcatgtatgtgatcctgctgtatttttataaagattccggaagctatcagttccgtgaatttatcaagccggaaaaggtgattgaagaggcggacaaatatctggcagatgtgacgaagcggttgtctgtattttccgcagaggatgtcggggcagagagctttaaagcggttggactgctgtgggatgagcttccggcagtcagtcatgcagtctatgacggagaaaagacgaaggcgtcaaaggcatccaaatccggttatgtgaagctgacatttaactttatggtcagccagaaattatttgtcgagaacgaagaacgctactatccgaccgatcggttcaaggcgttatgtgagaattactttgaagaatacaggggacgtctgtatcagctgcttggaggtgaagaggatgccgtgcattaa

SEQ ID NO: 51763 - DNA, 4479 bp, Clostridium sp. L2-50
atgccgtgcattaaccgaatacgagtgaataatgtaaaatacaattttggtacacagcagtacgatgatttttcgatgcggatgtatggcaagaacacgctttatgaccttgcaaatggtggaggaaagagtgtgctgatgcttcttctgcttcagaatctgataccgaactgtacgttagatgataagcagccgatcgagaaattattccggaatggcggcggcaatacgactattcattccctgatcgaatggaaattagacgatgcggatatcaaggacggataccgctacatgacgaccggtttctgtgctagaaaagcaaaggaatccgatgaaggagcatcacaggacggacagacggcggcgatcgaatatttcaattactgcattttctatcgggattacaataagaacgatatcattaatcttccattgtcaaatggtaatgaaagaattacatacagtggtctaaaatcctacattaaggagcttggacataaggatatgagccttgaagtgcgtctgtttgagcggaaaggggagtaccagcggttcatcagcgaatatggtctgcatgagagccactgggagatcatccgtggaatcaataagacagagggtcatgtccgtacttattttgagacgaattataagacgaccagaaaagtagtagaggatctgctgatcgaggagatcatagagaaagcatttctgacccgtaccggtagggatggggatgagagcacaatggcagaaactctgcttgacattaaggataaattgaacgtattggcacagaagaagagggatattgcgaacttcgatcatcagatcgagctgatcaatgtcctgcaggcaaaggtcaattcctgtatcaaccagtacgaggcacacgaagatatcacaaggcagcttgcggatatctatgtgacgggaaaagaactgacatcgagggaaaatgaacatctggaagaactgcttgtagcaaaacagactgcatttgaacagaaggaaagtcagaagaagcggttggagaatctgaagatcaccagagatggtttccgtctgcaagagcttcgggataagtcagagcagttaaatgcaaatcttgctgaaaatgaacgacaggtatcggcattaaagcaggatatgaatatgaaagaaagtatcaatgattatctgggttatctggaagataagaaacagttatccgagaaccagaagatcatcgatcatatcttacagaataccggtgcagaccgcgagaagatgacggtctatgcctataacagaaagctcagggatgatgcacatttgaaagagcttcttctggcaaaggaggaggtcgaacagtcgcatgaacatgcggtgaaagaagctgattactgcacaaaatgcatcaaagagggcgagatcgagctggccgtatccggagacaaccggagggcagcttcggacaaattacagtccttaaataacaagatatccgagctgacctcacaggttgccctgcttgttgtgtcggatgcggcaaacgtgatcgaagcatccgaagaaaaggcagaagaactagaggcatccttacgggcacttgcagagagcatccgggaagatcaggagcaggtatttgaagaccgttaccggttgtcacttgcggaaaacagtctggaaacactggaaaaagaatatgagacgagccatctggatgcagaggaatatcgtcaggcagctaagaagttagaaagcattatggcggtatatagtgtagagaaagcagaagaaatcatagatgcgatcaatgcaaggatcacaggaacgctgaccgagacgatcaccagaaaacaggagattgaacgtttgctcgaaagacgcaaatatctggaatccggacgtttattcggaccgagtgcaggagcatcggcagttattgattatatcgtgaccagacatggacatatggcgatgcacggagctgattatctggcagcacttaagccggagcagcggacggagatcttgaagaaaaacagagcacttccgtatggagtagtcgtgaagaatttcgctgatatagccgaagatatcaatctggattcgattcagacggacaatgagatggttttaatctacgatatggatgacctgtccgaaaaggcagttaccttaaacgaaaatgccgttatggtctgcagaaaaggcgaatatttcacagacgatgagattctgaaatcgttaaaagaagaactgacgatccagattcgtggtcttgaggatgagatttcgatgatcgatgagaagcttgcgacctaccgggaagatctggcatttgtcggtcatctggcagatgagaggcacctggatgcggcagatattgaacgaaagctgaatcaggatctgttaaataaaaaggatgaggtccgtgagcttcaggatcgtatagcagaacggacaagccggatcacgcatcagaaagaagatgaggcatccgtaaaagaaaagctgcatgagctggaggaagacaaatcgatcctgcttcgtattaaggagctttctgatctggcagttgaggaagaagtccgttatacggagaatgttcagaaagagcagcggatcaccggacagatcgaagaactgaagagggatgcagtcagatggaatacaacagtgagcgagacggaagcacggatgcttgcgatcgcaaacagtattcaggatatacaggataaatggcagaattatttcaaaccttattacccggaggatggaaaagtggatgtgtcactggatccaaagcagaagattcaggtggcacttggacaggaaacggaagatgtatccagacgggatatcgagatccttacgatctctgatgaagtgctagagacagaatttatggcgatgtatgcagtagcaaataaaaatgcaccggatgtagaggataagaagaagctggttcaggcattgtcacagtcaatggatcgtattctgcatacgatcgagaagcgtggcgtgaagctttcggatctggaagcacagacacagttatttgccacatccgagcagcagttgcaggcactttctgatgaattgatgcgtctggaactggtatcagcatcgatggcggaagaactgaagaatgtatcaaaggcttccggcagattggaaggaaatatcgaatatgcggttgccagtctgaaaaagacttatggtgaagatgcatatgcagaagaacagatttctctaagtgaagcagagcaggcgatcacacagggcgatcagatccttgccgagctggaacagagttataagaagacagcagaggaatatgagacctgtaacaaagagcagggctatatgatcgagctttataaagatgtaaaacgtatcgtagatacaaatgacattaatgtagaaaacggtaagctgttagaagccggaaaagaggagctgcgacaggcatttgagaccagtctgttacgatatgacagaagccgcaagaatttggaaaagacaagaaatgaactgatgcggttcaagggacagacagcggaagcactcagcgaaatgggtgtattcgagatggcagaaacgatccgcagagatgtcatcatacccgaaaactactatgatgcaaaggcgttgcttgaaagcctgttacagatcatttcctatatcgatctggaaaaggaaagagtggaaaagggaatcgaagatatggttgcgatcaaggagaatttctgcagtcagtgtttacagcgttgtatggatgtaaagactgagcttgagaagcttccaaaattatcgaagattaccgtcggagaagaagtgatccgtatggtcgatctgacgattccttatgtaaaagaagaatttcttgcacagcgcatgtctgattatattgacgatatcgtaaaaggcgcagatgcctatgaggatgagcggaagcgtgttcgctatatccgtgactgccttgcattgaagcggttatttggcgtaatggtcacagacatgaatgcgatcaagttgaaactatataagagagagcgtatcaaggagcagagccggtatcttcgttatgaagaagcggttggtagtaccggacagtcacagggtatctacattcagtttctggttgcgatcatcaactatattgcaggtatgtattcctatggcgcagagggcgagatctctacaaagacgatctttatcgataatccgtttggtgcggcaaaggatgtatatatctgggagccgatctttgccatgcttgcagctaatcatgtgcagttgatcgttcctgcccgtggcgcaactccggcgatcaccggcaaatttgatgtgaactacgttcttggccagcagatggtcggtaaccgccagcagacggttgttgtcgattacaccagcaagacctcgcaggaggaactggaatatcaggacatcacctaccagcaggcaaccttcgactttatataa

SEQ ID NO: 51764 - DNA, 1629 bp, Coprococcus eutactus ATCC 27759
atggcacttaaatacgtgatgataaatgacataatcgaagaacacaatgcgagaatgcagaacctaaggaaatattacccgttctttgttctggctgagaccacatttgcgcagtataaggaagggcgctatgcacagctggacatgggttatataaccatggcggttctgcgtttttttattcaggagaacagcttcaatgagcgtgaggtgtcatatgacgaatatgaagaatttatggggcagcttctcgaccgtgatttcgacgtggagattgcggaggaggataggactgacctgataatgtatatatttgacaagatcaagaacgatggaagagcatttgaattcacgttctatgatccgggaaagaagcagcgcaagacgggacgagtgaagctgatagacagccatatagtggatggcaaggttctgtatttcattactgcggatggaatcgaattctatctggacaccaaggagatcaaggacgagagcaagatcaacgtgcagcagcttcttctggaaaaaatgatcgttggagagaacttccgtggcggtatcgaggtcgtgcgcaggataaatagtgaagtgaacaggcttatccgagagaaggatgagatagtgaatcttctgtccatagatgtgtttaagggcgcagaagaatatgagaattatatgaagactgtcggcaaatggttcgctgacgagcagaagctgtttgccaagaacaaggcactggttgacaaggcgatcaccaaggcgagctacgacaacatgggcaagggaaacatgaaagcaatggaggagataagccagcttgagcttgagctcaaacggacgatcatcaagcacggaagtctgataagcagcaccatggagcttcagaacatatcggacaatattatacacaaggcaaagcttcagaagctgagacctgcatttgactttgcaggacagcttcagagcattataaaagatgacagaccggataagatgctcactatacttgcgcctctctttgctccgaggatcgtgaaaacatttagtatgacatccatagatcacatgctcacgctgaagtccgaggacaatgcgaaaacaacaaaggtgaagaaggaacagctagatccgaacttccgttacgaagatgaactgctcgatgagcagataagtgccaacttcacaaaactgttccacgaactccttgaccagttgagcaaatggggacacctgagtctcaaggaatttaatggaattctggaggtgaagtttggcaaggagatatatgacaacaaggattactattccttcctcacacacctggcgcagaaggacaggtacagtgtggatgagatcctgaagaagccggataccatgctagagggaatgttggtggatcacatagagaggataaaaacaggcaaaggtattgctattttgcagaatcaaaccgatggtgatatggggcatggcggttccggactctcacgtgagatgtacgcgccagaactcacactggatgcgttcagaggcatgacatttacactggaattccatccagacgaagagatacagattggcgaggacatgtatgttacgggaattcagtttaacaaaaccagctga

SEQ ID NO: 51765 - DNA, 720 bp, Coprococcus eutactus ATCC 27759
atggaaagtaagaatctggacaaggcgatagagatatattccaagttaatatcaggtgaggagatctgtaagaagcatcccgacaatggcccgctgtacgatgagttctacggcaatgccgaggtgtacgatattgtcatgaatatgatgaagaagatgaacctgtcactgtacgagtacaatgacagcctgtatataacagccggtgagggcaaccgggtatttggctatacaaatgacgacatgaagaagcttctgggacttcgtctgaacaaggagctctatctgtgttacttcattatgtatatgacacttctctatttttacaaggattcatccagctatcagttcagggagtatgtgaagtcagagaacattatagatgagacaagcaaatatcttgcggacataacgaagaagcttgatgttctgtcaactgatgaggtggagcaggacagcttcaaggcgatagcgcttctgtgggatgaactcccggcggtgacgggcaatcaggagggcgacagcgccagggcgtccaaggcatcccgggcgggttatgtgaagctggtgttcaacttcatgtcggcccagcggttatttgtggagaatgcggacaggtactatccgacagacaggatgaaggctttgtcggagaactattttgaggaatacagaggacggctgtatcagttgcttggaggtgaagaagaggatgcctag

SEQ ID NO: 51766 - DNA, 4476 bp, Coprococcus eutactus ATCC 27759
atgcctagtatcaacaggataagggtcaacaatgtaaaatataactttggtacacagcagtacgatgacttcaccatgagaatgtatggcaagaacacgctgtatgatctggcaaatggaggaggaaagagtattctcatgcttctgctccttcagaacctgataccgaactgtactctggatgagaagcagcctgtggagaagcttttccgtgcgggcggcggcaacacagtcatccattcgctgatcgagtggaagcttgacgaggcggatataaaggaaggctacagatacatgaccaccggattctgtgccagaaaggcaaaggatacggcggatgccggggaggtacagaaggacactgcatccatagagtattttaattactgcattttctacagggaatataacaagaatgacatagtgaatcttcctttgtcggagggcaatgagaggatcacattcaatggtttaaagacgtatctcaaggatctcggacacagggatatgagtctggaggtcagggtatttgacaagaagggcgagtaccagagatttataagcggctatggtctccatgagagccactgggagatcatacgtggaatcaacaagacagaggggcacgtaagaacgtattttgagacaaattacaggaccacaaggaaggtcgtggaggatctgctcatagaggagatcatagagaaggcatttgccacaaagacaggacgaaacggtgaggaagacaccatggcagagactcttctcgacatcaaggacaagctgaacgttctggcacagagaaagcgtgacatagccaactatgaccaccagatagaattgataaatgtgctcgagggcaaggtgaactcatgtataggtctctacgaggacaacgacaggatatgtaagggcctggccgatgtatatgccacaggaagggcgtgtacacaggagggcgacacacatatggaggagctggcgaaggcaaaggctgacgccggggagcagatggaacagcagaacaagcgtctggcaaatctcagggtcaccagggattatctgcgtcttgaggacatgaaccgcaagatggatgacactgccacgcagatagaggacaacgagaagaagcttgcggagctgaaaaaccagatcggctacaaggagagtgtaaatgactaccttgtatacagggagaacaagcgacagtacgatgagaacagactgatagtcgacaatataagaaataacatcggatcatccagtgagaagatggcggtgtatgcatacaacagacgcatccgtgatgagaagaagcttgcagagctcatggcggcaagggaagaggcccagaccagctatgaccatgcacttgaggaggcggagtactgcagaaaggtcatgagggagggcgagatcgcccaggcggtggcggagaacaatatcgctgatgccacagccaagattgatgagataagtgcccgcataagtgagctggctgcatcggtcaacctgctcgtagtgggtgatgtgaaggatatgatgaacaaggctcaggaggagtctgacaggatacttgctgagatgacagagttggagatagccatagcagatggcaggacaaagctgtacgatgacagatacagactgacgactgtgcaggccgagtatgatgcgctggagagaagctgcgaggatgcaaggcttgacgccgaggcgtacaggcagtcgggaagccagctcgacagcatcatggcagtatactctgtggagaatctacaggatataacaggtgttataaatgacaggataaggggtaccataacagagacgataaagcgtcagcaggagatcgacagactgacaaagcttgcgaaatgctatgaggatggcagaccatttccgccgtcggagggtgctgagactgtgataaactacatctccaccagacatgggctcatggccatgcatggtgcggattatctgtcggcactcccgggtgatacaaaggaggagctgcttcaggcaaatccatacctaccgtacagtgttgtgacaaagggatttgatagtctggaggacgatataaatctcggttcgatagacaccggcagcgaatgtgtaatggtgtacgatatggataagctttcagactcagcgatagttcccgccgagaacatgcttatcataggaagagacaggaaatatttcatgtctaaggactccatagaggatgccagaaaggcaaatgctgataagatagcaggtctcacggaggagatcagtctgataaatgagaagcttgcgacttatcaggaggatcttgcatttgtcacaaggcttgtggatgcgagatatacaggtgccgaggacagggagagagagctgaaccaggcactgctcgataagaaggatgagcttgaggagcttaagacatcgatcaaggttacagagacggagcttaagaataacaccgagagatatggagacctgcagcagagtcagcagaaggaatctgacagaagacagacatttgtcatgatagagcagctgtcggatcttgcaagaccggaggagcagagacttgccgagtataagcagaggaaatctgaccttgtggcaaagctgttaggacttcagagcgatgtgctgaagtggtcgacgacggttggagagactgaggcaaagcttgcggggcttacaaggaatatagaggatatccagtacaagtggacggagtatttcgaaccgtatctgccgaagtctgagaatgtgggagttgctgaaaatacagatggtgcaggcgtggctgctgcggcatggcaggacggaataccagaggaatacaaggagaccttggacatttcagatgaacggcttgaacaggaatttatggctatgctggcggtttcaaaggagcatgcgccggatcttgaggacaagaagaagctcatggatgcgctgaagaagtcaatggacagaatacagaagaccatagagaagagaggctttgacatggcagtatttgccggggcaggagagctctatccgacgtctgaggacaatctcagggagatggacgatgagctggcaaggctcacgttgatagaggcgtcgctgatgcagcagcagaaggctgaccagaaggcgtatagcaagcttgagggaagcatagagtatgcgatagagaacatcaaccgcacatacggcgatggcagctatgtacgtgaggagatatctgcagccgatgcagatacagccatagccaatggagatgcggtgcttgcggatatgaaccgcatattcaaagaagctgagaaggcgtacagcgattactataagcagtatggtttcatggtggatctgtacaaggatgtaaagagaatagtcgatacaaatgacatagatgtgtccggtggaaatgtactggatgaagacatggataccctcagacagttatttgagacaagtcttatgaagtacgacaggagcatgaaggctcttgaccgcgcaaagaatgaaatcatgagattcaagggacagacggcggatacactagtggagatgggtgtattcgagatggccaatacgatcagacaggatgtgcaggttccggatacctacagtcaggcaaaggaacttctggcaaatcttcttcagattattgagttcatcaagctagagaaggagcgcgtcgagaagggcattgaggatatggttgccataaaggagaacttcgagaatcagtgtgtacagagatgtatggatgtcaagactgagcttgagaagcttccaaagctgtcacgcatcacggtgggcgatgatgtgatcaagatggtcgatctcaccataccttatgtgaaggatgaatttgtaaagcagagaatgtctgattatatagatgacatagtgaaaggcgcggatgcctacgaggatgagagaaagaggatcaagtacatccgtgactgcctcggactcaagaagctgttcggcgtcatggtcacagatatgaacgccataaagcttaacctctacaagagggagagaataaaggaacagagccgttatctcagatatgaggaggctgttggaagtacgggacagtctcagggaatctacattcagtttctggttgctgtcatcaactacattgccggaatgtacagtctggcacctgaggagtcgatacagtccaagactatatttatcgataacccatttggtgctgcaaaagatatatatatttgggagcctatatttgccatgctggcagctaatcatgtgcagctcatcgtacctgcccgtggcgcgacaccggccatcaccggacgctttgacgtgaactatatcctgggacagcagatggtgggcggaaagcagcagacagtcgttgtggactacacaagcaagacagatcaggaggagctggaatatcaggaactttcctatgagcaggcaaccttcgacttcatctag

SEQ ID NO: 51767 - DNA, 1539 bp, Butyrivibrio crossotus DSM 2876
atgcgtaaggaacatattttagttaatgaaataataacagatcatagagagcgtatgctcaacctgaaaaaatattatccattttttgaactggcaaagacctctttttcatggtttatggaaggacggtatgaggacaggctggatatgggttatattattatggctgtgctacgcttttttattgaagaaaataattttaaagaacgtgaagttacataccctgaatatgcaacttttatgaaatcctgtattttaagggattttggaatagtggcaggggacagggaatataaggaacttacggactttgtttttgataaattgaagaatgacggcagacctttttcatttgtttactatgacccggtggacagaattaaaaagacttcgagggtcaggctgcttgaaagcagaatagaagacggagttgtatggtattccataagtccggagggaatagaattttatcttgataccaaagaaataagggacgaaagccgtataagcgtggagcagcttcttctggaaaagatgattaagtctaaagattttaagggcggaactgaagtcgtaagaagaattaacgaagaagtaaagcggttgagaataaagaaaaatcaggttatggaacttctcacaactgatatttttgcgggacttgacagctataaggagttttttaatacgggaataaagtggtttgatgaagaacagaagctctttgttaaaaataaggagcttattgaaactgcactaaagagaacagaaaacgatattaacccggtacagggtgaaagtttcagaacgggaagggaaatccacaggctggatacggaacttaaggttgccatgaacaatcacagcgagcttttaaaagcctgtacggagcttggcattaaagcagatgaaataatcaaaaaaggcaaacttacaaggttaaggacacgttttgacttcaaaggaattatgaaccggattataaaagaagacaaaacggatatattagagtacattgcggcaccattttttatgcttaatatcaaaaagacttttgatgtgggtaaagtggaggatttgttaagctatagacctgaaaatgaagaaaaaccggagaaaaaggttgaattgactgaaaaagatatcgtttttgaagacgaacttgacgagagaagatttaacagaaataccaggactttatttttgattcttttaagattgctaaaagaaaaaaagacagttatgtttaccgaatacaatgagcgggttagaaatattttgtccgacaaagtgcttgaaaacggggattactatacgtttctcattcatctttgcgagaaaaaagaatatgtgctggaacagggcgaagcatcggaggacacatttcttgatgcgatgattaaagaatatatgaatgaaccggaattttcggaatttataggaatgcatttttatctggaacttgcaggcggagaggaagaagagatagagacttcccatattgcaaacgttaccaatttcagaattatattagtataa

SEQ ID NO: 51768 - DNA, 729 bp, Butyrivibrio crossotus DSM 2876
gtgaggcaattcatggaaaacagaaacttaaacaaggcacttgatatagtgtcaaaattaatcacaggtgaggaagtgggaagaaaatcaaataccatgctttacgaagaatactgcaacaattctgaggtgtacgatatcattaccgaaacctgcaaggcacttaatcttaatctctatgagtataatgatacacttttcataagtgcaggcatgaaaaaccgtgtgttcggatattccaacgaggaactgaaaaggcttatgggattaagggttaataaagagctttttatggtttattttattatatataatattatcactgagttttacaaggattcttcaagtgcaacatatcttgaatacataaggatagaagatgttattaaatcggtggatgcttcacttcacggaattattaaccacgacatcggcgttacacaggatgaggaggaaaaagattctttcaaagcccttgcccttttatgggatgagcttccgattgtgagcattgaagacaaaggcagcgtgagggcagccagaaattcaaggacagggtacgtgaaactgacatttaattttttgacggcacaggcactttttgttgaaaccaatgaaaaatactatcctacagacaggtttaaagcaatggcagaaaaatattttgaagaaaataaaggacgtttatatgaaattttaaacagggaggacgaaaatgccacagattaa

SEQ ID NO: 51769 - DNA, 2997 bp, Butyrivibrio crossotus DSM 2876
atgccacagattaacagaatcagagtaaacaatgtaaaatataatttcggcacacagtattatgatgatttttttatgagattttcatgcaggaatactatttatgaccttgcaaacggcggcggtaaaagtgtgttaatgcttctgcttttacagaatatgattcctaactgtacccttgacgataaacagccaatagagaagcttttcagaccgggctgtgataacactacgatacattcgctcatagaatggaaactggatgcaggttgtgttaaaaatggaatgaaatatatgactacgggattctgtgcaagaaaggcaaaggagaattcggacaatgccgaaaggaagaacgaaactgccaatatcgaatattttaactactgtattttttataaagaattcggagataacgacataaaaaatctcccactcagtaaaggcaatgaacgtattacctacaacggtcttaaatcatacttaagggatttggagaaaaaagattatggcatcgaagtaaggatttttgaaagaaagggagattaccagaattttataagtgagtacggacttcatgagagccagtgggaaatcatccgtgggattaacaagaccgaaggtcatgtgcgtacatattttgagaccaattataagacgaccaggaaagttatagaggaccttttgatagagggaattatagaaaagtcatataataacagaattcgtaagggcaatgaagacgattcccagatggcaaagacactttttgatatgaaggaaaaactgacggagctgtcaaaacgaaaaacagacatagataaatatgacgagcagataagacttattaatatatttaccgataagatgggtgaatataaaagaatatttgaggaaaagaaaaagacagagaatgaacttatgcgatgcctttgcgtatgcaggaagagacttgcgggagaaaaggctaagacagaagaactttgtaacagaaaagaagaacttgcagcacatattaacgaaatcaaaagacgtacagccattgcggaaatcgagactgagacggttgagcttgaacagttagagaagctgattgccgaaacggcagcagagaaagagacgcttttatcttcttatgacaggcttaaagagaatcttagatatgtaaaagcggcttcggattattttgattacgttgaaaacaaggcaagatacgatgaacttaaagaactgatatccaacagcacatggaaccgagaagatgttttaaaagagttatcagaacttgcagcatttaagaagacaattgttgacagaaaaacaacggaattggaagcacggattgacgaaatcaaaactttaacagagaaggtatgcgcagagcgggatgaggcagccgataaaaagattaatgtttatggtgaaatcaacaaaaatcagggacagttaaaacagcttaaaaatgaaattgaagaactgaataaaaacacggatgagcttatgctaagatgtaatcttacatccaatgccggcattgaagatataatttccaaagcggaagatatgcttaaatcatctgacaaggctttatccggttacacctcccatatttcggaggaagaaaataatatttctgatttaaacagggaatatcttaagacagaaacagaaatatcatttataaaaaatgaagaagaaagggctgcaatactgtatgaaaaagaacagcagcttctaaaagatttaaaccagattaaaaatgtatacggtgagaatgatattgagcagcttattgaaaaaatagaaaaggtgttagccgaaattaccgaaaatatcgttgaagtaaaaggcagaattaagtatcttagcaattatgaaaaagcaataagtgagaataaacttccggaatatgacagatgttatgaagaagtcctttcatatctgaaaagcagatacgatgacgtgaaaagcggcgccgagtatattgcactaatggatggaaatgaacgcagtgattatattgcggaaaatccgatgctgccttatatgatttttgccggagacagctatgaagaaataaaacatgacgaaatgctttattcccttaacacaggctcttatattattcctattataaaaaaagataatattttaagagtctgtaaagaaaatatggtaggtgcgtgtcatgatttatcatttatatttaacgggacaggtgctaattccgagcttataaaaataagtgaagatattgacaaagaaaaggacacgcttgcaagattaaatgataaatataatgttataagcaaagatttgtatttttgccaatatgcagaaaataaacttaatgacagctcctcttacggagtgccggaggacttaaaagaagaaaaagagagacttatatcatatcttggcaggattagtgacgatatggaaatgtcaaaaaagcgtcttgaaagttaccggacttctttggaaagagagcaggcacatagtggtgaaacagcagacaatcttttgctgtataaaaaaataaaagaaaataccgacagactggcttccttatatgatgaaacaagaacttgtgaaaaacttacaggcgggcttacaaaggaacacgcagaactgtcaagaaaagtcaggtcatttgatgccctgcttacggaaaaagaaaatataagaaaaagttttgaagaggaagccgcttcaatcaacaaggaatataaggaaaagttcgagtcttatttcaacggagaagcaaaagaaccggatattgaagaagatgaaatcaataccagggcaggggctttgaggaaaatcatatctgatgaaataggagaacttgctgataaagaaaaacagcttgcacattatgatgcccttattaagaaaaatattgataatcttaaatattatggttttaccttagatgaggcaaaaaagcaaaagacgaaggccttttttcaaaggcatctgttgatgaaaggctag

SEQ ID NO: 51770 - DNA, 1635 bp, Ruminococcus sp. 5_1_39BFAA
ttgcaatacgaatttctgaaaaattttccaaaacgaatgaaaaatgtaggcctgtacggtgttcttatccaaaatagtattcagaagacatcctggaaacagtttggctttctgaaatttgatgaacagatgaatcttatttttgcagtaatgctttatattatggagcagtctctgagggaagagaactgtactatggatgatatcggagcctatattgataccatcaataccaggtatctgggtaaagaaatctcctatgatgactgcagaaaattaggagattttgttgtcaatgtgatcttatcaaatgaaggccgtgccatgtattttgacggctatgattttgaagagaacgattatcatgtcatgcatatcagctatgtggcgaaccggatcgtgtatctggatcaggaggttcgcagaacttcttattatcttacagacgacggatacaatctgatactttccacccttgaaatagaaaataatatgaagcttaccatccatgaaatgatcttccagatgcatctggaaaaacagagctatgataaggctgtggatgagattaagaatgtttttaacctgatgcgcatccagcttcagaagattcaggaagctatgggaaaaatccgcagaaatgccctgaattattcagtaaaggattacgaggaaatccttctggagaatctggatacgatcagtgacacaaaagaaaaattccagaaatacagggaactggtgcgaagcagggtaaagaagctggaagaagagaacatcaatgtgcgccgtctgggcgaaaaggaagaggagaaccttgagaatctccgtattattgagagctatctgaacagaaccattgatgagcaccagaaaatcctgagcagtcattttgacctgaaggcactttataccagagaactggaagcattgtcgcagatgtccctgatccggagattttccatgcgcaatgatttctatgataaagtgctggagaatccgtcagcactgggaaatctggactattttttaagaccgctgttcaaccgggaaccggacaaggtttataacctgaacaaagccttattatatcagaaaccgtctgtcagaaatgaggatgaggatactgaggagatgctggattttgacgaagatgcatatctgaaagagcaggaagagaaacgcagacagaaactgaaacgctatgagagcagtctgggatttctgctggagcaggcatctgaaaaaggtgaaatttccctttctgatatctggaaaaacattcaggagaacgagaaaaatgcagaagaaatgcagcagcaactgatcccaaatgttgaaatttttaaagaaatcatggtggagctgatacggaataaagagatcaatatggaagtactgaaaaaggaacgaagtgaatttatccaggatcagacagcagattttcagctcaacgaaatgctgctccagctttcagaagaaagattttcagacaaaaagattggtaaaatagaggtatacaggatagaagacggaagcacagtcacctttgacaatgttttcagcgaaaatggcgtgaaaaaaagcatccgctgttccaatatcctgatccgaatcatgagaaacgaggaataa

SEQ ID NO: 51771 - DNA, 741 bp, Ruminococcus sp. 5_1_39BFAA
atggcatacgaagcagaggaaattcgcaccagccaggagattttttattatcttctggagcatcatgagctgcgggaagaggacgatcagcttttatataaagcatatacagaggaagaatccatccggaatctggtgaaatcccagggagagattgcgggaagcaatgtggaacgctacggaaatgtaatctatctgattcccaaagaggagaataatttccttggcttttccaagcagcagcttaaaggtacactgtgcaaatccggggcaacggacaaggattattatctgtcacagtttgtgattcttacgctactggtagaattctttgacggacagggaagcagcagtaaatccagagaatatatgcgcgtgggagagcttatgaactgtctttccgcccgtctgaaggaaggggcagcagaagagactaccactgaagaggaggaagatggaaagaatcccaaagatactgctgggatttctttcaaaatcctttatgaaacttacgaggcgctgaagtctgatgacagaggttccaggatgaagacaaccaaggaaggctttatctacaatattctgatgttccttcagaaacagggactgatcgagtatgtggtgcaggatgagatgataaaaacaaccagaaagctggataattttatggactggaatcttctgaaccagaacaattaccagcgggttctgagagtactgggggtggcaaaagatgagtaa

SEQ ID NO: 51772 - DNA, 4440 bp, Ruminococcus sp. 5_1_39BFAA
atgagtaagattaatgcagtgcgtctgatcaacgtgaattataataacaatgcataccgtatcagcgatgaaactctgcactttaatggaaaaagcacactgatctctctgcagaacggcggtgggaaatctgttcttgtccagatgctgacagcgccctttgtgcatccaaaataccgcaataccaaagaccgattatttgaaagctattttactaccaataagccatcctttatcttggtggaatgggcactggatcagggtgcaggctatgttctcacaggtcttatggtcagaaaatcccaggatatggaagaggacagaaaagagaatctggatattattggaattgtcagtgaatatcagagcccctgtattcaggatatccaccaccttcctgtagtggaaaaaggcaaaaaagagatgatcctgaagaattttaactcctgcagacagctttttgaaacctacaaaaaagacagggatatgaagttcttttattatgatctgacaaactatgctcagtcccgccagtacttcaataagctgatggaataccagatcaattataaggaatgggaaactattattaagaaaatcaatctgaaggaatccggactgtcagatctttttgcggactgcaaggatgaaaaggggctgacagaaaaatggtttctcgaggctattgagagcaaactgaataaggacaaaaaccgcattaaagagttccagtctattctggaaaaatatgcaggacagtataaggataaccgttccaaaattaagcgaagagacacaatccgtcagtttaaggaagaagcaaatgggattcagactcaggcagaagagtatcagaatgcggagacagaggaaggaaaacagcagaataaaattgcctggtttatccatgatgtaaatggactcttaagccagactgagaaagctcatgatcatgcaaaagaagtgctggaaggtctggatcaaaagctttccagagtagaatacgaggagctttccagccaggtctatgactatgaggaagagaagaatcttcatatcggaaaccgtgatatgatcgatatggagcgtgaaaatcttcaggtgcaggcagaacagacagagaagaaacttcatatcctccaatgtgccagacagcaggattctgtgtcagaagaaaaaggggaactggatcttctcagggagaaaatcgcagttgccagacagcagggagctgatctggaaccggagagaaaagcacttggcctgaccttgaaaaacatttttgaagaacgtattcaggataacagacaacagcaggaaaacctgtctgaaaatatacagaaaaagggaaaagaagcacaggatgaggcgaatagagtcgaagaactggaagagaagatccgcgactgctttggaaaaaaaggaaaactggaaagccggattgaatcctatacccgtctggaaaaccagtataatgccaagtatcaggaagaattagtacgaaatattctgggaacctatgaagccggaacactggaaatccgtcgccagatgtacgaacaggaactggaaaaaacagtaagggaacgtacagaaaatcagaagaaatgggaagatgacaaagagttgatccgccgtcaggagcgcagtctggaggataagaaagaggctctgatacataaaaaaacagagacagagaaccaggaacatacctatcagctctatcagaatgaactggaaataaggaagaatatcctgaaatatctggacatggaggaacgccatcttctggatactgacaggatactggagaattctgcacgaaagctgcgtgagctggaggagctgcggcgaaatctggaaaaggaagaggattccctggaaaaagaatatttaagccttaccagcggaaaggttctggagcttcctgaggaactggagaaagaactggatgatttgggaattcacacagtttatggtatggaatggctgaaaaagaacggatactcccagaagaaaaaccagatgctggtccgtaagaatccatttctgccatatgccctgatccttacccgacaggaaattgagaagctgggacgaaacgacagaaacgtctgcacatccttccctgtgcctattgtagagcgtgagaaaatagaagaatttcaggaaaagtacacagacaaaatcgtaaatttccctggaatcagcttttatattctgtttaatgaaaacctcctggatgaagaaaagcttcaggcaatgatctgggagaaaaagaaagaattggagaaactaaatcaggctgtagatcagcgcaaaaaggaatacgcagagtattttcagcgtcaggaaacactgaaaaaccagtctgtaacaaaagaaaaatgggaagaaatccaggagcttctgaaaactcttgaggaagagaaaaaatctctggaaaaggatatccgggatgcagcgcaggagcttgacagtctgaagacagcacatgaaaagctgcagaatctgctcataaaatctgctgcggaaattgaccgtcagaaacagcgtctggaagatttttcccagttggaaaaagattatgctttctatgaaaataatcgaaatgagcttgaaaaatgtaaaaaggatgaaactcgtttccgggaaaaccagaagcttgcaaaggacagacaggaaaagcttctggaggagaaaatgactctggagcataatctgaatatgctggagagagaaaaagacaaactggatgaaaaatataccagatatgcgtcatatgaggcaggcagcagagagtcagatgaggtcaggaaacagcagagccagcaatttggatttgccagcatgtcaacggagcagatggaagcacgttatgaagcaatcacctctgttctttcacaggaactgaagaatctggaagagcaggagagaaggtctgccgcacgttaccagagggaaaaggaagatctggattatcttcagaaaaaatatcacttaaagcctgaacagtggtccggcgtgatctatgacagaaaagaagagtcacatcaggagggagtattggaagatttccgcagaaagatccagacaaaggatatgcagtggaatgatgcagacaaaaaggcagcagtggctcagagtaagatcagcgaactgacaaaaagaatccactctgtctgcggtatggagaaacctctgccaaaggatgagattcagggacaggattttcaggcaaggaaaaatcagcttctttatgagaaggaagaagagaagaagcaggaggagtttttgagcggaaagcttcgcagctatgaagagaatctgactgctttatcagagtataatgaactgattcctgtggctgcagaagaccatgagccggtttcggagaatctgtctgcggaagaattaagaaattgcaagggaatcctgatcagggattataatcagaaaatgcgggataccggacagaagaaggaagaactggtgcgcacgctgaataagattgtccgtatggaaagctttcaggatgatttttacaggaaaccgctggaacagatgctggagctttccgatgatgcagtgcgtgttctgactcagttaaaaactacagtgcagtcctatgacagccttatggagaagctggaggttgatatttctgtagtagagagggagaaggaacgtatcacagaacttctggaggattatgtccgggaaatccacagtaaccttggaaaaatcgaccataattcaaccatcaccataaggaaaagaaatatcaaaatgttaaagatccagcttccggactgggaagaaaatgcagggctttaccgtctgcgtctggaagactttattgataagatcactatggaaggcgtggaacttttcgagaaaaatgagaacgcacaggagtttttcggctccggtattactaccagaaatctctatgatcaggtggtaggaatcggaaatgtacagatccatctttataagatcgaagcccagagggaatatccgattacatggaaagaggtttccagaaactcaggcggagaaggatttctgtctgcatttgtaatcctgtccagccttctgtattatatgagacgggatgatacggacatttttgcagataaaaatgagggaaaggttctgatcatggacaacccgttcgcacagaccaatgcctctcatctgctgatcccgctgatggatatggcaaaaaagagcaacacacagcttatctgccttaccggtctgggcggagagtccatctataatcgttttgacaatatatatgtgctgaatctgatcgctgcaagtctgagaggcggtacccagtacctgaaagccgaacacaaaagagggaaagaaccggatgaacttgtcactgcgagaattgaagtgggggatcagatggagctgttgttttaa

SEQ ID NO: 51773 - DNA, 981 bp, Ruminococcus sp. 5_1_39BFAA
atgaaaagaatatcgttggatgaccttcttcataccagacaggatcttgactatcaggaacagtatgaatacataatgaaattgctggaaaaaggtcagataaaacctgtaaaggcttctaagagcaatggcaagaagccggcgctttatcgcgaatactggatggtagaagaacagaaggattacagcaattatatagaagaaataaaatataccttttctaccatgatttccgtggattattatctggcgcatccggatacatatgagaaagaccgaatctgggtacttatgctgaatgaatatctgaaaaaacatgcagatgccttactgacagcggaatctctgaatgaaagaagctttgaaatatggcacagagagaaatttctggacagagagcagggaaagaagattctgaaacgctgcggactcaatgtggaggctctgaatgtatacaggacaacagagcccctttcatattatacacatacaagaaatacgccgcagaatatcctgattctggaaaataaagatccttttttcagtatgcgtaattatcttctgaatggacatactgaaatttttggtgcagaaatcggaactctgatttatggtgcaggaaaaggtattatccgttcttttcaggattttgatctgtgtgcggaaccctatatgaaacatccgaagaatacaatttattatttcggggatatggattatgagggcatcggtatatacgaaaatctggcagaaaaatttcgcagcagatggaaaattattccttttgtgccggcatatcaggctatgcttggaaaagcagaacagataattgaacttccggagacaaaggagcatcagaacagaaatatcagtacacaatttttctcctgttttgatgaaataatggtcaaaaagatggaagctgttctggataaggacagatatatccctcaggaaattttaaatactgcagatttctga

SEQ ID NO: 51774 - DNA, 1344 bp, Hungatella hathewayi DSM 13479
ttggaaccgaaagggtttgaatttctgattaacgtcgtgctttgcaatgagggccgcgccatgtattttgacgggtatgattttgagatgaacgcttataaaatcatgcatatcagctttgtggccaaccggattgtctacgtggactcggatgtgaagaggacctcctactatttgacggacgacggatacaatctgattctttccaccttagaggtggagaataatatgaagctgacgatccacgagatcattttccagatgcatttggagaaagccagctatgacaaagcggtggatgagattaagaatatctttaacctgctgcgaatccagctccagaagatcgaggagaccatgaaccgcatccggaggaacgccttagagtacacggtggcggattaccgtgaaattctggaaggaaacttggagacgatcgccgacacgaaacagaagttccagaactaccgggaggttgtgagaaagcgggagagagagctggaggaagaacatattaacgtaaagcgtctgggaaaacaggatgaacagtcgctggaaaatctcaggattatagagggctatttagaccggtcgattgacgagtatcagaagattttgagcagccattttgatttaaaggcgctctacaccagggaactggagcagatttcccagatggcgctgattcggcgttttcatttaagaaatgacctttacgataagatactggatgatgtgactgccttagaccggctggaatatttcctgaggccgctgtttaaccgggaacaggataagatctacaatatcaacaaggccctggaattccagaagccggtcagggagaagaaggaagaggcggaaagtatctattcctttgaagaggaagtacttgacagcgaggaagagtacaggcgcgaacggctgaaaatgtatgaggccagtctaaaggtactcctcggctttttaaagagggagggagaaatctctctaaaagcaatcagagagacgctgggagatcagttaaaagaactggttccggatacggatatttttaaggaaattatggtggaactgcttaagagcggcagactcgacgtgcagatgcttaaaaaggagcgaagcgagagcctgggcgataaaagtgcggaattccggctgagcgagatgtttctcgatcttttggagcaggacgacagcctggcggacgtgacggcgctagaggcgtaccggatcgaggatggagagacaatcgtatttgaaggtgtgaaaaatgctgagggaagactctgtaatatccgatgctccaatgtccttctgcgtcttttaggacatcgcgtgtga

SEQ ID NO: 51775 - DNA, 711 bp, Hungatella hathewayi DSM 13479
atggcatatgaattttccgatatcagaacgagccaggagatcttttaccatcttttgatgaagcgggagctgagggaagaggatgaaccgtatctctatcaggcgtatacggagcaggagcagatccagaacctggtaaagagccagggggatgcggcggagagcttcgtagagcggtacggcggggtgatctatctaattcccaaagaggataataattttctgggattttcgaaaaatcagttaaagcaggcgctctgcaaatccacagcgacagataaggattactacctgtcgcagtttgtcattctcacccttttggtggaattctacgatggacagggaagcagcagcaaggcgagggagtatatgaaggtgggagaacttcaaaactgtatttccgaaaggctgaaagagggatgcgaacgggcaaaagatgaggaagagcgggaggggctggctttttccaacatgctggaggcgtatgaggcgctccgttccgatgacaggggctcaaaggcaaagacgacgaaagagggattcctctatcatatcctgaattttctggagaaacaggggctgattgattttgtggaggaagacgagatgattaagaccacgaaaaagctggacagttttatggactggaatctgctgaaccagaatcagtttcagagagttttaaaggtgctgggggtggaacatgagtaa

SEQ ID NO: 51776 - DNA, 4497 bp, Hungatella hathewayi DSM 13479
atgagtaagatcaatgcggtcaggattattaatttaaattataataacaacgccatacggatcaatgacgagacgttccgcctgggaggaaaaagcacccttttgtccctccgcaacggaggcggcaagtcggttctggttcagatgatgacggcgccctttgtccacaagcggtaccgggattccagggaccggccgtttgccagctattttacgacgaataaacccacatttattctggtggaatgggtgttggacggcggagcgggatatgtgatgatcggaatgatggtgaggaaaaaccaggatttgtcggagggaaacggcgaagagctggagatggttaatttcatcagtgagtataaaacgcggtgcgagctggatatcgaccatttaccggtgatcgaaaagacgaaaaaagagatggcgttaaagggctttggcgtgtgccgccagatgtttgaacagtggaggcgggaccggtctgtcaaattttcttcctatgatatgaaccaggcgcctcagtcgaggcagtattttgaccgtctcatggaatttcggatctactataaggaatgggagacgattattaaaaaggtgaacttaaaggaatcgggcctctcagagctgttttccgactgccgcgatgagaagggtctggtggaaaaatggtttctcgatgcggtggaaaacaagctgaataaagacaaaaaccgcatgaaggaatttgagaatatagtcaccaaatacgtgagccaatataaggaaaaccgctctaagattgagcgcagggataccatccgcttattccgggaggaggccggtgagatcttaaaggatgcggaatgctacagggaagaggctgccgccgctgtcgctcacgaggggaagattgctgcatttatcggtgaactggaccgtctggaggcggaagcggagaacgaaaaggccgccgtacaggacgagacggaggcgctggaagctgagattaagagaatcggatatgaagagatttcctgcgagatccacggatatgaggaggagcagacgcttcacgcccgccgccgcgatatggcgggctttgaactggacagcctggagcacgagtgcgagggcctgacacaaaagctgcggcttctggaatgcgccagatggcgggagattacccgggaaagcttcagagattatcgatttgcggatgagcgtctggctgcgcttcggcagaagaaagaggatttagagccggagcgcgtaatgctggggacgagacttaaggcttattatggggaggtctgccgaaaggagtctgaggaagcggaaatacttacggagtctctgcgcgttacaagagagcggattgcagcgcttaaggggcgcgaggccggatatcagaaagcgctgcaggaggcggagcgtctggcaggcggccttcagaccaggatatccggttacgacggcgaggaggaacggtataatcggagacaccgccagtcgttgagacggaatatactgggcgagtatgaaccggccgcgctggaaatggcggcggacgggcttatcagagagcgggagcaagtcagccgccttatgacggagggaaagcgtgaggccggccgtctggaggaagagctgcggattgtggatcggaatttagaggatgcgaagaaggatttaatcctcacggaaacggcgaaaaaggaacagacgaaggaactgggccgtctggaggaagaacggaaggacctgcgggtgattctccgctatctggagcttccggaggaatatctgtatgaacgggacaggatcctgactgccatccagcggaagctgagcgacatcgccatggcgcggcgcgggtttgagaaagagctggacgagctggaaaaggaataccggaagctggcggagggaagcgtgctggagctgcccgctgaattcgaggaaatgctggaacagaccggactgcgccgggtctatggaatggagtggctgaagaaaaatggcaattccgtggagaaaaatcaggaactgatcagaaggcagccgtttcttccatattctctgatcttaagccgcggagagctggagaagctgattaagagtggaaatgaattgtttacgtcatttccaattccgattattaagcgggaggatttggaagacggagcggtggagtgcgacggcggaatcgtttcgctgggtaaaatcagtttttacgtgttgtttaatgataatcttctggacgaggaaaagctggctttgatgatgcgggaaaaagaagcgcagattggaagaaagaggcaggcggcggaccagaaggacaaggaataccgggagtattttgaaaaacaggagaagatccggagtcagacaattacgaaggagcggtacgatgcggtagagcaggagatcggacggctggaagagaagatttcggagctgaacgccgggatattggagctgtcagcaaagcagtcgtctaagaaagaacgaaaacgtgttctggagcgggagagcgcggaggcggagcggaaaatagaggatcttaagcgccaggaggaagacttggcagcgcttaccggtttttacaaagtgtacttagagagccgggcggagttgttaaagtgccgggataagatggaggcgacaaggcaggaccaggagagaagcaggcagctctgtgataaactggaggcgaaggaaaaatcactggaaggtgaaaatgggcttttaagagagcggatgaaggagacggaggggaaacggcagatttacgttgggttcggaggagagtctgcgggagaagctgcgatagaaactgtggaagaagctgcggtttcgggcacaggtgtaagtgcagcagatgctggtgaatggcatccggtcattccgtctctggaagaggcggtgggcctggaagccaggtatgcggccataactggaaatctttccggtgaagaaagggagctggaggaaaactgccgaaagactttatccgtctatgagaagaatgaaaaagaattaaaacggctggcagagaagtaccggttaagcgctgcagagtatcaggatatctggtacagtgctgaggaaaaagaccgtgtggatgatatgctggagacgaagcagacggaaaaaaagatcagcgagaggaaatggaacgaggaagacaagcttgtggcactggcggtacagaacaaagaacgctgtcaaaaagatatggttaaaaagtttggcgaggatgagccgctgccgaaagatgcgattacgcaggtggattttgacgtccgcaggagccgggctacggacagggtaaaggatgcgagagaccggctccgtgcagtggaagaaaagctgcggtcctatgaggaaaatctgacggctctctcggaataccgggaatttgcaccggcagaggggctgacctgggattcgcagattccgttggagaatatgacgccgaagcagttaggagactttaaaggaagcatgatccgcgattaccggcaggccctcgagaagaggagcgggaaaaaggcagacctggaacggacgttaaaccgtgtagtgcggcgggaggaatttgcagaagaattcttcaaaaagccgttggagacgcttctccttcttaccagcagcgcagagcaggtgattatgcagcttaccacagtactttcttcctatgaaagcctgatggaaaagcttgaggtggacatctccatgattgaaaaggagaaagacaagatcgtggagatcctggaggattacgtccgtgaggttcacgcaaatcttggaaaaatagaccggaattccacgatcaccgtccgtgatcgccagattaaaatgctgaagatccagatccctggctgggaggagaatgagaatctctatcacgtccgcctgatggattttatggatgagatcacggcaagggggatcgagcttcttcaggagaaccagaacgcctctgagtatctgggaacgagagtgacgacgaagacgctgtacgatactgtggttggaatcggcaatgtggaaattcgtctgtataagatcgaagagaagagggagtatccgattacctggtccgaggtggcgaaaaactccggcggcgagggatttttatcggcgtttattattctcaacagcctgctttactatatgagaaaagatgagacggatattttcgcagaccgggcggagggcaaggttctgcttatggacaatccatttgcgcagacgaacgcctcccatttattaaaaccattgatggatatggccgaaaagaccgatactcagttgatctgcctgtccggcctgggcggagagtcgatttacagccgttttaacaacatttatgtgctgaatttgattgcggccaatttgaggaacgggatgcagtatctgaagtccgatcatatacggggatcggaggaggagacgatagtgctgtcgcaggttgaggtgaatgagcagttggagcttaatttgttttga

SEQ ID NO: 51777 - DNA, 1632 bp, Selenomonas sputigena ATCC 35185
atgcagtatgattttctcaaggctttcccaaagcgcatgaagacggtggggctctacgccctgctcttcgcgaacagcagccagaaggcgctttggcgcgagtgcggcttcgagactctggcggagcagctcaacatgatcttcgccgttctgctctacatcatggagcagtcgctgaaggaagaggcctgcacgatggacgacatcagtgtcttcgtcgatgccgtcaacgcagagcatttccgcaaggcgatgtcgttcgacgactgtcagcgcctcgccgacttcatcgtcaacatcgtcctgtcgaacgaggggcgcgccatgtacttttccggctgcgatttcgaacagggcggcttcgaggcgatccatatcagctatgtggcgaaccggattgtctacgtcgagcgcgaggtgcggcgcacctcgtattatctgacggacgacggctacaatctgctgctcggcacgttggaggtcgagagcaatctgaagctgacgattcaggaactcatcttccagatgcatttggagaagcagagctacgacaaggcgctcgatgacatcaagaacgtcttcaacctcatgcagatccagctgcagaagattcgcgaggcaatgctgcgcatccgccgcaacgtgcttgattaccgcgtcggcgactacgagcggctcctgcgcgatgacctcgcgacgatcgacgagacgaaggagaagtttcgccactaccgcgaactcgtgcagtcacgcgtgcgcgagatggaggcgggcagcgttgatgtgcaggcgcttctgcccgaggaggcagagaagctcagaaacctgcgcgagatcgagcgctatctggggcgcgtcatcgacgagcaccagcgcatccttggcagccacttcgatttgaaggcgctctatacgtcggagctcgaaaagatggcggagatgtccctcgtgcggcgcttcagcctgcgcacggagcttttcgacaaggtgctggcgaatcctgctgtgctcggccggctcgacatcttcctcgcgccgctcttcaaccgcgcgcccgcgaagatcttcaacccgcgcaaggtcacggaggagcagcgcgcccgccggacggcagaggacgaagagacgacggaggacgtggacttcgacgaggcggcgtggcgagaggagcaggcgcgcctgcagcaggagaagctcgcgaagtacgccgcctgcctcaccttcctgctcggtgctctggcagcgcggggcgaggtgcgcctctcggcgctcgccgaggcggcggcagaagacgaggcgaagcgcgcggcgctcctgcccgacgtccatatcttcaaggaggtcatggtcgagctcttgaaggcggcatcgcttgacgtcgaggcattgcgccgggagcgcgccgcctacatccgcgaggaggcgaaggactttcgcctgagcgcgatggtgctcgacatcctggacgagcatcccgcctgggggaggatccgccgcatcgaggcgcagaagctctacgaggcgccgcccgtgatttttcgtggcgtgccggacggtgcgggcagcgagcgcgtcgtgcgctgctcggaggtggccttgcgcgtgcaggaggggaacgaagatggcgtatga

SEQ ID NO: 51778 - DNA, 756 bp, Selenomonas sputigena ATCC 35185
atggcgtatgaaagagaagaggtgcgactcagtcaggagatattctactacctgctcgaacatcatgagctgcgcgaggaggaggcgcgcgagctttaccgcgcctatacggagtccgagcccgtgcaggagatggtcaaggcgcagggacggatcgcggcgagccgcgtgaagcgctacggcgacgctgtttacctgattcccgagccggacaatgacttcctcggctacacgcgcgcgcatctgaagaaggagctttgccgcagcaacgcgacggacaaggactactatctcgcccagtttgccatcctcgtgctgctgctcgaattttatgacgggcagggcgcgagcagcaagacgcgcgactacatccgcgtcggcgagctgcaaaattccatctcggaacgcctccgggagggcgcggagcttgcggcggaggagcaggaggcgcaggggctcgcctatcaggatatgctcgaagcctacgaatcgctgcgctccgacgaccgcggcacgcgccagcgcacgacaaaggagggcttcctctaccgcatcctgcgctttttgcaggcacaggggctcatcgagtatgtggagcaggatgagatgatcaagacgcggcgcaagctcgatcgtttcatggcatggaatttattgaacgagaacaatcattcgcgcgttctcaaggtgctgggggtggaagccgatgagcaagatccgcgcggtgcggctgatcaatatcaattacaaccatga

SEQ ID NO: 51779 - DNA, 4413 bp, Selenomonas sputigena ATCC 35185
atgagcaagatccgcgcggtgcggctgatcaatatcaattacaaccatgacgcgatccgcatcagcgacgaaacgatgcacttcaacggcgagagcacgctgatctccttgcagaacggcggcggcaagtccgtcctcgtgcagatgctctgcgcgcccttcgtgcagaagcgcttccgcaatgtgaaggacaggccgttcgccggctatttccgcacgccgcagccgtccttcatcctcgtcgaatggcagctggagcagggcggcggctgcctgctgacgggcatgatggtgcgccgcagccaggatgtcgacgcgggcgaggcgcttgagatcgtcaacttcctcagcgagtacagggcgccgtgcacggaggacatacatcatctgcccgtcgtcgagaagacgcgcacggaggtgcgactcaagagctatgccgcgtgccggcagctcttcgagacgctgcgcaggcagccgcagaagaagtttctgagctacgatatgaacagcgccgcgcaggcgaagcaatacttcacgaagctcatggaatacggcattgactatcgcgaatggcagaacatcatccgcaaggtcaacgaggaggagtcggggctgtcgaagcttttctctgactgcaaggatgagaaagggctcgtcgagaagtggttcctcgatgccatcgagagcaagctgaacaaagagcagaaccgcatgggtgagttccgcagcatactggagaagtatgtgcgcctctatcagggcaaccgctcgaagatcgagcgcaaggcaaagatccagcacttcgaggaggaaacgctgaagatcgaggagcgtgccgaggcgtacgggcgcagctcggcggcggccgcagccatgcgcgaccgactcgtctgctacatgaaagagatcgcccgcctcgacgggcgggcggcggatgagagttgcagcgaggcggaggcgctcgacgcgctcgaaggagcgatccgcgaggtcgagtaccagcgctattcggcgcggcactacgaggaagccgctgcgtgcgaggctttgcggcagcgcctgcgagcggcgcaggagcgcatggcggcgtgcgaggaagagcgcgccgcctggcagaagcggcggcagctgctgcagcttgcccggcagcaggaaggactctcgaaagagcaggcggagctggaaaagatcgtgcagctcctggatgtctgccgccatgaggagcgcgagctggggccggagcgcgactacctcggctatcggctgcgcctgcactacgagcggcagatcggagccgaggagcagcgcgcaaggagcacggagaagcgtctggacgagctttcggcgcgcgaggcggcggcgcggcaagaggcggaggcgatggagcaggagcgcgtcgagtgcgcgcagcaggagggcgccttggaggcggcgacggcggcctacgaccgcgtcgaggatcgctatgccgagcgctggcaggcgcctctcgtgcgcaacatcgtcggcgagtacgagtcggggaagctgcaggcgctggcggcggcgctcgacgacgccgctgccgcagcggcggcgaaggagcgcagcaagaaggcgcgtcaggcggaggtcggcacggagatcgtgcgcacggagcgcgccgcagagatgcagcggcaggaggaggcggagaagcaggcggcgctcgtgcgagcgcggcagatcctgcagggctacgatgaggagcttgcctaccgcaggcgggcgctcaagtacctcgaccgaagcgagacggacgcggcgctcttcgatggggaagggctcctcgcagctgccgcaggcaagctgaaggagatggcggagatcctgcagaagctgacggtggaggagaagaagtgcagggatgagctggaaaatctccgcacggggcgcaacatcagcctgccgccgggcttgcggaagatgttcgagaatctcggcattcccctcgtctacggcatggagtggctgaagcgcaacgggctttcggaggaggaaaacctctcgctctgcgagaagaatcccttcctgccgtacgcgctcatcctgtcggaagcgcagctgcagcgacttcaagcggagccgccgacggtcttcaccgccgcgcccgtgccgctcgtgacgcgcgagagtctggagcgcggcgaagagcgcagtgcacagcctgtcggcaacgtccacttctacatgctgttcaacaagaacctcctgaacgaagaaaagctgcgctgcctgctcgaagagaaggaagcggcagcggcgcgcctgcaaaaggagctgcaagagcggcgcaaggaacacgagaactatgtgaagctgcgcgacaaattgcgtgagcaggcggtgaaggagccgctctaccgtgcggcagagaaggagatcgaggagctagaagaagtatgcgcggcgctcgccgccgccctcgtgcaggcgaaggcggacttgcaggcgctgcggcaggaggaaaagacgttggcggaagagctgcgcgcgctggagagggaagcggcgcggcgcgagcagcagcagagggagttcggcgagctgacggacgcctacggcagatatctggaagaaaaggcgcggctggcagactgccgcgcgcggctggcggcgctggaaaagaagaaggaggcggtgcgcgcctcgctggcgcagctggcgctcgccgttcgcacggaggagcgcgggcgcgaggaggttctgcgccgtctggaagagctgcagcgtgcgcagcttgcctttgcccattacgaagaggcggcgaagcctgccgccctcaagacgccggtggacgacttcaccgcattgctggcacgctatcaggcgatcacggaaaaggtctccgcgcgcgagcaggcgctcgaagcgcagcagaagctcgcggcggagcgcgtgcgtcaggcgcagaaggagttgcagcgtctggcacgcaagtatgagatggagcccgaggcatggcgcggcgtcctctacagcgaggcggaggaggagcaggcggagcgcgaggaggcagcgtgcgaaaagaagcggcgcgacgaggagcgcgagaagaacgccgccgacaaggaaatcgccctcgcggagcagcgcatcgagcagaacaggcgcgagatgaagcgcgcctgcggcaaggaagagccgctggagcgcgaggcgatccccgtcctcgaccacgaggcgcgaaaggaggagctgctgcagcaaaagcgccgccatgagaagactctggcggcatggcaggagcggcagcgctgctacgaaagcatcctgacgagtctggcggagtacgaggcggaggagccgcaggcggaagtcgccttcgaggaagacttcgcccatgccgacgcggcattcctgcgcagtttcacgggacgcctgcagcaaagttatcgaaagggctgcgaggagaggacacgctcgcgcgagaagctgacgcaggcgctcaacagcgcggcgcgcattgagacgtttcaggaggacttcttcaagaagccgctcgaaactttgctcgcatgcgtcgaggaggcggagaaggtgctgcgccagctcgccgtcatacgccagtcgtatcgcgacctcatggcgaagctgctcgtcgacatcgccatagtggaggacgaaaagcagcagatcgtcgccctcctgcaggagtatgtgcgcgaggttcacgcgcagatgggcaagatcgacagcaattcgagcatccgcgtgcgcggccgcgccatcaaaatgctgcgcatcgagctgcccctgtggagcgagaacgaaagcgcctaccgcacgcgcatcgaggagaaggtcgaggcgctcacgcggcgcggcatcgatctgctcgaaaaggaggacaccctgcacgatttcatcggcaagcgactgacgacgcgggagctttacgatgacgtcatcggcattgccaacatccacatcgaacttttcaagatcgaagcgcagcgcgagcgccgcatcacatggaacgaggtcgcaagcaactcgggcggcgaaggcttcctgtctgccttcgtcatcctcgcgagcctgctccactacatgcggcgcgacgaaaccgacatcttcgccgagcgcaacgaaggcaaggttctcctcatggacaatcccttcgcgcagacgaacgcctcacatctcctgaagccgctgatggaagtggcgaagaagaacaacacgcagctcatttgcctcacgggtctcggcggtgagtccatctacaaccgcttcgacaatatctacatcctcaacctcgtagaatctagactgaaccgcgttcaatacctgaagagccaacagctcgccggaaaagcccccgacaccgcgctttccttcgcaaggatcgaagtcgcggacgatgaggcacacatggaatcgctgttttga

SEQ ID NO: 51780 - DNA, 963 bp, Selenomonas sputigena ATCC 35185
ttggagcagctgctcaagggacggtcggcggctccttacgaggagcagtaccgcttcatcatggggcttctggcagaggggcgcatcaagccgctgaagagcccgggcacgaacggcaagcggccggccctgcacctcgaatattggctcagcgaggaagcgcccgattatgcggcgtatcgggaggagcttctctaccgcacgatgccgcgcctctcggtcgactattacctgcgccacctcgccgtctatgagaaggagcgggcggcggtgcgcgcgctgcacgatttcctgcagctgcacgcggcaaagctcgggcaggagatttcctgcaacgagcgcagcttccagatctggggcgaggagaagttcctgctgcagggcgcgggcaggagcgtcttgaagcactgcggcttcgaactggcgcagctcaactgctacaggacggcggagcctttttcctattacgcacagcacagggaaacgccgcagaagatactcatcgtcgagaacaaggacacgtttttcagcatgcggcgccacttgctggcaggggcgtcgtctcttctgggcgaggcggtcggcagcttgatctacggtgcgggcaagcgcgtcgtgagcagctttcgcgagttttctgtcagcgcggagccgtatatgaaggaggaggcgaacgagctcctctacttcggcgatctcgattacgagggcatcggcatttacgaaaatctcgccgaggctctcgccgcgccatggacagtgcggccttttttggcggcgtaccgcgccatgctcgaaaaggcggcgggcatcgctctgccgcagacgaaggagaagcagaaccggcatatcacgggcggctttttcgcgcatttcgcagcggcggacgtcctcgccatgcagcagatcctggagggggggcgctacatcccgcaggagatattgcacttggaagatttttga

SEQ ID NO: 51781 - DNA, 1317 bp, Bacillus cereus BDRD-Cer4
ttggtttctaaaaaccttcgaaacagaggaagagcccacacatttacgtattacgatttcaataaaaaagacgaaaaaacttattattttcatctaattgaatatggagaaggaatgaacgtttttagtgatacagaagatcgtgtagacgattttacattatcttcaacgggattggagctgctattcaaaacgaaagaagtatttggagaacttcaaatcactatttctcaattattcttcaaacgacaatttgaaaagggacttttcaccgatgctttaaggagagttcacgaaatgcatacgttgatagaagatgaaaaaaagaaaataaaaaaattacaaaatactattatcaaggatgctcttggtgtttctcaacgttctgaacttgaagtcatgataaaaagaattgatgaaactttaaaatcagaacacgaacaatttgatgatttaagaaaattggtagaagaaaaaattgatgaattctatgaaggtagtctaacagaaaaagaacaagaaggaatccatataatccaagaaattgaagggaaattacttcaagcaattagtgtgcatgaatccttatttactgaaaaacaaaaaacacaaaatattatgagcgaatcacttgaatcttccatcattcacgcattttcagttcatttagattttgaaaacgaaatattaagggaactaatagaaacccctgctacagaagaagtattaaatgctatttctaaaccatttctacctttgaggcattataaaacgtttaatccgctacttgcattagttcctcaaaagagatacaagaaaaaacaactaaaagaagaagaaattgttgaagtagatgaagaaaaaatgaggttgcaagaggaagaagaagctaggaaaaaggaagaaatcgaaaacaaagaatatcgatatataactgctttattgaaacacttggttgagaaggataagtatctattaagtgatattttccaaatgattgaaactcaagatgaacgtctttatgaggatattctgtacaatccagatccactgttggggttaattgcagaactacatcagtccgaatacaatcgttttgaaaaagtgacttcagatgtgtggaaaaacctcccggatgataaaaagattaatagaatgttaataagactatcaaatgaatttgtaacattacaagagatagaatcctttagtttattagaaacaggtagatctcactatatcggaactatgaaatacaaggatatgttaattacaaggggtgatttttatggagtggacagaagaaatcgtaagtaa

SEQ ID NO: 51782 - DNA, 708 bp, Bacillus cereus BDRD-Cer4
gtggcccttagtaaaaaagggtttattacaagcaaagaagatgaatattttcagtggtatgaggaaaggggtgttcaagattttattcggaaagtaattgaacctacagggaaagtcatgatcttcttggatgaacaagatggcgttattcaaatggtgccggaggtcgagaatgaaacgatgtcttatacgaatgatgatttaaagaaagaattaggctttaaggacaataaggaaattcatctattctactttattttgttcatcttaatagcagagttagaacaaccatatgatacagagtctgctgatcggatgtatctcccaatggatgaactattggataaaatgaatggatacatcgagcaatatgaacgactgggcgaagagaagttagaagaattaagtgatgaatatgatgtggacgtggctgggattgtagaagcttggggcagaatggccgactttaaagaaggtgctacaagccatattcgaacaaaagataatcgacggatgtatatcgaaaaaacattgaaattcttagaaaaagaaaagcttatcagaataagagaacatactaatatttctgttaccaacaaaatgaaaaatattattagtcattattatcacaatgtcgagaacaagagcaaaattcatgatctattgctggtaacaagagaaggaactgtgggagaagaggaggaatga

SEQ ID NO: 51783 - DNA, 4362 bp, Bacillus cereus BDRD-Cer4
atgaaagtgagaatgaccaatatccaattagatgaagggaagaaaatcatctcaaacagcttgtgggaaccaaatgccaaagatgctctattcatcttagaaaacggcggaggaaaaacgagttttattcaactagttactcaaaccgttcttcctaactccaatttaagcaaacgtttattaaaagaagtggtgtataaaggtacaactggtcatattatgacggaatggaaactagatggagaaaaccttccgtacaaatacttatgtttagggtttacttatatgaatggggaaacaaaaacagaagaattaaattatttcacatatttgttcacctataacagaggggacacattaaatattgatacccttcctaccacagtaaacgggaaagtaacaagactaaatgaataccgtaagtttttaagacaaaatgatattcgtatatttgacgtcaaccgtgattataaaaaggaattaaaacgatttcaccttattgaagatgaatggaagatgatacaaaagattaatggagatgagggtggagtagataattacttcaaaactgcatccagcacgtatgacttattagtgaaacttcttatcccagaagtcgaaaacactatatttgacagtgaagaaaagaaaaaggaaatccaaacgtactttaaagaatacagtaaaaatctattaagtattccggatatgaaaagagacttggatgatttccaaaggataaaaaattgtgctgaagacatggtaaaagcggtagaaaactttcaagtaaaaaagaaatcctttgcggaagcacaaaagcatgtagttacgttaaagaaaagcattgaacttcaaattgcggataaggaagaaaaaattgatatcttaatggatgatatcgagaaaaatgaagcattgatgtatgaagcggattggaagattgacagctataagtctcatattttaaaaggacagatcgaagcaaaagaaatagagctagttgctgctgaaaatgaacttaaaataaaaacagaacaattaaaacaagcaaaagcattactacaacaattggaagcaaaaaaagaatatggagattatctagatattcataaaaaggtactacagttaaatgaagacatatcttctttaacagcaagtaaaccagaattagaaaagagaagaaatgaatctaaaactctcttaacagaggcgttaaattttctcatagaagaacaacaatttgctttggatgatattaacaacaacatcaaatttatgatagaagaagtgaatcttaaagacgcagaacggaaacgattagagaaggaaaaacaagatttatatggagagtacaaggatgcagaaaatcatttgaataattaccaagaaggtaaacaaaaactgatagatgaattaggagaagaagccggatatgatccatctgtcacgttcaaatcactacatgaacaacaactacaatcttcagtgactattgcccaaaaagaagagaaaagtcgattaaataaacaggatatggatgaaaaacgtgagtttgtaacgggtcaaagaattgctatagacaacaaaaataacgaagttacttcgttaaaggctgaacataccacatttgaaaaggagaaatataacttactttcacttctttcagacgatgggaaaaatacgataaacatattcgaagatatgcaggagtttcttcggtattatcaatattcaaaagtggaagcggaacaaaaaatagataaacttaaacagtatattcatgatttagcaaaaaaacttagcctttgggaatcacacgatttctttgttcctgatgaaactttattaaaggttcaacaacatctagaacaaaaaggtgttattactatgttaggtagtgaatggctatcggaactttctagtgaagaaatgaaaagccagtaccttaattcctatccattgcttccttatacgttattggttgaagaagcaaacttaacagaagtcaaaaaatccttgaatagcttgaataaagaactgttaaacgtaccgttactgttttatgtaaagagtaaacttcaaattcaaacaaaatcagtagatgcaaaaatagatgaacttttccctctatatgatgagttatatctctatcatcagttagatgttcagtggttcgcatctagagctaaaatccaagaaattattgatgggttaaaaatggagctttctcaatataaagaacaattaacttttgcacaaataactctcaataattacaatgaaatattaactgcattagaaacattccatactcgttattctagtacattctcggaatccaacatgcaagctgtccagaaattatcagaagatataaaagagattcaccaacaaataaatgataccaatgaacatattaagatgttagaaaatgagaacgaattaattagtaaatttatctcagatgaaaaagtaaaaatagaaaaaagagattctcatataaagcgtcttcaaagctttatggacctttactcaaaccccgaagagctagttgaaaaagtaaaatatttaaaagaccaacatgaccaatacgggacaaaagttaatctgtgtgaagaggaagtaatagagcaacgtgaaacattagatagacagaaagataagaaacgaagcgttgaatctgttatggatggattagataaagaaagaaaacaccaccaattggacaagaaccttgaaccttctgatagttacaccagtgaagaaaagaatgagtacgtagcccgttttactgcagttcaaaaagattacgcggacaaaaatcaagcgaaaaattcttttgaagaaaatctttcagataaaaaaaatgaacttctaaaatctgaaaaacgaatcaatgatatcggatttactctagaagaagttaaagtgttctattctcaagaaatcaatctagaagagttaattacaaaacaaaaagagacagttaacacactttctatttctgaaagggatattgagatcgaaaaaggaaaagtaggagaaaatctaaaagagaaaaccaaacaattagaattagctaagaaggagattgatgagaagtacggaagagaagtattcctttatgaatgggagcatgaagaagaacttaaccgtttcaagcagtcaaaagaacaattgggcgaagctaataaagcacttgtaactaagaaggaattgttaagaaattctataatagatgctgaaaaagcaatggtacatttgcaaattgaaaatcttcctctatataatgaaagattcggtttaatacttgaagaagaaattatttcaaagtcaaaaacatatcaaaaatatgcacaaacccatgctaatgagcacgtaacaaagttgcaaaagtttaaagagggcaaaaaaggtgtatacctatcatttgaaacgtatttaaagaagattcaagaatctaataaccctaagactgaacaatttgcgaatggtttgtcaaaattgaaaacaagtgatcaaatatttgagttagagtttattttagaatcgtttaatcgcatctttgataccattaatgcctttgaagaagatttaaagcgaaagataacagaatgtgaaaaggataaggtaaaactggtagacttatgttttcagcgagtagaggctatttataagaacgtgactgaaatcccgaaatcctccaaagtgaaagtatttggttatgaattgcaattgattaaaatgagatgggaccgttttgatgatgaaaccactcatagtaatttacattaccatgttcaaaccattctggaaaccttacaacgaatgaagagagagaacaaactagaaaatgaattgaatgaatacctagtacaaaaacttgatacagtggtattattagataaaattgcacctatcaagaaatgttttgttagtatatataaaccacgaaaaaaatcacttatgacgaccagtccagaaaactggaaaccttgggatgaagtttctaaatggtctggtggagaggaattcagttcctatatgtccatgtttatgatacttgtaacgtatttgcgtaaaaaagttaacgctagagacgattcttggaaagtgattattgcggataatccttttggtaaagcttcatcagaacacgtagtaaaaccaataatggaactagctagaaatagtaaaatacaactgttttgtctaacagctcataacaatgaagacattcgttctcattttgaatgtgtcatgagtaatcgttattacaatacagtaggtattgaactacttcaagtggagcatagagaaaaaggggtttcacttggaatgtttgcttatgagcatgattaa

SEQ ID NO: 51784 - DNA, 1077 bp, Bacillus cereus BDRD-Cer4; identical to SEQ ID NO: 51703

SEQ ID NO: 51785 - DNA, 1521 bp, Bacillus cereus AH603
atggaaaaggctctaaatttgtcatttgatgatttaggagcacgttttaagaccctaattcctgtttggattcttggtacgggagctaattttggtaggttaaattattttgctcgtcatgtgtcatttaccctcattgcagtaattttctatcaagaattattagatgatcttaggcgaacacgagatgatttagtacagacggtttataagatgacacaattaatgaagatagagtgtgatttggatgaagcagagaagatagttgatgctcttatggttaatgaggggagttcaaagcatacttttgctttccaagaacaattttttaatgagcaaataatggaatgggagacatttcgttttcaatatcttgaagttgatagggatgcgacaaatttcgaggaaggggtaccggtttataagctgtctgaagaagctcaagctctttttttaaatacaaatgaagttcaaaagcacctcccgatttcgatacaacagatcttgattgagctgctaattgaaaaaggagagttgaagtcggccttaaggatgttagattcgttgaaccatagagttatgacactatccaaagaggaaaaaattcataaagatgagctaataagaaatccaaaatcaacaatatacgatcataaaaatagatggggaaagcagttgaaggaagtggaatcgcaatttgaggaagagagccaaaaataccggaaactagatgggattttacgcagaattgctgtttctccagagcatcaaaatacttatatgcaattaacaaaacgactgactaaaactaaaaataatcatgataagttagcaaggttagttattgaaaacgtccgattagaattacagataagaaattctcattttcgaaacatatggttaacaaatactacctcatttagaaaaacgatttgggaagatagggcaaaagtagttggttttgttcatgctgatgaaatgttaactttggtggaatcactgttttcgcctcagaaaccttccatcttaccaatggaatggggaattgaggagcatatggatataaaaagctctacttttggaggaaccggaaccaagagaaaagtttatttagagcctatttctcttgattgggaatctattctattattatggaagcctatatttgaggaattactaagggcaggaagtgtttccttgaaatatttacaacaaatagatgaatttacattggcaaagtgggtggaaaatcgtgatgcttttgatttctggttagcttttgcctcaatggatgaaccttttattataagtgaagaaaatatccaacaaatagacagtgatgataaagctttgttgctctctaagttgatggagaaatatccagagctatccgtattaacgggtagacaaatttttaatagcccaagtaatgatgcagtggtaatacgaaataaaattgatgtatctacttacatcttaaccttgaaggaggcgaaggaagatgaatatcgtacaaattga

SEQ ID NO: 51786 - DNA, 678 bp, Bacillus cereus AH603
ttggttcatccatatattgaatctcaagaagttcgaaattgtgtaagaagacttgcagatagctttggattaaaagttgtaagacaagataaacacatgcatattcttgtgcagccacataattccttccatactaatccaatctctgaattaaagcgaactgttaaaacttatgagaatcgaattaatttatatattatgggagtaatatggatggttatttgttcggaagcggataacgatattgattctaaaattaagtgggaaaatgaaggtctttcttatggagagattgaagagctagtgactaaaacattaaatcattggtacgaacttgatgccgaatcggaaggaacattttctaaagactggtccctcgcggtgagtgaaatgcataaaaaatggaggttgcttcgctatcacaagttagaaaatggacgtgtaagttatattaaggaatctaagtttggtttaatagatggtgcggtaagggagctggaaaaggataaaatggtattcattgaacgcacagcacaaactagtcggatgaccccaacacctgttttttttgaaaggttacgagcaaggtttggaaacatggatagatatcaggatcgttatgatgcgttccaagtattattggaagacgtaaaagaaacaggggaaatgggggcgtaa

SEQ ID NO: 51787 - DNA, 4221 bp, Bacillus cereus AH603
gtgtcaaatgataaaaggaaatttaccaattctcctattgaactagattattttctatatacaaaggagcctttaatagttgagaaggctgatatctttgattttcaattgtgggatgaaaaggaaaaagaagcagtgtcttttagtacgtggaaagaagaagttaaggctgataagtcgtttcatttttattcgaaacaagaaaaagaacagtattttgaaaaaattgaggagtttggatatgatgctaacacagttaatattttaaagaaaattaatgtaggagaaggcggattcggtaagttctttgaaggttctactgataatacaggcttgttttacaaccttcttgtgcctactataaatgataaaattgaaggaattgattcgcgaaataaaaaagaagtttcagttgtaaccacatggtttttagaagtcttaaagatttcaaaagaattgccggatttattagcaatggtaaacagcattgaacaaattaatgattatattttgccacttcaagaccgttttaatgaaggagaagaaattaaacagaaagtagaactatggagaaataaaggtgcagaacttctccaacttctcattacattaatggaatacaaagaaaaccaggtagccaaactagaaagagagcaaagtgaccgaaaagaaaaacgggacttagcaagatggaaatatgcaaacatcgattatattgctctgcatcaggagaaagaggaagtggatggtgaatattatgagttggaacataaacaattgaaagcagactttactgttaatgaatatcaacagaatctaataggccaaaaagtgaatttagaactaaaaagaaggatggaaaaattagatgaaatcgaaataaataatcaaaaaatttctatgctaataaattctgatgatatgaaggaatcaacaaatgatctggaaataattaaggcatattttacaaaacattgggaatttatttctgaatattggggaaatgaaataagtcgaaatgcacgatctattctcgcacatgaaaataaaattaaagaattaaaaatggatttagatatagagaatacacagaaaagagatttagagtttaagatacatgatctttcaaattgtataaaccaatttgagattaggttagaggatgcttgtttacagtatggggcagagttgccataccacatttctgacagtatcgttgaaattggattggaattaaacgaagcaaaaaatgcatttgagattgcattgaatgccaagtccaatttggataatgaaattgttaataccaaagtagatattgtgagacaggaagagagtatgaaagcggttaaaaaagaaataaatcaattagagaatgaaaacatagcgattaccaaaatagaaaatgaaatacgagccaatgtatccaagattttaaaaacaaacttttctactgaaatggaaagagaggaatattatcagattaaacaagaacttgaaaattacttaaataagattaaaggtactgttaaggaacaattgaggaaaatgggggcttttgaagatgatattcacttgttggaggaaggcgataaaatgggctcctatattccaaatatcgacttattaaaagtgaagaaattattggatactaaccgtatagagtctatgtatggaactgaataccttaataatctttctatggaagagaaacgatatgaattagatcggaatccagcattacgatatagtattgtaatattggaagattcatttgaatcattagatttttcatttatggaacaagaattaattcgtagttatgtagtattggttgataaaacaaaatcaactaaaaaggataaaatgagtacaacgaatccgtatttagacaaacaagatgagatgaattttttatttaaagacttaagttatggttttcttgaagatgtgtatgagttcgataaatggagagttatgctggagaaaaatattgatgattctgattatgaaattgaagtgttagaggggaaaattaaagaaattgaaaaggttttaaagaaaatagaggttcttttgaatggaaagctcaaaactgagttggctcaaaaattattggaccttcaggcagaagaaagaaaatatattggtaccatattagatatgaagggacaattggaagagaaagaagaagagatgaaaaaacaagtggaagaaattgagttgttgaatcaaaagataggtattattgaaaagaatgaagaagagctcatattattagaaaaagatctagaacaaaacaaagaaaataagaagacaaaagcaaattttcttagacaaattgaggaaatggaaaataatattactcaattaatagaagaagaaaagaagattactgttcaaaaagggaacaataaatcaagttttgataactggatgaaatctgtaagatataactatagtattattaggaatatattgggtgatattcgaatgccggtagtatcgatacagcaggtatatgataaaagtaaagatttatgttcacacacttatcgctatgcagtgtctaaagaagctcgagaatatattataaaatacaatgaagttaatgagcacataagtaataaaaatattcgtttggctgaattgaaccaagcagttaagatgttgcaaaatcaagtaatagaacatgaagatatccttcaggaattaagcggagacatatggaagggaatgactacaccagaaagtgatgaaatgcaccttgtaacgcttgttactcaggcagaagtacaattgaatcaaggacaagtggaattggctgaaaatcgaaatagaatagaatacaatcgtgaggaaattcaaaagttagagaagcgtttggaagaaaagaagcaggatatggaaaaagattatccgcgatttggtgctgaatatatagaaattccagattgtaaagcagcgaaagcacaatatcgaaaagaacgaaatctcttagacaggcaatataatgaaacacgagttgaaattcagaaacttcatacatcccttgaaggaattgaacaaataactcgtcttcttaaagacttgaatttgccagctcattctggacaaatattattagaggaagaaagagtatctatccatgaagatcctatgggatatttcactcagtggaatcacaaatataatacagttacaatggattatcgtagttatcaagaaacactgagtaaacgtattacacagataaaagaaaagattgaatattttgataatattcccgaaacttatcaaaaagaattgattcactttttatctactattcgtgatatgagctttgatgacgctgtagtttctttgaataactaccttgattgggcaaaaaacaaccttcaagatgaactcgaacaaaaagaaaaagcggataaagcgattgaattgtgtgcagaacgacaatcaagaagagtgctggatgttattagtggtcttcaagacatagttaggaaattgacagttgtcaattggaaaaaagagcgatttccattaataaaatacaataagaattttccttttccaataaatgtagaagatattaagccattaatcaaagaattttgtatgaacgaaattgacttttatgttagtaaatataagaatgagatagatcattttacagtgcatgatattgctaaaagtgtaaatatatcaaaattggttttaaaggcaatgggtgaattcccaagattgatgattcatatccctggtattgaaggtggattacttcgaggtgaagccaagcatgccgtatataaagaatgggagacaattaatcatggaagcatgacttcttcatcaaagagtgggggacaaaccctacttgcccattttatagtaatagcaatgataatgagacaaagggtagaggaaaacagtccgttattccttgtcacggacaatccattcggaacaatgtcagcaccagaactagttgaaggagttttttgtttactggatcttttaaatattcagtggttggttgttgcaccaccaattacaaatgtatctattacatcaaaatttcctacaattaataatatgaatatagaagtagtagagggacgcaaagttctcgaaaagaaactagttaagaactatcgcaagtatttacaaaattatagtgttctaaatccagaagagcaaaacaatatatcttaa

SEQ ID NO: 51788 - DNA, 1131 bp, Bacillus cereus AH603
atgattattatgtcagatataaaaaaaattattaatagttatattacgtattttagagaaaagcagggaaaatcaaaaaaactactgcgaattgaacgttttgaaaatgatgttatcatggcagttggttgtgctcgaagatataacgaactaggaggttataaaaaattctacgaaagtattattcagctaaagggtgaaggaacgttgaaagatttggcaaatccccgattaaatgggaaaaagcctagtctccatgaagcatattggattgtacctaagtatgttgaaaatacatgggataaagcagcgatggcaaaggtaatgaactatttagatttaagtttctatttacgaaaaaaaatatatcagactgaagatgagtggaagaatatattaatactctatgaatttataaaaagaaaagattcacataaagaaataaaaagagaggagcgctcattgatgttatttaggagtgaaaaatttcatgatgatattgaagcggaaaaatatttagcttcttcggcggggagtcgtttaatgaatcggcttcaattaaaaccagcagaccttttgtataaagttgtacatgagccatttcattattggaagaacgaagcagttccagaaaatcatttacatgaagttctgattgtggaaggtttatccacttttcaaacccttaaagaggtattaatacaacaacttccatggaattttggacctatcccacattatttaatttggggagaaggatatcgaataagtaagacactagattatttgaatgatattattggtgatcctacccagctaacaatacgttacacaggtgatattgattatgaggggttcaatatatattttgacgctaagagtaaatatagggatctcaacattttgctggcctaccctttttattcttttttaagttcattttcaaatgaatttgcaactaatatattgacagaacaaaaagtaaacaataaaaatttatttctacttcaagacgagtttaagaactataaagaagtttttgaagtgattaataaattatgggaagaacggagacgtattgctcaagaatgtataaattttgatactctttttaagagggggagtgaatga

SEQ ID NO: 51789 - DNA, 1491 bp, Halanaerobium praevalens DSM 2228
atggaaagagccaacatcggtctaaatgaaaggctaaagaaaaccaaagctatagcagaattggggcagggaatggatactggttctttaagagattatgcccatcaaattgctctttatcttttgctgaaagtttttaaaagagaaattaataataataaccagcgcagtcgcagtgatttaattcaaatgactatagaaattttaaaagagatggagcttcagataaaattagaagaggttgcaaggttggtagatggtgttctttatgcaggtgatcctaaaaaacaatcatattttaaatttaaactttatgatcaaaaaagccaaagttttaaagattttaagtaccgttatttaatccctgaccgagaatattccaaatgggaacaaggtggaaaaactatttatcgtttatctgatatttcacaagaaataatttttattactcgtgaaattctgcaagagtttggctttgatttagaacaattttatacactgcagttaataaaaaatgggaattttaaagaggctaaaggtagtgtcagtaatttaattgcacgtgtacaaaatttaataaaaaaagaaaaagattggcgggaagacatattacgcaatccaggcctcatattttctgcttataaagaaaggcgtcgaaaaacagaagctcaagttagagaacagtttgcagaagagaaaaaagtatttagtgatatctttatttggcaagaaagacttaataattttgaaactgctgctaaaaaagaaggagaacttttatttaaagaattagagcgggcccgagaacttcatgaccttttagctgatcttacagtttctaatttagctttagaatttagattacgccgagaaagtcctgagcttttttggcaaacttcacaacttagttttaaaaaagatttttggcagaatacaattgttaaatctggattagctaaaattgatgatttagaaaaaatattaaaaccacttttttctcctcaacaagactttatttttcctttagattgggcttggtctgaacagcaattatatagggaattagcagaggaacaaacagatattgagccaatagaaattgaagcagcacctaaaagacaaattgactgggagcttgtcgtcgaactttggcaggatgtttttaagcaattattagtcaaaggagaatttaatttaattcaacttaatcatttgagtttagcagaaaaagaaaagtggttaagtcaaaaaattaatttagaattatttatgatgtttattgttactaagctcgaacttaaagtaaaaaaagattataaagttttggatgagcgcttaatactttttaacaaattaattgagcttaagccaaaattagccaacttagccggccgacaaatttctgcagagcttgtagatgctaagcaaagagtaaatttacttgatcagtttgttatttcagcttataaaatttatctggaggcagattaa

SEQ ID NO: 51790 - DNA, 765 bp, Halanaerobium praevalens DSM 2228
atgggatttaaacaagaagatttagaaaaaggagcagcgctcttttttaagcttttagcagaacaaataatttctatctctgaccccttagcagaagcatatagtaaaaatagtgaaatacataatattgttcacacaatggctgctgaggctggtttaagagttttttcaactccgaaaaatgtacatttagtttctagagctagagactctaattttgctaattcttatacgcagatgaaagcaaaatatccaggtttaacaagaaagcgcaaattttatttagcaaatataataatttctatttttttagctgaaattgataaagaaaatcatatcagaattagatgggaagaagaaggtgtttcctattatcatctggcagatttagtgacagcaactttaaaaagctggttaaaacgtcaaagtgaagaagattgttttagtgaaaactgggcccttgcagtggaagaagtaggagaattatggttaactgagtttagcccctatcgcttaaataaagatgataaaattgaagttactagaactaaaaacaatcagctttcctttattaatactgctttaaaacctttagttaaacaaggtttaattatagatcaaaaagatgaattgaaacttattcccaagccagaactatatgaacgtttagatgatctttaccataagcaggagcgctataaaaaatttcaaaaattaataagagaaagtcgcgaagaattagaggaggaaaagaaaaatgcctag

SEQ ID NO: 51791 - DNA, 4485 bp, Halanaerobium praevalens DSM 2228
atgcctaggctgaataaaattagaattactggtaaccgttatgatggttttaaaaaacagtatcgtaattcaatttttagtttagattcaaagcatacactttttacattgcaaaatgggagtggaaaaggggcaatgctccagttgatatttcagcttttacttcctggtactgcttggggaagccaaaatggtaatcagttagaaaacatgttctataatcgttacggagaatttagacaatatacttttcatgttgtacttgaatggagtttagagggatctgagaataaaaaattacttagtggaatttgtgtttcagctaatcaacataaattagcaggtgaagaagaactcaaaattggtttaaaatattttctttatacacatcaatatcaaaacagaagtcaatttagtttaaaaaatttacctctttatcaggaagaaaaagataaagttctgcaatatgatgaaatggaaaaatttgttgatcaaaatagggctgaactagttaaatattataaaagttcagtttctactcctaactctgaatattatcagtacctaagcagtcatggtatttatcgttccgagtgggaaatcatgaaaaatattaatcgcagtgaaggtgcactagaaagacattttgctaaagctaaagataatcaagctctttttgatcaaataataattccagctgtgagtgaaagtattagttatcatgatcaaggtcagaaaaaatctttaattaatctttttataaataatatagaaatcgctcaagatttgccagaattattatctagggctgatgatttaaaaaaattggattatttagttgagccacttttacaaaatagccaaaaaggactgcgtttacaaaatacaaaagtaatgattagagagcggggaaataattatttaagaggaatagaaacccgcttatcctttttagagaatgaattaagccgcagtcaggcagaaaaagttaaaactaaaaaaagtattaaaaatcttaaatttgaagctgaaaatcttaaatatgttaaaaaattgcgagaattaaaaaaattacaaacaaacttagagagcagtttaatcaaaaaatctgagtctgaaaaaaccttagctgaaattaaagctgaaaaattacatttaaaattgaatcaaaaatatatcaaatttgaaaaactcaaaacagaaatagaacaacaaaagattaaaattgatttacttaaaaaaagaccagagtttaatgatttagagattcaaattaaagatttaaaaacagaaatagcggcagcaagcttagacttaaatactaaaatcaaaaaatcttttactgcttattattcttatcataattatttaactaaagagttaaaaagaatggagaataaagaggatgagctagagcagcagtttagatctaaacagaaaatcaagattgactatgaacagcaagcaagaaacttaaaaacagaaaaaaataaattagctagtttttttaattctttagaattagagactccagcttatttactccaaaatttagaaaagaaagagcaaaaattagattcaaagttagaaaaaatagaagaaaatttaaaggcagaaactaaagcagcagcacatttggaaaatgaaaaacatcaagtagaaattaaattagctaaacaaaaatctcaagttgataatttacaaattagtttaaaagatcaaaaagaggcagaagaagatctttatttaaagatcttaaaaagcttaaacttagaccaattagatgaattttatagtaaaaagtggctgcagcagaagaacaagaaaattttacaaataattaaagcaaaagaaaaacgtttacagaaattaagtgctaaaagttttgaattgcagcttgatttaaatttaaatgatcaagaatactggattgctagtttagaacagaagcggctttatcaaaaaataaaagaacttgatatttctgtttattatggttctcaatttctattggaaatggttgaagatagtcaaaaatacttaaatgactatccacttttaccatatggcctagttattattaatcagctagattggaaaaagataaaagacaatatttcaccaacccaaatttttcattctgcagtacctatttttattaataatcaattagatcaagttgatttcagacttccttttaagttagtcacaggtcaagaaaaaaattttattaaagcaaataaaaattttgaagattggtctcaagctttaaaagataaagaatcagagtttcaagcaacaattactattttagaaaataaattaaaaaaattaaaaaaaataaattatcaagcagaagctaaactgcaaaaaaaatcagcttctgatttaaaaatagaaatggaaacagcagcagtagaattagaaaatttagaaaaagaaattaaaaatttagcagataaaattgaaattaaaaataaaaaaattagtgaattaaagcaaaaatatactaagacagagaataaattaaaaaatttgaaagataaaaagcaaaaagttgatatttttttagaagcaaataaaaatttagaggctaaaaaagctcgctatcaaaaaactttagctgagcttgaaaatttaaaacaattaagtttggaaaacaaaaataaatggcggagaattcatgaaaataaagtgcaattgaataatgactatcagcagtggtcaaaaaaatattataagtttagtactgaattaaaacaaatgctagcaaaagaagcatttaaattaaaaactgattttaaaacaaaagatttaaatctttttgctaatccagaatatccagatttttataattttgagcagcatcatagttatcaaaaatatgaaagaattattcagttaaaagaaaaagaagctgacaaagaggctaatttaaagtatttagagctggatttaaaaaataaatcagcagaactagatcagcttagaaatgaattagctcagctagcagctgactgggaacagagagaatatagttttaaaaatttaagacaaatagaatttgctttagcagagctgaaaactcaattaaataaaattgaagcagaaactgaagcattaaaagaagatattattatcaaaaaaactaaattacaagaaaaaaaagaacatttaagagaaagagctgctgaaattaaagcacgttttcattgttctgttaaaaattgggaaaatattgaactcaagcccaaaaaattagaaatcaaaaatcaattaaaggaaaataaagaatatctttttaaattagaaaatatgatttcaaattatcaagaaaaattaggagaatatcgagattataagggtaagttagattattatgagcttaattcagctaaaggtgaattaaatgctggagttaaggctgatcttaaagattcgccggcagcggttgtaaatgattggatagctgattataggaagaataaagctaaaattaagtctttaagagaaaaaattgaaaataatttttatcaatttaaaaatgatgttcaagttagtctagaaaataattattttaaaaataaagtcaaagaaaatttattgcagaattttaaggctaatgcttatcaatataatttagaagctcttaatatctttaaagaatatataaatcatgctttaaatgatctttctcatgctcgagataaagctgaagaagctagaaattattgggcagagcgttctgctcttcatgtgatgagattaattaattcgatgcaagatatgattagcaagatggtttattataatcaaaaggggattgcttttcctttggtaaaattaagaagaactgatctgctacctgatgataagaaggaaattatatttgagcttagccaatattttttagaactaattactaaatttaaagagcaagatattgaaattgaaaaattatcagagtctaaacttgaaaagtattgtggagatactgctctcttttctcgggcactgaggggtcgttatccagtgcttcaggtttataagatgacagagaaaaatgaatttttatatgctaaaccacaatcttatttttattcagactgggaatctgttattaagggtaaaggaaaagctactgaaggaagtgggggccaatcactttcgattaatgcttttatgatgatgatgcttttaaattataaaaaacaaaatttagctcgcacaaatccttggacaactctttttttagataatccttttggtaaagcttcagcagctcatgttttagatcctatttttaaaattgctgataaattaaattttcaactaattgcttttgctgctcctgaaattattaaaagtgaaattagtgaacgttttccagttttttgggccttagaagttgcccatgatgatcaaaatcgaggaactattgcgggggagttggcttctggtgctcgaaaaagaaaattggattaa

SEQ ID NO: 51792 - DNA, 1161 bp, Halanaerobium praevalens DSM 2228
gtgctcgaaaaagaaaattggattaagctgtttaataattttaaaaaaacagagcttaaaaaaagaaaacgatttaatttaaatgacttagaagtttatatcaaagaaaaattaggaggggctgctttttatcaagctgctggaggctatcaaaagttttttcagcttttaaaaaaattagaagctgataaacaaattagcgcaattaaaagttctgatttcaaccaacgccgccctcagcttaaaaagcgctggacattaatagaagagaaattttcaggctggtcagataaggatattgtcaaactttcgcggctgctggatctcagctattatcttaaaagaagcaaaaaacagactccaaaattgaaaataatgctttttaaaatagctaaatttttaaaaaataagcaggagcgcgaatgggccagcagagaagagcgttctttagagttgtttggagatgaaaaatttctaaatcaaagtcaaggtaaaaaattattaactaatttaaaattaaatttagttgatttaaaggctgagcattataagcatctttttgtttactggactttaaatcctactcaaattaataatatcttaattatggaaaatcattctgcttttataggagctaaaaaagctttggcagctggaattaatatttttaatcaaaattttgatactgtaatttatggccaaggcaaaaaaattgttagaagtttttcttttttagaagaacttttgggactaaaaccagtcgaagaaaatcaatcttatttaacaaatgaattaacaaaggcagaagaaaaattaaaagacgaagctcttcgggctaagcttaatatttattatgcaggtgatttagatccagaaggattagctatttatacaagtttgaaagctaaatatcctaaatttaaaattaaacttttaggggaatattaccaattactttttagactaaataagggaccttatccttgtcaaaataagcagcagaaaaatataaaagttctcaaagaagtgataagagagctgaagcaggctagttttgaagacttaagcttggactttgaaaatctttggtctaaaaatttaagactgccccaggaattaattactttagaagttttaaaaaaattcaaagagattaattaa

SEQ ID NO: 51793 - DNA, 1428 bp, Bacillus coagulans 36D1
gtggaaaacatggatcgcccactaatatcaatcttccaggaacaggcggattctcctgctgtgctgcaatctatgcgggatattgccactttatcgggcgtcttaagtgaaatgggctcacaacgcgtctttgattcaccagccgagattttacgttttctgagaattcttcagctcttaaatgaagaagcgctcggcatcggagatcgcattcccaattcggatacactgtactaccggtatcaaaaccgttttcctgacgcagatcctccgtcaaagaaaaaagtggcgcatattgtcaatgtgcttgtgaataacaactggctgtcgaaacagacaaccggtctgaaaatgcgggatctgggaaagcggatgatggatgtactcatccgcctcgccaatgactcactcgcttattatctggaagatgacattggccgttcccttttccaggcgcgccgtgatgcagaattgagcgaggcatacgatgatcatggcatttcaggcggaaacaaaatcgcaagcctgatccgcaatgtagaaaacacaattcttatgctaaaggaacgcgaattagagctgcttgccgaccggaatgccctgccgcaattacaaaaaatccacgatttaatggctgaattgcaggaaaaattgagcgagcggttccgcatgtttgaaacaatggatgaaagcctgattttaacagacctgatgcagcgcggaacaacagcgatgtctgaaggaacaaacttaagtttaggcatgatcaacaaatacctgaagtttacaacaatgcagaaaacacctttatccagcagtatccagccggaccttgttcgccaatttatcatttccatgtttgacccgcccattgattctgacattccgaatgcataccaaatgttcagctttatggagcagggccagtatgaagacgaagcgatggacgggatttggattccggttaaatttgcatccccgatttcgggaagcgggatttccgaagccattgactatcttgaaaattacgagcccgtcaccgaacctttaagcgagaaagaagaaacaatcgaatacgcagcagaggaaggctcaaaagacgagatggacgaactgctggggaactcaaactggatgctgaccaagtccatgatccagacggaaaagattgaaaactacttggaaaaaatacacaaggcttctatggaacaggcggtcattgaagccacttccggcgaatggagcgacgcagtcaatgcgttaactgcacttgccgctcttgtggcgaacaaaaaaattgatatccagccggacccgggtgacaccgaaacaaagacttatgaaaaaacgtgggaatggatgaatcaacaggacgccaaacaagtgattacaaaacgaaagcaaggtgaaccaattgatcaaggatga

SEQ ID NO: 51794 - DNA, 690 bp, Bacillus coagulans 36D1
ttgatcaaggatgatttttcggaacgggtgttcgataatgcctctcctttgaatgcaatggctgctttgagaggcattctctcagaagaagaggaacttgcgtttatgaatctgttattctcttcctccgcttccattcgcggggcaaacttcggcctttccagaaaggaagtggaaaaacagttgaaaatccagaacgataacgatgcatttttctcctttctcacccgcgttaaccaggcagtcagccgttattttcaagtgatctatgacgagaggcgcgatcaggttgtggtcatgatgcgtgtccctgcccgggcagcacgaaacaccttgtccaaagaaagcctcgcccttttgctctatatgttttatcaacaagaagtgttgcagcatgaattttctttattcggccagttgctggaagctttagggcatgaaacgaagaaagcaaaccagcgtattcagttgagccttgaccagctcaagaaaatcggcgccattgaagaatatgaggatacccattccgatcataaagcctatcaactgaccgcaatcggtgtacatatgttttcagactcatttttacggcgcacagccgagttcagccagtccaacaaactgaacaaagaggaagtattaaagtttttcaaacgctataacttatatcaagaaggagatgccgaatga

SEQ ID NO: 51795 - DNA, 3198 bp, Bacillus coagulans 36D1
atgattccttaccgcctcaaatttgccggtatccgggacttcgaaccgactttgatggatctgagcggagacgagcacattatgatcacaggcccgaacggttccgggaaatcgacaatcagcttttgcatgggcgctgtcctttattcttcaaaagtggacgttgaaggcctgaaatccagaaacctgcgtcccgatcaagtatggcgggcgcacatttccctgttgttccgaaatgcaggacaaatgaaaattgacgaaccggaatttatcgaattcacgctgcatattgaacaagaaccgggacagccgattaaaaaagaatttatcgttgaaaaaggcgagacaatcgatgaatggcagggaaaaacaacttatacatcgggcgatcagtaccataatttttccgcctataaaaaggcattgcaataccgctataaaattgattctgaccttttttacctgatctggtaccagcaggaagtcaaccaattcgccgttatgcatcctgaggaacgcttccgtattttcagcgaaatgcatggcattgaccaggcccggaaaaactgggaagaaagcatggagaaggtgaaggaaacagaggagacgcttttggctgctgaaaatcatgtaaagctgaataaacagaatctaggtattttaaaaacagcgcttgatgtttttttagacaaccagagaagattaaaagagggcgcggaaaaagcgatccattccctccttcatcttgaactgttctaccagaaagaaattgaaaccgtgaattccgttattgaggatttaagcgagcagctggatgatttcagagatcaatatgcctcctcctctactcaaaaggaagaacaggaagaggcaatcaagtccctggctaccacgctggagaaacgggaagaagcgttaaaagcgcttgagcagcggatcaaagtggaatacacccggctaaaatccattacggacgagaaaaacggccttgaagaagaactggaaagcctgacagagaaacagaagaccatttcccggacggaagaagaagcccgctcggcacaagctgagttattaaaggaactgaaacatactgaacaaaagaaaagcgaaattgactattccgttcaggaaatcaatcacaagctgaatgagttgtcagaagaactcggtaagctgcactatttcattgaagaagccgaacggttggaaaaaatccatctcgaaaagctggaacagttccacagcagccaccacgtccagacgacgattgatcaactgggcaaagcgatccatcaaaatggagacctcctgcacgaaaccaatgccgctatcaagcagctccggaaagaggagctttcattaaaagaggatcgcaatgtttcacaacgccagcagcaatctcttgattatttccgtacgatcggcatagccgcctatccgctcagggaactgctggaattggatagcgcagccaagctgaaagacgagaatcgctttaatgccattaaatatgccgtgttctttaacggcaaacatgcacaaccgccgaatgatctgtaccacgtgccgctcatggatatcgtaccggatacattcgaagaacatgttccggaactccatttaaaaattaaagccggcttgactgaagaacaaattcgttttgccgccaaagccctgtattggacaaagcagttttttaccggaactaaaccccgtatagaaaacggctttttaatcgatcaaagcgggatccgggggccacaggaaaaagcaggctacattctcagccaaagagcaaggcagatccggcttcagcaagtgcagcaagaattggggcaactggaaagcaaagcgaaaatgctggaacaaaaaatccagtctgataccgaacagttccagtttttaaacagtgagattcaaaaagttaaagaagcagaagcattcatgacccaaaaacatgaacgcgcgcagaaaaagcagaaacttgcagaagcaaccgcggcacagagccgttttagacaggaattaatacaattggatcagcgaagaaatcatattgttgaaaagcagacagagttcaatcatgaattaaaacaggttgtacaggagctggagttttacagagaactcggaaaacgaaaagaaaagtttgatcagcttcgtgaaatcgcccggcaggaaaaagaaaaaaggaaagaaatcaaaaccttaaatgcatcccgcgaagaactggaattccaattggatgagcaggaaagccggatcaagaatcaagagcggaaattgcgtgcaatcatcaaccgcctggaagacattaaccggaatatcgacagcaccctgctgcagcaaaaccggaaaaaagaacggctggaaacttgccaggcagaactcgtgatagtaatgcagcaactccaggaaatacaaaacctggtgcccgatttatacgccgtatttagcagcagttttgaaaggctggctgagctttcagaaacaacgcttaaaacacaactcagcaatgccatgatcacctttgacaacgcaaggcatcaggaaggcattgaccctgccgcagaagacaattataaaaaggcaaaagaagaatatgaaaggctggaaaaagaataccaggagtcaaaaatcctgttggagcacaacaaacaaagaacagcagcattaaaagaaaatctggaaacaaccatcaatatgcgcgttctcgagatcaacaaacgatttgccgtgtacatggccgctttccagtttcagggtgaaatcagctgggcgcagcgggaagataaaaacaggcgcacccattttgatctgtatatcaaagcacgaaaagaagggcaccgcggcacaatggaagatgtcagtgtaaaagcgcgcggtggcagagttggcaaaggtgtatccggcggcgaggaatctctcagctccctgctgtttgcccttgccttgctgcaaaacctggaaacaacccccggctttatcgtactcgacgaattcgacagcgccctggatgaacaaagaaaatcaaaagtgtttgacctgtacgtcgaacagctgcaccgaaaactgatcatcctaacaccaaaatcacacgaagatgaatacatcaaccggttcaaaaaagcttttgtcgtccagcatgacccggcgatcccgaagagcaaggtgacggggatacggttgaagtga

SEQ ID NO: 51796 - DNA, 1302 bp, Bacillus coagulans 36D1
atgatcgaacaacccgtgctggattatttaaatgcatacattttgagaaaaggggagcaactccgcttagatggcgtctcaaaggaaacatttatcgatatccccattgtaaaagtaacaaagcgaacgtaccggacggtcggcattcttacaatcggagcccgaaagccggacggagacagcaaaagcaaagccggggcacaactggagaagctgcacttaacgccaagaaaaaaactcacacttcatgaagacgagcctcaaactttgaagtggcttgatgaagggtggattgtaaaagaagtccggctgaagacagacggaaaaaccgtggacagccagtgttaccggatgggatatacctattaccggtttttggaagaacaaaagctaatggagcaccagacgcgtcaagatgaattgatgacgcttaaaaatactttcgaacaaatcgatattacatctgccgaaaccgctgtaaaatcaacgatctatgagcgcattagggaacgttttttatcagtctgccgtccggatgctttgatccaatcggaattattcgaaaaggcatggccggatcaaaagcgcatcaagttccttgcctttttagccgccatcatccagataagcactgtacaagaccggtttgactggaaagagatcggtgcttcttattataaaaagatcggcggttctaaagtgtttgaccggaacaaatccgattttctggatctttttgaagcttgggcgggttatccggctgaagcactcggaatggtgagccttggcaacctcaccccggtctatttttcaggacaggtaacagggacatattcatcctatcattacggcccggttcatgccgtgacgaacttatccctttatgaagacagccattcatcagaagccgaaacattatggattgtggaaaaccgcgctattttaacaagaattgctgcggaaaaagactttttgaaggacatgcgggttttactagtatgctgcgacggccatgtccgctctgcccatcggcactttattgaacagattctccggaattccccgccaaagcaggtaatcatctggacggactatgatccggacggtttcagaattgcccgcgaagtttttgaaattgtaaaagaaacccctgttgtgaagtggatcggccctgccggcgaaatcttaaacagctggacgcaatacgccggacaaatgtccgcattccttgaaacaaggcgaatggaacaagaagagcagacaggagatgtgatgctgtggaaaacatggatcgcccactaa

SEQ ID NO: 51797 - DNA, 1650 bp, Clostridium perfringens NCTC 8239
atgaattttgattttttagatgatcaacatatgagaatgaaaaaaataggtgcttattcaatattgtttagaaatagtatagcaaaaggtacttggaaaaagtatggattttcagaatggtatgagcaggataatttaatctttactgtattactttatataatggaagaatctttaaaaaatgatatgtgcacaatagacaatatagggtattttattgatgaaataaacagtattcattttaagaaagaattatcttatgaagaatgtaaagagttggctgaatttatagttaatacgattttatgtaatgaaggtaaagtcatgtattttaaagcttataattttaaaaaggctcaatatgaagatataaacataaattttgttaaaaatagaatgcaatatgtagatgatgttagaagagtagtatattcaataactgatgatgggtattcatttattttatcaaccttagaagtagaagaaaatttaaagataactatacatgaaattttgtttaagatgcatttagaaaaagcttcttatgataaagcagttgatgatataaaaaatatatttaaccgatatagaataagagttaaaagtattgaagatgctataaggaaaatcaaggagaatccactaagttatacaacagaagattatgaaaatatgatggaagggaatcttaatcttttaaataaaataaaagaaaagttaataattcatagagaaatggtagagcttaggataaatgaatttttagagaatgatataaacattaacaaattaaataagaaagaagaagaaaatttaaataatttaaaaataataaaaaattatttaggaagaactatagatgaagatcaaaaattattaaaaaaacattttgatttaaaggatgtttatggtatggagctagaaacaatatcaaagatggcattgattgaaaggtttaattttagaaatgaggtttacgagaaaatattagatgatcctaatatgttagagaatatagatatctttttaagaccattattaaagagggagttgcctaaaaagtataatataaataaatctttagaatatcaaaaaaatataaataaagattattctgaagaggatgaggaattgtcttttgaagaaagtgattttattgatgaaataaataaaaagaaaatagaaaaacttaaaaaatataatgacgtaataacattgattttagaattatcaatgaaacaggggggaatttcacttagagaaattcaagagttaataaaagaaagtaatgaactaatggaaaaattaattccaacagttgaaatctttagagaagttattatagaaatgcttaaaaacagaaatataaatgtaaatgaaattagagaagagagaaagaatgctattgaaaatggagaaattgaatttcaacttaataaaagtatattagaagttttagataataatagtgaacttaatattataaaagaaatcaatataaacaagttaattgataaggatgatattaaacttgagggagtaaaaactgaagatggagaatttaaaaatttcatctgttcagatattttatttgaatctataaggggggataagaatggcttattctatggaagaagtaaagatcagtaa

SEQ ID NO: 51798 - DNA, 711 bp, Clostridium perfringens NCTC 8239
atggcttattctatggaagaagtaaagatcagtaataaaatcttttattatttactaaagtatggtgagcttaaagaggaagatgaaggagatttgtataaggattattcagaaaatgttaatataactgaattggtaaaagagattggagaagattcagaatgttatataaaaaaatatgggggagtagtataccttattcctaaagaagaaaatgactttttaggatattctaaaggggagttgaaaaaagaattatgtaggtcaaatgctaatgataaggattattatttgtctcaatttgtgattttaacattgttggtaacgttttataattctaagggagttagttcaaagtccagagattatataaaaattggagagtttcttaacataattacagatagattaaatgaaggagctgaaaggacaaaggaagctgatagttctggaatagctttttcaaacatattagagagatttgaggctttaaaaagtagtgataagagaagtatatcaaagacaacaaaagaaggatttataaataatatattggattttttagagaaacaaggattaattgattatataaaaaatgatgatatgattaagactactaaaaagttagataattttatggattggaatattttaaataaaaataattatcatagggtgctgaaggcgttaggagaatctattgatgagtaa

SEQ ID NO: 51799 - DNA, 4392 bp, Clostridium perfringens NCTC 8239
atgagtaaaataaataaacttagatttgttaatttaaattataatcataatacaatgaaaatagacgatgaaattttttatcttgatggacaagatacaatgttaaacttaagaaatggaggtggaaaatcagtccttgtacagatggtgatggctccattagtaaataaaaggtatagagcattaaaagatagaacatttgaaagctattttactacaaataccccaacttatataatgatcgagtggatacttgatgatggagcaggatatttattaactggaatgatggttagaaaaaaaagtgtgttatcagatgaagattctaaagataaactagatataataaattttatacacgaatataaaggaaaaaatgaatatgatataaaaaaaattcctatagttgaaattaataatgggaagaaaatggtgaaaagctttttaaattctaaaaaattatttgaggaattaaaaaagaataaagaagttagatttaattattatgatatgaataatccggtaactactaaaaattattttgaaaaattacaagaatataagataaatcataaagaatgggaaaccataattaagcaaataaatttaaaggaatctggattatcagaactttttataaaggctaaagatagttctggattagttaaatcttggtttttgcctgctgttgaaaataaattaagaaaagatgaagatagaattaagaattataggaatttagttaaaaggtacatagaacaatataaggccaataaaactaatatagataaaaaggaaaaaattgaacttttcaacaaattatcagaagatattaaaaatagctgtgatgagtttatatcaacaatagaggaaagaaaaggactagaaaataaaatagctaatattattaggattttaaaaaacaattatgaggataaggaaaatgaagaaaaagaattagaatgtttgataaagcaattagtagaaaaaatagctgaattattttatgaggagtattctattaaaatttacaggaaagaagataaaatagaagagttagaagagtatgttaaagaattagaccacttagtaaataaaagtgaagaagaaaaaaaggctttaaataaaaaaaatgaaattttagaatgttcaaaaatatataaggaatatcaaagtagatcacaagagttacaaagtttagagagagaacttgagattttaactaaaaagaaagatgataatacaccacttataaataatatagggtttactattagagaaattttaaataaagaaatatctgatatggaagaagaagttaatgaaagaaaaacaaaggtaagtgctttagaatttgaaaaagaaaatcttaaaaatattttaaatgaaaatagattattaattaatacattaaaaggaaaggaaggatttttaaaagctagcttagaatcttttgataaaattcaaagtaattttaatgataaatataatgaaaatataattaggaatatatctggatattttaatgaggaatcgctattatttcttggaagaaacatagaggattataattttgatttaaataagaatatgaaaaatattactgaagatattttttataataaagaaatattaaaaagcaaaaataatgaaaaagaacgaaatacaaagttaatgtttgattttgaaaataaattgaaaaataatgttggtttaattgaagaattagatgaaaaaataaaaatatgtattgatgttataaaatacattgattttggtgaagagagagtatttgatacagaagatattttaaatgctttttatgaaaaaatagattttttagaaaaagaaaaaagtaagttaataagacaagaagaagacatactatatgagatagataagctagaaggtggtagagtattagaacttccaaaggaaataaagaaaaagcttgaagataaagatattaaaattatttatggtatggaatggcttaaaaagaatggatattctactgaaaaaaatattgaaattgtaaaaaataatccttttataccatattcattaataatgagttctagtgaaattgaaatattaaaaagggaaggattagatatatttatatcaaatccaatttctataataaatagattggatttagaaagtaatttccttgaagtagataaaagtatggtgtcttttaataagttgaatttttttatttcctttaataataagcttttagatgaaaaagagctgataaagttaataaaagaaaaaaatcaatacctagaaagtattagaattaatatagagaatagagaaaatgaaattagatttttggaaaaaaagaaagaaataattcaatattctaagctagacaaggaaaaatatgaaaatataaaaaaagaaaagacatttttagaaaaaaagattatagaaataagagaaaatgaaatatctatagctagagaacttggaaatatagagattaatatttcagagttagaaaatagtaaaaaagttttggaagaaaatataagaaaaaaccttgaaaaacttaatagctttaatgaattaatagaagaatacaataaatataaagataataaagatgaactaagttcaattgaatttaaaatagaagaaattaataaatttttaaaagaaaatgagaatagagaattagaaattgataagactttaaaagatataaataatattagggtaagttacactaatagcttagaaaaattaaaaagtgaagctataaaatttagcttttataaagaaggactatttataaaaaaagataaggaagatttactagcagagttttatgttttaaataaggaaataacagcttcagaaaaagacttaaataaaagaatagaagaaaaaagtagagcatttaaagaaagtgaagatgaattaaatgttaaagctaataagtataatctagaagaatctgaatatattaatgaagtttataatataaataaagaatttgaattaaaagatttaatagaagaagaagagaaaaattataattatttaaaagacaaaagatcgaatatacttcaagaaatagctggtgaaaaaagtaatgttaagaatttatatgaatctttaaaaaaagatcttggaaaaactaaagccaaaagtaagacattgctttatgataaaaactttgaagaggaaatagcaaaattaaaaattgaaaaagcttcaaatgaaaagaaaattaaggaagtaattaatgaaaaaagtaaaattgaccaatatttaattgatttaagtcaattcaatgaatttatcatagagaatgaagaagatatatttatcgatataaaggatttagataatattataggaagtattaaaagagatttgtttgaaaaaaaagaattagagttaaaaagagaggctaaattaaataattgtatagttgatattgaaaataaagatagttttagaaatgaaaatatatttaaaattgctatacaatctttaaagtctttagtaagtaaaccaataaagtttaaggaacatttaaatcttgtaattaattcatataattctattattgaaaaattatcaattgatattaaattaattgagagtgaggaagagaaaatattagatagcattttagaatatattgaagaggtcaataaaaatatttgtataatagatgataattcaagtataaatataaataataaaagagtaaaaatgttaaatattacagtacaggattttgaaaaaaataaaattaattatagattgaaacttcaagactatattgaagctattagagaaagagctattaaggaacttgagaagaataattccattgaagaaataattagtaataatataactttatttaatttatatgatgaaattattggagttgaaaatgttgagattaaattatataaaatagaagagaatagacaaaggataataagttggaatgaagtttcaaaaaattcaggaggagaaggatttctttcagcctttgtaatattatctagtttgctatcttatatgagaaaaaatgaaaatgatatttttagtagaaaagaagatggaaaagtattaatcatggataatcctttcgcacaaacaagttcttcacacttgttaaaacctcttatggatattgctaaaaaaagtaacactcaattaatttgtctaacaggactaggtggtgattctatttataacagatttgataatatatatgttttaaatttagtatcatcaaaattaaataatagtattaaatatatgaaaagtgagcatataaaaggagataaagaggaggaaactgaaattattgtttcatctagattaaaaatagaagaacagactagtttattttaa

SEQ ID NO: 51800 - DNA, 1002 bp, Clostridium perfringens NCTC 8239
ttgaatttaagtagttttaaaagaaaaagaatagaattagatgagttagaaaaattatttaaaatagatacttattgtgatttatatgtaaaagttaatgagttaataagtgcaaacaaaataaaacctataattagtagtggacaaaatggtaagagccctgccttatataaaagatataagatagttgatataaaagaagagaataaagaattaatagatgaaattgaatataaattaattagtaaatttaatattgagtattacagaaatcatttagagaagtatagtgatcatagaaaatatatacttcaattaaatgatttttttataaataaaagtgaatttttaaattatccagtatcaatgaatgaaagatcttttcaaatatggggaagagagaagtttttgcaaaaagaagaaggaaaatcaatattaaaaaacttagatattgatttaagaaccttaaactattatgatacttcagagcctttagcatattattcaagaagtaagaatactcctcaaaatgtattaattatagaaaataaagatacatattatacatttaggaattacttaataaataataataaaattttagatgaggaaataacaacaataatatatggagcaggaaagagtgtttggaaaacttttaaagattttaaagtatctgtagaaaagcatgtgtctaatcaaaataataaatttttttattttggtgatttagattacgaaggaatattgatttatgaaaaattttatcatttgttttctaaagaatataatataaggccctttataaatgggtataaaaaaatgatagaaaaatcagaaatgatggaagttaatttacctaagactaaagctggccaaaataggaatatagaaaatgtatttttacaagaatttagtaaaaaacttaatctaaaaatattaagaatattagagaataatttatatattccacaagaaattattaacgtaacagatttatag

SEQ ID NO: 51801 - DNA, 1644 bp, Eubacterium hallii DSM 3353
atggattttatacaggagaaggagaaaatgcaatatgaatttttaaaaaaatttcctcgaaggatgaaaaatgtaggcctatatgctgtcattatacagaacagcagtcagaagttatcatggaaacagtatggattcacaaagttcgatgaacagataaacctgctatttgaagtgttgctttacattatggaacagtcactaaaagaggaaaaatgtacgatggatgatatagcgacctatatagatacgattaatgtgcagtatctaagaaaggatatttcttatgaacaatgtcatcaacttggggattttatcgtgaatacagtattgtctaatgaggggcggccgatgtattttgggggatatgatttcgaaaaaaatgaatatgaagagatgcatatcagttatgtggctaacaaaattgtctatgtggagaatgaggtcaggcgaacttcatattatctgaccgatgatggttataatcttcttttgtctacattggaaatagaagataatatgaagtttaatattcatgagattattttcaggcttcatttggaaaaacaaagttatgacaaagcggtaaatgatataaaaaacgtgtttaaccttatgagaatacagtttcagcgagtgcaggaagcaatgcgccagattcgcaggaacgcattgagttattccgttgatgagtacgaagaagtactcgttggaaatctgaatacaattacggatacaaagaaaaaatttcaggaatataagacagttattcaggagcgtgtaaaagatttagaagaggaaaatattaatatacgtaagctaagtaaaaaggaacagcaggatttaaataatctccgggtgattgaggagtatctgacaagagttcttgatgaacatcagaaaatcttgaacagtcattttgatttaaaaatattgtatacagaggaattggaacgcttatcacaggcaaggctgatacagcgtttttctatgagaagagatttatatgataaagttttaaaacaggcagatacattggaaaatatggatatgtttttacggcctctttttaatagaaatcctgagaaaatttataatctgaacaaagcattttcttacgaaaaatcagtaaatgccggaatggagaaagataccgaggaagaagtggattttgacgaggaagcatttcgcagggaaaaagaagaaaagttacaaaagaagcttttagtttatgaaaagagcctccaatatttattagaaaaggcatcggttacgggagaagtttctttaggacagttaaaggacagattggacatttatccagaagaaaaagagatttttataccaaatgtcgatgtatttaaagagattatggtagaattgatccgaaatcgaacgatagatatcgctactctgaaaaaagaaagaagagaatatattcaggaacagccagatggatttcagcttaacgaaatgattttaaaattagtggaagaacagccggaaaataacgatataaccagcattgaagtagagcggctggaaaatgaagaagcgattacattttcagagataaaagatgaagaaaatcggaggaaaacaatacgctgttctaatgtattaatacggatttttaggaaatag

SEQ ID NO: 51802 - DNA, 732 bp, Eubacterium hallii DSM 3353
atggcatatacaatggaagatatcagaaagagtcaggagatattttattatcttttggaaaaacacgagcttcgggaagaagatgagcaagcgctgtacaaggcatatacggaggaagaagatattcagaatatcgtgaaatcgcaagctgagaccgcatcctgtgatattgagcgttatggtaacacgatttatctgattccacaggaggaaaataattttctggggtattcaagagtagaacttaagaaagagttgtgtaaatcaacagcgacaaataaagactattatctggcacagtttgttattctgacattattaacagaattttttgatggtgatggaaacagcagcagagcaagagagtatattcgttccggtgaacttatgaatattttgtcggagcgtctgagagagggagccgcctatgaggaagagcataacgaggaagaaatggatactgcgggaatttcattttctgatatgtgccatgcatatgaagcgttaaagtcagatgataaaggttctcatgcgaaaacgacaaaggaaggctttttgtataatattcttcttttccttcaaaaacagggacttattgagtatatagagcgggatgaaatgataaagacaacgaaaaaattagacagctttatggattggaatctgttaaatcagaataattatcagagggtaaagaatatattgggggtgattgaaaatgagcaaaattaa

SEQ ID NO: 51803 - DNA, 4470 bp, Eubacterium hallii DSM 3353
atgagcaaaattaatgcggttcggtttatcaatcttaactataacaataatgcgatgaaaatcaatgatgaatgtatgcagtttagcgggaaaagtacacttctttcattgagaaatggcggcggcaagacggttctcgtacagatgatgacggctccttttgtgcatagaggcaagcaaaaaacaaaggacagaccgtttgagagctattttacaacagcgaagccttcttttattttggtggagtggctgcttgatggtggagcgggttatgttcttacgggattaatggttcggaaaaatcaggaaattagtgaggaaaaaacagatgcgcttgaaatgatggcaattattagtgaatataaagagccttgtatgcaggatattcaccatttgccagtagtagagcaaaatgaaaaaacgatgaagttaaaaagctataattcctgcagaaagctttttgaggactataaaaaagataagaagctttcctttttttgctacgatatgagcagcccggcacagtcaagacagtatttttataaactgatggagtatcagattaattataaagaatgggagacgattataagaaaggttaatgtcaaagaatcaggattgtcagaactgttcagtgattgtcggacagaaaaagaactggtagagaaatggtttttagaggctgttgaaagtaagttaaataaagaggaaaataaagttaaaaattttcaggaaatactcgaaaaatatgccggaaaatataagaatattaaggagcagctaaagagaagggatgccattcagaaatttaaggaagccgctgaagaaatacagataaatgcggaagattttcttgtaaaagagggagaaaagatagagcaggaaaaagtaatcgctgcttttatagcacgattaaatgtgttgtatgaagaagcggaaatagagcgggaacggcaagaagagggcagaaaaaaattgcaggaagaattagaattcttaaaatacgaacaattatcctgtgaatttcatgaaaaaaacagagaaaaaagaaatcatgccagcaatcgtgagatgatagatttagagaaagaatcgcttcttagaaaacaacaaaaaatacagaagaaagttcatgtatttctctgtgcaaaacagcaggagatggtcaatgaggataaacaggaatgggaaattcgaaaggaaaaagctgcaatctcccgtacaaaagaggaaaatttagagccggagagaaacagaatcggcggacagttaagtggatattatgaatatcgcttaagtgataataaagaaaaaaaggaggcgataaaaaaacaaaagcttcagataagaaaagacatttcacagcagaaagacattttaaatgaatatcgggaaaaaacaaagaaaataacagagagtaaaggaagtttccggagtctggtcaggggttacgataatatagaaataaaatataattccaattataaagagaatctttccagaaatatattgggagtatatgaagcaggaatgcttgatataaaacaggaaatgtatgataaagagcagaaaaagagcattcaggaaaacaaggaacagaaagaaaaatccgaaaatacgactgaggagattcacagaacggaaagagccattgaagaaaaaagagaaaagtattttcagaaagatagtgatataaagcaggcagaaaaagagaaaaagggatatgaacaggagcttgaggaaagaaaagacattcttaaatatcttgaattgccggaagaaaagctttttgccagagaagaaattctccataaggccaaaataaaaatgcaggagcttagtagcaggagaagaacgctggaaaagaaagaagatgcattacaaaaagagtataaactcttagtcagtggtcgggtaatggaacttccagacaacttgaaagaagaatttgaaaaattagatgttccggttgtatatggaatggagtggctgaaaaagaatggatttacagagaagaaaaataaagaaattgtaagccaaaatccatttttgccatatgcacttattttaactcgtcaggaactaaaaaagttatcagaaagaaacggagagacatatacttcatttccgatacccattatagagagggaaaatcttgaatctataaagttagatagaacacaatcttttgtaaaaatgcaggatattcatttttatattttgtttaatgaaaatcttctggatgaagaaaaaatggagattatgatagaacaaaagcaaaaagatattgctgacattcgggaaacgatgcaaatctgtaaaaatgaatatgaagactatttccatcgttttgatgtgataaaaagacaggcagtaaccaaagaaaactgggataaaatacagaaaaaactacaaaaactggagaaagaaaaagaagacattttccagaatatacaacaggcaagagatacaaagcaaagcttaaagaaaaactttgaaatcctgcaaaaaactcttagggaattggagaagaaaattgaatcacaggcagccagacaacgcgcatttaaagaacttagaacggcatatgcagagtatgaggaaaataataagaagcttcaggaatatgaaagagaagaagaacgattagaaaatcgccaacatcttacagaagaaaaaatcagccagcttgaagaaaattatagagaacttagcggacaggagaatagtctgttcagggaggaagagtctattcagaatgcctgtcagaagtttgcagcgtataaggagataaatagaaatgtaaaagcaggtaagcttttaggtgtagattctacgttgaggacagataataattcaggtgtaaaaatcattccaagtgaggcggaagttcttaaattagaagcaagatatgaagcggttactgcagacatttcccaggaattaaaagagttagaattagaagaagaaaaggccctgacccgctaccacaaatctttcggagaattacgggaactatgtcaaaaatataatctgaaaaactcagaatggcaaaatatcatttatgacaaaagagagcagctttaccaggaggcagagttagaagattacgataagaaaatagagcgaaaagcaaatcttctaaatgaggaagataaaaaaataggaattttaaacagccagttagaagggattttaaagcagatagtatcagaatgtggaaaaggaaatcctttagaagaagaaaaaatcagccagaaagatttagaaagtgcaaagaaccagacgaaatatcaactcagcgaattagagcggaaaatagcattttctgaaaaagcaatacagaaatacagagagaatctcacagcactttctgaatataataatttttccgcagatgaagaaatccattttgagcaggacttcaaaaaaatgagtgaaaaggaactgcgtgattttaagggaatgttgatcagagattataatgatataattagatgtgttcagaaatgcagagaaactcttgcacagacattaaataaaatcgcgagacaggaagcatttcaggatgcaagttataaaacgcctcttgaaaatatgcttaaagtctgtgacgatgcagcgaaagttttacgtcagttaaacatcaccctggaatcctatgattcacttatgaagcagttagaagtagatatttctctggtagaaacagaaaagaaaaatgtaacggaacttctggaagattatgtccagaatattcataaaaaccttgaaaagataggacgtaattctacaataaaaatacgggaaaaatcaataaaaatgctaaaagtcattttaccggtatgggaagataatgaaaaattatatagcctccgcttaagtgattttgtggacgaaatcacagaagaaggtatccgtttatttgaaaataacgaaaatgcccaggaatatatcggaagaaaagttacaagcaaaaacttatatgatactgtggtgggaactggaaatgttcagattcagctttataaaattgaagaacagagggaacagcagatcagttggaaccaggtagcaaaaaactcaggaggagaaggtttcctgtctgcatttgtcatattatcaagtttgcttgactatatgcgaaaagatgattctgacattttcatggacaaaaatgaaggtaaagttttattgatggacaatccatttgcccagactaatgcagaacatcttttaaaaccattaatgaatcttgccgataaaacaaatacacagttgatctgcctgacagggttaggcggcgaatccatttataatcggtttgacaatatttatgtactaaatcttattgaagcacatcttagaaatggaatccagtatcttcgtccggagcataaaaagggagaagaagtaaaagtggaaacgatacttccaacacatatagaagtggaagaaatgctgttttag

SEQ ID NO: 51804 - DNA, 981 bp, Eubacterium hallii DSM 3353
atgaagaaaatcttactcgaaaaactgttagataattgtaaagaacaggagtatcaaaagcaatatgaatatattataaacctgctggaagaaaagaagattaagccagtaaaggcttcaagactaaatggaaaaagcccagctctttatcgggaatactggttgttagaggagacaaaagattatagtaattttattgaagaattaagatatcagattataccggacatttctgtggattattatctgagacatttggaaagttatgaggcagaccgggaatgggtattgcaattgaataaatatttgaaagaaagaaaagagacacttcagtttaaagtatcggcgaatgaacgaagttttgaaatctggggaagggaaaagttcttgtctaaggggcagggaaggcggattttaaaacgatgcgggctggagatgtctttttttaatatctatgaaacgacggagccacttgcttattattcccgcacaagaaatgtgccgcaaaatcttctgatattagagaataaggatacattctttagtatgcgccgccgccttttagagggaaatgagacgatactcggaataaagatagatacattaatctatggagcgggaaagggaattttccgcagttttgaggactttgatttgtgtgtggaaccttatatgaaagcagcgggaaaccagatttattattttggggatctggattatgaggggattgggatttatgagaatttgtcagcagattttggtgaaaagtggaatattgttccgtttgaagccggatataggaaaatgttaagtaaggcaaaaggtgtggatagtattccagaaacaaaagaaggacagaataggaatataaaagatattttcttttcttatttttctacggaacaggtaaaacgaatgaaagaaattttggaaaaaggatactatattcctcaggagattttgaatatttcggatttttaa

SEQ ID NO: 51805 - DNA, 1467 bp, Escherichia coli TA280
atgtcgctagggtttttggagcaggctcgtaatgaatcaatggcacgtcgtgagctgtctattcagtctcacgccttgctggtcgtgcggacgctggattcaatatatagcgctcttcagcgaaatccgttcgatggtgttgagcttgatgcgctggcggcaatcatgtatctctttgacgccatgctttattatgctgaccgcgagcgccagcctggaatgacgcgtaaggaagcggagttatgtctggttgggcacctcaatgaagcctatccgggacaagaagaacccgactacgcacaagtggccagcaagatttttgcggcgatcaaagatcctttccgcctccgttattatgatttctcgcaacgaacgcattccgaagagcagatagtccgtctggtacgctatgaccagctatccggctcagatgatattctctggtcgctgactgatgaaggaatgttgttctataccctgcgcttggatgaaacgccgatagaacgcgctgcgattctggcctggcgcacgcttaaaaccatccgtcgcggagagatcgacaaggcagtacaccagatccaatcaacacagcggcaactggagcaatatctgattggaatgcggatgaaagtgcgtgccgcccagtctggtgatttgagtgcatcttatgcacacgatatccgtcccgtactcaatgattcctttgataaaacccgagaggttttggaacatatccagaactcaatgtcggccattaccgaaatgctggttgaaggaagttcgaaattaaatcccgacaaattaaataagctacgtagggcacaggagatttttgctgaggtctgcgcttttacgcagcgctatcaagactgcttacttgatgttaacaaagattttgagcgagctcgtctgaaactcattattcccagagataataccctcttccgggaaacactggaaaaaggtgcactcaagcccttgttgtctcattcccccgacactgtcgaaaaggaaatcgatgatctcaccgcacgcctgttggctccccgaagacaggatgatgatcggcacattctgtttgaccttgaggcgctactgaacctttatctcgatagatttgaacaggcgcttccacatgagatacaggacctcaccgatcagcctgtagctattgaaaccaacctgcaaggtatccctgaatctgtcattaaaaaatgtagcgattgggttagtgaccgattgaagaattgggggcatgtgagctttagagatgtttttgacgcctatgagggcgaagaattatccgaacaagagcaacaggtttgtttactccatattggcagtctggcagctaacagcgatcccgcaatagaagtggagatagacgacgctatcgaaacaacgctctggcgggctaacaatatcaaactgttaacggttgctcccttatacccctttgaggagtag

SEQ ID NO: 51806 - DNA, 4437 bp, Escherichia coli TA280
atgtggctgattaaacgggtttatatggatggtgcaggccatgaagaagctttctacaaggacctcacactggactatattggcctgtctcaagcggtcagtagccctgttgttgaaggcctgcgctcgcccgtcaggaatgcgaaggtggtgaccagtacttatcagcagcttgtgaatgggggtggtaagtcgacctacatcgcgctgctgttatcgatttttgagccgtccgttagtgacttcacccaatatctggcaaatcatcgccagagtgaataccactaccgcaattacttctataaagaactctctgttgttttggttgagatggtcaatgaatcaggacaaacgttattactaggacatgctcatcagcgtaatggagatgatgttgaccgcacactgtttatttgtgatgcgcccgactccctgatgggtgcgccgtttgatgaagtcccttcttattcccgcgcggaacgcaattctgagctgcgcccctatgccaatagcctgcgcagttttgatagctggcttaatctcaaggtcggtagtgaaggcggtatgcattggcgtaaaaccaccagacagaacgagtggcgcgcatttttactggaacaacaaattaacgttgatcttatcaaaacaatggtgaccttcaactccgaagaaggtggcctgacccgttttatcgaatacaaaactgaacatgatttccttggcgcgttcttcgcctgcaccatgtctaaagatgcggctgagcggctgcgggaactggtagcgcatgaagttgaacgtcagggagagttagaggggattcgtcgtaacgagtccttcctgaaggatgtgctggctaactggctggcgtttcttgatccggctaaacagctggaaagcaaccaggcacagcagcaactgctggatgatggcttccgagaagcaatgcgcgatctcgcagcctttgttggggatgctcaggttgaacagacacagcttgaagataacatggatagtttgcaaacgcatattggccaggcgatgtctctgcgtgagcagttaggtaagcgcagagcactgcttgaatatgatctcgtgcagcatcggttcaacagacaaaaagcgatagtcgatgcgcttcaagacgaggccgataccaatcagcgccagattgagattactcacgctgctatagactacaaagcctatgctaaggccctgaatgagtaccgccaggcagatgaagatctgaaggtattccaaagtgaaacggaaaggccgctacaggtgattttcgagcgtactgttggcgaagccttgggcacattagagtgggcaatcgacagacatcgccagcaggaggctacgcttgaggaagaattagggcagatggacagggaaagccatgtcctcagacagtcatacgataaaatacaaaagacgttgggtggtctggaaacggagcgtgacggatataaaagagacaaatttcagggcgaatcgcaacggaatgaattatgtgaagctgggctgatccagaaggatgaaacaccagtagcagcccaataccgactggaattaaccttacgcgatgcaaagcagagtgaagaactggctaatacaattcttcatcagaaagagcaggcgctggaagcgcagctgcatgttgtgcgggaggcatcaattgagaaaagtgaggcccagcaaaaactcattctggctgaacaaaaacaccagtcggctgtggatagtgctttagttttagcaaaaaactatcaaaaactgccaacgtcaacgcgacatgatctggatattgaagacacgagttggcacagcgagctgtgtgtattgcagctcgacaaagtattgaatgcgaacgctcaaacgctgaatggaatgaaagagcgtttactgcaagcccggcacgaactggacgagttgagggtgacgggacatgaactggttgctaagcaggtcaatgaggcacttgaagcgttttatgctgcgggcattgcacgggataagctatggacatttccacactatttggcctctgcttacaacgatgatgcacaaaagattgcagcggtgatcgatcagaaccctggccgctacctgagcctggtcgcactcgacaatgtaacgtttgaacaggtccataaaattagtgagatcctaccctggaagaaggcacctattgctatttacttgctggatgaagcacaagatcttcgccgagaaacgtctgaattagtacaggttgtcctctcaaaccccgataagcacggatatagccaggcagcttacgaaacccggctgcaagacctggagaataccgtggcgtcgcaggaagtcagtgtgaaggctacggagagcgcccttaaagtactggaatctttcaggaatgactggagtcggcattacgaacagtatggtaagcattgggcgggactgcttgaccaacgggagctggctctattaatactggaaaatgctgatgcagcacttaagcaagctgagcatgatgagcaaacactgcgtgacgagaagagagatgtccaggtgcgtttaaacaacgcccaacagcagaaaattcaggcagaaaaagcacatgataaagtgagtctttttgtagaaaaagaatgggcgaagcgtgaaacggcaataatgaaactggagcagttagctgcacagattcagcgaggcaagaacactctttacacccagagagagaggctggaacggctgagcgagctcgagaagaacaaacgctccgagaaaacccttttaaatatccagataggtagctggagtaatctgtgtaacgaaccgttctattcagatattacggcgactgaaagtatggaaggacgaagccctgaatatgctcatgagatggctgctcaggcgcacaaaaaattgctcgaagcagccaacggtgatcaagtgaccgttctcaagcaacaactgaaagatgctgaacaggcacaacgttacgcctctgagcgtttgaccgctcaacccacctacaatacatatccggatgaggtaaaagctgcggccatcaatgagctaacggtaattaataaccgcatagtacgcctcaaagaacagcaaaagcaattcacgcaaaatctaattagctctcaggtaactctgcaaaaattttcccaaagctgtgaggaggctagtaaagcacttgacgaggattttgtctgggaagagaagcccattgagatagaggcaatccaaacgtctctggctgaaatcgtcaataacctttatgcgattgaacaccagatcaagttcctactggaacaaaagacactgctgttgagaaagattgaaaatgtgaaagagcggctacagaacgccaaaacagctcaagcgatgatccagcccattacgccgagctctgccgcgggtctacctggtaggatcctgagcatcacagaatatgctgacgatctggctgcacaatgccaaatgtatgccggtttaaatgaaacgctaaaacagcaaaatatgcgcgtctctacggtctggggaaaatttcgcaaacggatcgaagaagagttggccaaggatccagacgcccgagccagtcaggaatacttacggcagttggactcaatcgcaacttatcatgaagtgctgggcgatttggagagggtcggtacagggatctcgcaggtattcgaagctgtgcaggacagcctcgagcaattccaacgttcgattgatctgactgtcacccatctgactgctcatctggaaggggcgattaagcttctcaggcgcgcgatgtcggtcaaaattcctgaggattgccccgtactgcctggtcggcccattattaaaatgaccgaccggttgaatgatgttgccgctgatctcaggggttttgccagcagccgcttgcagcagtggatagccaggggacagataccccgagcgcccaatcgggacgccttgacagctgatttggttcagtcggtatttggcgaaggggaactggaggtgcgtttgctgaagacgaatgccagccgtccacaatggactcctgtcacccgacttgaaggttcgggtggacagcgccttacatctgcctttttactgtttgtgacggttggtaaagtacgagagtacgatacgggtatttcaagtgcaggattcttgttagccgataacccgctgggtaaatcgaatgccaatgatctaatgcgcattcaaacccaaatggccaaagcctataaaatccagctcatctacctgactggtatttcggatgaaaacgcccaatcaatgtttgataaccatctcttcctgaataaagttcaaaaactgaggcggcgcgatttggtaaccgttgataaagaacgccatgccctgtgggcggcttctctggctgctaagccacagttcgatccagtcatttaa

SEQ ID NO: 51807 - DNA, 1056 bp, Escherichia coli TA280
atgagtagcgtaatgatctggctatcccgactggagtcgacagccaataaacatcgtcttgccgctggtaaggccgcgcgtacagtgaaagctaatgcggtgctggatgaggtattacgcgcacacaatcaagaggccttgagccaggaggtgcctgatttgctgagtcaggctgttacgcaactgcttgagagggactggcgggctcagcctaagcacaaagcgagttggcagcgctactggcggggtatgagcctgccaagtacttttgtttacgaaggtgccatcgttcctacgaagacaacatcagaaatagcctggcatccctggttggcccgacgtattacaggacaacttacccagccaatcaaggcacgcttacaacagttgaatacatatctttttcgccaaaccgggggcgacaagtcgctattcccgggcttgcttgggcatcgtgagcggtctctgcttatatttggtgacgaaaaagctctggactccttgccacctgatggctggaagcatgtcactctgactttggctgatatgggcgcgtttcgacgtgcgccgcctttaccgtatgagtcatctcgttgccatgatcttccggctatcattgttgaaaactccgatgtgtattatcggctatgccaacttaatcgagcacagactcgctggtcactggtcatttatggcgcaggtaacaaagtttccggtcaggcggagtgcgtgtcacaactccttgaggtcgaacaggtagaacaactactttattttggcgatctggatgttgcgggcttaaaaatcgctcatcagttgcgttgtaagttgcttaatgattacggtatcagcttgcatttagatgaatggctttataataaactgatcttaaatggcctgatgacagcggaagggaacgccaacaacgaacggtttgatttcgagttacagtgtggctggatgccaaagtttgttttacgagaaatgaagactcttctggcgatccaccagcgtctcccccaagaaggtgtggcttctttaggtttatttatatag

SEQ ID NO: 51808 - DNA, 1518 bp, Bacillus cellulosilyticus DSM 2522
ttggagaaattagacttattggagatatctagtggttatcaggaacggatgagaaggttagcgttatttgacgctctttatgaattagaaagaaaacgtgaacaagatcagaataataatgtaatagatatgaaaggtttaggtttactcacgcttttattcttttttgagaaaaaattgatgagacagtataaaacaggagcaatgcagctagcatatttcattgaagagcttacgaaacaaaaatataagctagataaaagtacctatgagaaaatggcaagaacaattattcaaacgtttcgccctgcctcaggaaaaaaaaggagttacagctatttcaattgggagaaaatgaaagacgaaatgattgagtattcgattctaaaagctaatagtttcgatgtgaaaacgaatacgcagtattataccctcgacgaagatggtcttgaattagtatttgcaacaaaagagttttatagtgaatttcagctttctattaaccaattacttctacgtaagcaattagataaaggggagttcaaaggagcacttcgacaaatcaatgaaatgcggattgatgttgaaactcttgaggaacgtatgattaaactgagacatgaaatacaaagaagtattgtttccgaggaaacctttgagaggtacaagcaactgctcgaagatatatatagcagacttgcaagagaagatgaggaatttaaagaattaagagagtttgtcaaggaaacgaaggaccgactattttcaaaagatattcataagaaggaaaagaagacatatgaactcattctaaaaattaataacgaactagaaaaggttcattacgatcactcacgattattagatcaaacgtttaaattgaaagaaactacgctcataactgcacaagaatctctttactatacaggtattcaatcgtttaattttgagcatgatattgtttctaaaattacttcttctccactaccaattgaagctatgatcggtattctccatccattcttaaaagtggaagagacgaagatgtggtcccctctttctattttagaagagcaaaatattatcgacgatcgtgaagatagacctgacgataacttaatggaattaaaggatgaagaagatacggacaaatttcgaaaaaagatggctgttaaattcaaggagctaatggaactgtttcttactgcatttgagaataatcgggcagagagattaagtagttttatggagtatctaattgagaacaagcaagaagaagttttaaagcaacgatatttctatgatttttggctcatccttcatcaaagatcaccgattaaaatgggggatttcgaagaagaggatggggcgcagacaatattaggagattctctctatcttttgggagagaggaagctgacgatagaagaagagccgggaactattcaaaagacagctcgcttttcgatacaagaaatgattattcgcttggaaggggaaacaaatgaaatattctga

SEQ ID NO: 51809 - DNA, 726 bp, Bacillus cellulosilyticus DSM 2522
atgaaatattctgaagaaaaaatagtagaagcctttaaattatatacggtgcttgcaagggatggctatgcggatgtagtttcactacaaaagtttaaagcagatgatgatattcgaagtctactggaaagctttagcagagaagtggaaagtgtcattattcgaacaagtgagcaaatatatttagtgccgaaaacgaagctgtctcctttccacgtcagtaatgattggataaaaagaaattatcttcggtcaggcgcaacaaatggagatatttatcttttgtatttctcaagcctgatattgtttggtgcattttatgattcgtatcaaagccaggagccaacaagacaatttttacgtcaagacgagtggcttcgactaatacaagctcgcattgaacagttaaaaagcctagatgaggaaacattaaaagggtatgaaaaggagttttcctataattggagtttaattattgagaagtgggatgacatggatgatattaaagaaacagcgaaaaaacaaacagggaaaacaataagcagatttagttttcttgatacagtgaaacgttttttaattgatcaaggtttagtgacggagattggtgatggagaagtaacgttaacggaaaaagcaaagacaatcattcaacggttttttatggaaattgagtataataaaggtatttttgaatttatttatagctttgaaagggcggaatag

SEQ ID NO: 51810 - DNA, 4419 bp, Bacillus cellulosilyticus DSM 2522
atgccagcaattagtaaaatacgtttgacgaatatcgtttacgaagaaggtaataaaaggtataatgatgagctttttcttttcgacggtcataatggtgcgattttacttgaaaatggtggtggaaaaaccgttttgattcaaacagcactccaagcaatcttacctcatagtgatttagcagaccgaaaaataaaaaacacattactgcttgaaaatgcaccagctcacattgcggtggaatggatattaagtgatcgcccaaggcgttatgctgtcacagctgtttctttgtttacaacaaaacatgggttagactctatccgctatgtttatgagtacgaagcaaatgacagaaacggaattgaaggtattccgtttgtaaaagagggaaatagcggaatccggccatccgcaaaaggggaaatgcaagattattatagtttgatgaaagaaaaggaaaagtttaatgcatatacgtttgatacgattaaggaatataaaacttttattgaagaacaacatcatattatctcaagtgaatgggaaagcgtgttaaagattaatagttcagaagggggagtagaagccttctttgatgactgtaaaaacacaagtcagctcttcgatcgacttttaatcccaacggtggaaaactcaattgcaggacatgatgcgaatatatttgctgatatgtttgaaaaacagcattctagtttaagacattacaaaaaactaaaggaaacaattgaagaaaacaaacagattcaatttgagttagaagattatgtaaaagcgtttgagggtcttcataaaagtgagcagtcgtatgtgaaggcaaagcagaatgctaagggagtttggatagaaatctccgaacaattggacagcttaaaaactaagaaagaggatatgagtgagatccacgaggagtggaaaaagaacaatgaatggtattcattaaaagctgagtcatatgaaatacgttcagaagaagagagactttctgaccttgataaggattatacatcagcagctagttcccatagcgaaaaaaaggaacagtatcaccaagcgcttacagattattattcatataaatttgcagaactacagcaagagaagaaagaaaaggaagaattattacaacatattaactctgaaataggtaagcttgatgaaacggaagatcttgtggaaattgaagatgaaatggaacagaaaaatagggctcttttaggtttttttcataagcaaatggaagggctagaaaaagaaaagcaaggtcttatttatgagagaaatcctattataaaccatatccatgataagtctaaggaagaaactcgtctagatacggatgaaagaaagctgcagggagaacggttaaaaatccaagcctattgtgagtcgcgtttgaaagatatgtatgatttagagcagttactgcttgctaatccagcacaagaaaaagtaatggaagaattaccgaagtggacaagtaggtatcattttctcgatgaagaaatcattttgttaaacaaaaaagagaagcaattggagtctgatttaaaggaagcaactgaaaataaacaagaacaacaagaatggttttcagaggtagaatctgagaaaaaacaactagagtataagattgctgaattgaaaaaacaagaagaatcggtgataaaaaaactagctataataagaccacaatggggaactcttgagagtatatatttcaatgaagaatcgattaacaatcgtttttctgatcaaatagaaaagctgaaaaaagatcgagaatcacttttatttaaagaacgattagcttatcgatttgtagacgactatagtaatctagataccttttttgctgatgcttaccttgaagggatgctacattcgtggaaaaatcagcttgattatatcgtgacaggtgtcgagtatttacaaatgttaacaatagaagaaagaaaaatgaaggaaagctaccctttatggtcaatctcgttaataacaacaaagaaatcaaaagataaattaatatcaaaattagacaatataaaggatcgtatacagtacccaattttagttttgacaacggaggaagctgttgagattcaagaaaacgatgattttcaatcatgggttgctccagtccattggaaaacaaattcaaatccttctacatttataaagtggaaagaggaaattggagcaagtgctaaggaaatgacagatgaacgggaagaaaaagagaaagaactgaaacgatgggaacaatgttatgattcatataaaagctttctccagaattatccttatgacatgttaatgacgtgggagggttcgctttctgattataaaacaaaattatcaaaaatatcaggagatattggtaagttagagatctatctcgctgagactaaacggatgatttctagtaatcatgacaagaagaagcaatatcaagaagaaaaacaaggtctacaaatgaaaatggagaaggggactacttacctccagtattcacgagaggttgataaatgtcttgaaaaagaaaaagaaattgttgagagtcttgcagagattactagaaagctgaaacgtgtccgtgaagaattaaagagttttaataacgaaaaagtagaattggacggacgaataagtaggcttgaaataaatgtagagaacctgaaagatgatgacatgtatattactgtacaatcgttaatacctctctacacgaatgaaagtaaaacgattattttgcagaagattcgtgagctggaaaagaaaagagataaaatagcgacaacttatggagaatggatagagagacggaaagctacttcggatgctatcagcaaattggctaaccaaatgaaagtattgaaaaaagaacatgattatatagatgaaggacgttcacttcctactaatagtactccgctactccaaagtttgtgggagaagattgagaagcttaacgcagatagagaaaagtttagtaaaactgtagaagaaactttaacaaaaaaagaaaaccaaaagggaaaggttgactcattacgagataggtttaatgaaacattccctgagaaagaagtttatttgttttcacaaccattaaacgaagtaccaattttgttagagcgcgagaagaaagaactagatgaacggatacaatatattaataaacaaatagagagactggataaggaatttgagaagctgaatcaaacgatgcaagagcttaatagattcagtgtagcccaccattttaatttgccagaagtagaagctcatctcttaaatgaagaagaaaagctagcattttctaatagtaaaatgaggtatgtgcaagaaactactaaaatactgggggatgaaaaagcttctgttgacatggaaagaagaaaagtggaagaggcaaaaagtgaatttgcagatttctgcaatcgagcgattacagatgtgaaaatgcgaaatatggctttaaatgggataaagcataaacagacgtttgaggatattatcgtatttaagaataatatggtttcaagtgtccagcgtgctacaagttacgctaacgagcatattcgtcagaaagatgctgatttacaagcgtatattaaccatattcattcccatctccagacacttactgaggaactgaaacagataccaaagaaaacaaaagtgaaagtagaggatgactggaaacaaatatttaccttctttataccagaatggtctgaagaagaagggaaatccaaaatacgtgattatatagaatggattttagagcagttagagtcagacagatttttaaacgatcaagggcaacaggaccatggcaaggtaagaaaggacattgaaatgtggcttcaatcaaaacagcttttgcaaattgttatgaataatgaggttatgaaagtgaattgccgtaaagtgacgaatgataataaggtttcaactaggtcattttcatgggagcaaagtaatgtttggtcaggtggagaaaaatggagtaaaaacatgactcttttcctcggaatacttaattatgttgcagagaaaaaacaacatatcatgccgaagataaaacgtcataggtctgttattcttgataatccgtttggaaaggcatcgagtgatcatgtcctaagtccagtattttttgtagcagaacaacttggctttcagattattgctttgaccgcacatgccgaaggtaagtttttacaagattatttcccaatcatttatagctgccgtctacgagcatctgtcaacgattctaaaaaaatcatgacgaaagaaaagtggcttcaccatgcatacttccaagatcatgaaccaaaaactatagatcgtcttggggaaatagagcaattgcctctttttgaataa

SEQ ID NO: 51811 - DNA, 1014 bp, Bacillus cellulosilyticus DSM 2522
gtggataaaataaagaaagaattaattgcttttggaaaacgaacaattaatttaaatgaactagaagaagtgattaagccttataaacatacatatgaagacttctcatcgacgatattgcaattagaagaagacaacataatatctatggttaaatcaaaaggccgtaccacaaggaagccctccttagcaaaacaatatcgcatagataaaagtgccctcacggagaattatcataaggaattacaatattatcgtgcccaattagacccctcaattagtatagataaatattatgggaacccatcagactggaaaactgatttgccttatattttaaaagtagatgaataccttaaaaaaaatttttatccaactgataaagtaccggcacctgaacgaagctacgaactggtaggggatgaaaagtggattaccgaaaatagtggaaagagtttactagaaaaaattaacgtatatgacaaattaaatattatacctgtttcagatccaatgatgtttgccataaatcccttgaaattagcagaaagtaaacagttgcatatcattgttgagaacaaaacaacttatcaagcattattaccagtaataactgagacggaattttctactttagtttacgggagtggaaaaaaagttattaaaagtattgagcagtttgagttacagtacccaataaaagcgactcaccaatttttttatttcggtgatattgatagagaaggaataaatatttggtattcactaacgaaacaactagaagtaaaattagcaatcccgttttatctcgaatgtcttaagaaagaggctgcattaggaaaaggctatcaaaaatcaaatggtgaagcagaagataaatttattcgattttttccagaaaatgtacgagagcaaattagtacactcctcaaaaatgggaaatatcatcctcaagaaactttaaatacaaatgaactacagaaagtctggagggaatccttttggagaaattag

SEQ ID NO: 51812 - DNA, 1518 bp, Clostridium lentocellum DSM 5427
atgagtattgaagcaaggagtgtaatggaacagtttggtgagcgtatgaagaggcttgccatttatgaacccttacatcgtttagatagaaagaaaggaaaagatagaagtgggaatgagcttccttattatgagttaggcatgctcaccttattattcttctttgaaaatatgattatgcgtcataagacaagtggcgcacgagaacttgctttatttttatatgaagtatgtcatgaaaaaattaacttagatgaagcaggttttgaggaattagctagagagattatagaggtctataggccatccaatggtaaacgtaatagtaggagcttttataattgggaaacagggcaagaggaaacggtctactattctattttaaaagctgcacgttcagatttgaaatccaacacccaatattatactttagatgagcaaggtttagagcttattttttcaagtagagaatactttagtgaatttcaaatttcaattaatcaattactccttcgtaaacagcttgaaaaaggcgagttcatgggctctcttagacagttagatgagatggatttatccgctgaagcactgacagaacgcttagctaaaattaaacatgaagtgagtcgtagcattgtgtcggaagaaacttatacaagatataagaagctgattgaagatattaatttaaggctaataagagaaaatgaggagtttgaagagcttcatgaatttgtaagattaacgaaggatagcttaaagtataagctagataatgcgaaagataaaaaggcttatgaattcatcttgaaaattgataataggttagaagaggtccatcatgagcatagtaaacttttacaagaaagtattgccctaagaacccatgcattagatgcagcacagcagtcgctttattacattgggatcgatagttttaactttgaacaagaaattgtggatgcacttatgggaaaacccatgccactttgcacaagtagcacctttatagaacctttccttaatctggaacgtgctaaactttggcatccaatgagtatcttttataagcaacgaattgaaagagtaggagaagtagataagggtaaggcctttacctacggagcaacagaggaagaaataagtaaaggcaaatctaagataggtcagtattttaaagaagtgatgagtgagcttatcccattatttgaagaaaaaagcgttgtaactttagaagacatttgtaatcagatagaaggattaagacctgagtggttagagcaaagacttttttatgacatgtggatgattttacatcaaaagtcaccgattgtattggagaatttagatgaagaaagtctattaaatggcatcaaggaagctttaggtggcataaccaacagtattaaggttatggaatatgaaggaaccgtgcagaaagtaccccgttttgaaattaaaaatatgttaattgacattacaatgagacaaaaagaaggtgagagaaatgaactatag

SEQ ID NO: 51813 - DNA, 717 bp, Clostridium lentocellum DSM 5427
atgaactatagaaatgaggaaatcttagaagcttacaaactttatagcaagctagcagtagaaggagccagctccttaggagaaatgagagcttatacaagagaggaacatatagaagaactgatgaatcagtttgcagcccaggattatgcaacgattattattgctggagaacaggtatatttagtacctattgcaagtagctcaccttttcatatgagcaatgaaaccattaagaagctttatctacctaataatgccactaacttagatatttatttaatgtatgtagcaacaatcattttattaggagaattttataacagttatcaaaccaaggagccaacaagagtatttatagggatggaggagtggctagaagctgttaataccagaatggaaacccttgctcaaatagataaagaagtgcttcaaaagattgaagaagaacaagaatacaactggatcaaaatcttagaaaaatggttagcactagatgatgtaaaagaaaaagccaaaaagctaacaggcgtaacagcaagtcgtatcagctttttaaatatgacgaagcagttcttagagaagcaggatatgattaaagacatcgggaattacgagatagaaatcactgagaaaacaaaggtcattattcagcgttattatatggattatgagtataaccgaggaatattagattttatttatcagtatagctag

SEQ ID NO: 51814 - DNA, 4425 bp, Clostridium lentocellum DSM 5427
atggcatcaatttctaaaatcagatatacaaatgtaatttatgaaaatggcggaaaacgctataatgacgaggtattcacttgtgcagggcataatacagccattttgcttgaaaatggtgggggaaaaactgtgtttattcaagcagcccttcaagctattttgcctcacacagacctaggagaacgtaaagcaaaagaaacctttgttctagagggaaatgcagcacatattgctatcgaatggattataagtaataaaccaagacgctatgcactaacagcagtaaccctttatcttcaaaataatgagcttaaatcttataaatatgcttatgaatatggtgtagaagataaggataatattgaaggcctcccttttacaagggaagaagaaggcgtaacaagagcagcaacaagggtagagatgaatgaatactaccagaaaatgagcaaagagcatatagcagctaaaacttttgtgaccactaaagaatttcatcaatatatcgaagcagcttttaaaattatccctgaagaatggcgcagtattacagtcattaatgggggagaggggtctgttgaagctttctttgatggctgtaaaacgacttcagacttagttgagaaattacttttaccaacagtggaagaaggcctagtagggaagggagcccaagagttcgcagggacctttgaaagtcaaagagagcattttaataagcataaacaattagagcgtagcattaaggaaagtgaaaaaatcaaagctgaaatcgaatcttatgtaacaagctttagcatgtataatcaaaaggtcaaagaatatgaagctaaaaaagaagaggcaaaggcactttggctgcttattgaggataaagaagcacagacaagggaaaaacttacagcctgtgacacagagaagaaacaattagagactaagaagagagtgctgcaaaaagagatagcacttattgaagtagaagaggctaaagaagccttagatgaagctagactaagctatgaaaaagaaaatgaagcctatgaaaaagcaaaagaaaaaaaagaagaaaaggaaaaaaggcgtcatgccctcaagctttctagattccaaaacaatatgaatgaagcacgggcgaaaattaaactttatgaggaacagctagctttattaggtgaagatacagaagtagaagcaataaaagaagccttagaagaaaatagaggagaaatcaaaggctattttgaagagcaattagtgatgcttcaaaaagagctaggccactgtgagagagaaaaggaacgctatttagaagagcagcaagaacaagagaaagaaaagaaacagcttggtgaaaagcttcagaagcttagaggtgatgcaagtaagctcattggtaagctagagcatcaagaaaagcaaatgaatcagattaaaatgctaattgtagcacaaggcgctagtgaggatattgaagggcaagagaaaaagtggaagagccgtttagcagaaattgaagaaagtaagcttaaattagcacaaaacttaagggtattagaagagcgccaagtagagcttaaccaaattattggtgaaagcacgaataagcatactaaggtgctaagagaagcaagtagaaccagcatgcagcttcagcagctagaagaagctcatgagaagattcttgtggagattaaaaaagttttaccagccttttatcatttatcttctatttatttaaagtctagtcaagtgataacagctttagaagaacaagtagaaaaacttataagagaaaaagaagaggcactcttacttgaaagacgtcactcacatttcctagaaaactatgagggatgtgatttctttacagttgaaccacttcttgagctttgggtagaaaaatggatgaatcagtttagctttttacaaacaggaacagcttttattgcaagtttagaagataaagagctgaaacaaaagatgtatactcagccgaaatgggcacagctagtagttgtatcagatggcagtgagcgtgagctcatcagcttattagaggaacaaacagcaaagatgacttatccagtaggtgtggttaccttatcagaggctagggcactgttagaacaagaaaagcaggtggaaagtcttatttatccaactgcttggagtgagaatatgcagaccacattttttgaaatgcataagagagaagcgggtaaagctttagaagaagctatggcatatcgcaggcaaaaggaaaatgaattacgagaaatagaccaaactttagaaaaggtcaagagtttccttgaaacctattctcatgaaaagcatgcgagcttaagagaagaaagtgatgggtttaaaagacaagaaatggaacttgtccgaaacatggaagatgctaaagataagttaatgaaggcccagaaggaagcaaagttaacgagtgaaacgttaagaaaagaagtagaagaaaaaaatagattacaaggctatgtggagaaagcaacagagtatttaggcattaaagaggaatgcgataaagaagaggtacgtattaaaatgcttcaagagaccattaaagaagaagaaagtgcgtatagtaaagtggaatatgccttaagaaatacccttgaagctttagaagaagccaaagaaaattatagccttctaagaagtagtgaaagtcgtatagtagatgatccactttataaagaagtaaaagacgaaaaagctatttattctaataaggatattgtctatttaagagataagcaggaacagttaaaagaagccctagacaataagcaaaaaggccatagtgaaattgaaagtctcttaaaacacaatcaaaaggtatatgaagaaaatgaaaagagcttccgtcaggagcaagcagaaagagaaaaacgcttagaaagtattccagtatatagagaagcttatgcacaggaaatggaccgattatctgaagaactcatagaagtaagaaaacaactagaggaattagatgagcaggttaaattaatgaaaacagactttgataaaaaagagcaagagtatcaaagtaaaaaagaagcttatgaagtaagttatggtgtgatcagtgaagaagctacacaatccttgcaagataaagaacgattattaagaacacaagttgagctagcagagaaagaaaaatatttagttaaacaaactgcagggttagaacgtgaacttaagtttattttagataacaagcagcaaatggataaaaaagatgagctttttgggtattgtgccccagaagtaaaggtaggtatcctagatgaagcagtggagcaagagtttatatatgacctaaaggtaagagtaatcgtaagtcatttacttgaaagtttacaacagcttaaaaatggtgttgaagcaggtaaaaaggtagtagaagagaagcaaattgattttaagctattctgccagagagaaattagagatagtaagcttagaaacatggcggtgcaaggcattacacaaaagcaagattatgatgcattagtggtatggaaagaaaatatcgtagaacgtattaaccatacgttaactatattagaaagagatctgatagatcaagatcagcagatttcacaatttattattcacctttatgcttacttaaaaacagtagcaagtgaattaacagagattcctaaaaatacaagagtgaatacagaagaaggttggaaaaacatttatgagtttgtcattccaagctggcaagaagacagtggaaaagaaaagattcgtacccatatttataacttactagatgatattgacggggatagcttcttagatgatacaggaaaagaagacactgggaaaatcaagaaatatattaaagagcaatttaagcttagaagtttattaaaagtagtcatgggtaatgatgctattcgtgtaagatgccgtaaggtaagtaacattggtgatattagtagccaaaaatactcttgggaaacctctaataaatggtcaggaggagaaaaatggagtaaaaacatggcactttacctaggcattctcaactatctagctgagaagaaacaaaatatccaaagtgaagagcaaaaagtaagccgtgctgttattctagataatccatttggtaaggcatctagtgggcatgtcttagaaccagtattttttattgcgaaacaacttggtttccaaattattgcccttacagcccattcagaaggggacttcattagaagatacttcccaattgtttatagctgtaagttaagaagtactttagatcaaagaacttctgttttctctaaggaacaagaaattaaaaaagcatactttatggacaatgatccagtggcactcagtatcttaggaagtaaccaattaagcttatttgtttag

SEQ ID NO: 51815 - DNA, 1527 bp, Paenibacillus curdlanolyticus YK9
gtggaagcaatggatcgaaatgaactagagggtacgcttgcagggtttcaagatcgtatgtccaaaattgcactgttcgatccattattcgaacttcaacgcaaaaagcaaatggatttggacggtcagccgattgcaatgatggaattgggattactgacgctgctgtttttcttcgaacagaagctgatgcgatatgcgaaggtcggggtgaaggatttagcctcttttttaaatcatcttacagcggaaaagtatcgtgtggagctggttgaatgggaagagctgtcgcgtaccatcattcaggtgtttcgtccggcatcaggcaagaagagggagtttgcattttttaactgggaaaatcttgagcaacaaacagtatacacgtccatcttgaaagctaatgcgtttgattcgaagacaaatacgcaatattatgcgcttgatgaggatgggctggagcttgtttttgccaccaaagagttttattcagaattccaactctcgattcatcagcttgtacttcgtaagcaattggagaaaggtgagttccagggggcgctgcgacaaattaatgaaatgcgtgttgacgttgaatcattacaagaccggatgatcaagctagagcatgaaattaagaggaatattgcgtccgaagaaacgatccaccggtattcgatattattagaagatatatatatgagattgcagcgtgagaatgatgagtttgaagagcttaagcagtttgtaaaggaaacgagaatgcggctgcatgcggacatgaatttagagaagcagcagcgtgcctatgaatatattcttaaaattgcaagtgaattagagaaagtgcatggcgaccattcggggttgttgaagcagagtatggatttgaagaatcaagcactccattccgccaaggagtcactctattatacgggaataagcgcttttaattttgatcaggatattgcaagtcttgttatgggttccccgcttccgactgaagccttgaaggcggtaaccgcaccattcatggggcttgaacagaccaaaagttggtcgccgctaacggtatttgcagaacagagtataacaggccagaatgagcaggagcctcgagaggacgcatttctggaagtaaccgaagaggaggatattaacgggttcgctagaaacaggcagtcttttttcaaagtcattatgggattggtagtagagcaattagaacgatatgaatcagtagagctgcaacaattattcaatattctcaaaaataacggtcgttctgaatggctgacctatcgaagtttctatgatttctggttaatactgcatcaacgtagcccggtacgagccgttttttcaaaccaagatagttgggatacaagcttggcggaagtattctcactcttgggcaggcgtgttcttctagtacaggagctaccacaaatcatagccgatgacgcaacacgttaccaaattcagaatatgaagctttcctgggaggaggaacgagatgctctataa

SEQ ID NO: 51816 - DNA, 771 bp, Paenibacillus curdlanolyticus YK9
atgctctataacgatgacaaggtaatgcaagcctttcgaatctatacacaattagcaatgacaggttctgctgagaaagaagtacagaaggcttatatggtagatgaccaagttcggggacttgtcgatcagtttgccgcagaggtggattgtacggttattgctacgggagaacagttgtttcttattccgcttgttcgattatctccttttcatttcagcaatgattatatgaagaagacttatttgcgggctgctgcggtaaacgctgatttatatctgatgtatgtaacgattatggtgtttataggcgccttttatgatagctatcaaagcctggagccgactcggaattttattccactcgatgaatgggcagctatcgtgcaggaacgaatcgactcgctgcgagagcatgacgaagagaagcttaagttgtatgagaaggaattttcatataattggtctgcagtaattgaaaaatgggacacgatggatgacattaaggagactgcgaagcggcaaagcggaaacacgataagtcgactaagttttttggatacggttaaaagatttctggtagagcagcaggtggcggaagaagtaggcagcggcgaaatcgggcttacggagaaaacgaaggttattgttcaacgttattttatggagcttgaatataatcgcggtattcttcaattcttatatgatatggacggatcaaaaaagatgagcgaggaggctcgcgattatgcccgcaatatcaaaaattag

SEQ ID NO: 51817 - DNA, 4431 bp, Paenibacillus curdlanolyticus YK9
atgcccgcaatatcaaaaattagattcacgcatgtcctctatgagggcggcaataaacgatataatgacgagaccttcttcttcgacggccacaatggagcaattgtactggaaaatggcggcgggaaaacggtgtttattcagacggcgcttcaagcgatactgccgcatacagagctcgcgggacggaagctgaaggatacgctgctgcttgagaatggtcctgcgcatatcgctatagaatggattctgaacgataagcctcgtcggagatatgcagtcacttgtattagcctctttctgaacggtaacagtgtggattcctaccgatatgtgaatgaatacggagagcatgacccagatagcattgatcgtattccgtttgtcaaagaaaatatggggagaacgagaccggctgataagggagaaatacaagattattattcgtcgatggcacatcggcaccatcttaaggcccgaacctttgatacgattaaggcgtacaaaggttatttggaggaaaacttccatattattgcctctgagtgggatgctgttgtgaaaatcaatgataccgaaggtggtatcgagaagttttttgatgagtgtaaagcaacgtcgcagctgtttgatagactgttgatcccgacggtcgagcaggcaatggaaggcttcgaggaagatcgcttcgttaatatgtttgaatctcatcgcgaagggttcaaaagatataaggatttgaaagagcaaattgaagacaacaatgggattcagctgcagctaatccagtatgtcaagctgcatgaacaacttcataatgctgaagtgaagtatgatgaggcgcgcaaggaagctcgtacataccgggaacttgtgcaactgcagcatcgcgagctccaagcggaggaagcgagactcattgaaagccagcacaattggaagagccatcacgatgcattgatccggggtgagaagtcgcttgagcttgccgaagaagagcaggagaggatgaatgcagcacttattctggtacagctacgggaggaatctgacggcttacagcaaaggcgaattgacgctgagcgtcattattactctggacagtacgcggaactaagagtgaaggcggagctggcgaagtctaggcgagtcgagttgaggaataacctgaaccgaatggagcagagtgaagatgaacagcagatccatgagcggtgggagcaagcaggcggacaattacgaactgcattcgagcaggatgaaaagcggatttcacataatttgaatgagcagatatcagagctatctacgttgaaggctaatcagcaagagacagagaaacaactgaagagaattgaagctgagattcgacaatgggagatgcaagtagggcagaagcagtcgaagcttgaggagaagcgggaatatcggaataaactagctaaaggtatattggcgaatcccgttctcgagaaggtagaggagcaaatgccgatctggtccgcgcggcagcaacgtgtcgagatggaacgccttgcacttcttgaacgatcgaaaatattggcagcggaacgtggcgatattatagagcagcagaaggcgaacgagattaaatgtcgtcatatagatcgtcagaaaacagtgaacgaacagcaaatgaatcatctcgaggcagaacacttgaatgttcggaatgagcttggaaatctgcggtcggactgggatcgtttgctatcggtatatgagaagcttacttcgattacagaacggcttcatgatgggattgcgaagcggcaggaccagaagaattatttgatgctgcaagaaagatatgcatttcgttatgttgatgattataacgatcaacagctcttttttgcagatccgtctattgaacgtaggctgcaaagctggaaacggcaattttctatgctgcaaactggtgttgaatacctggcaggaatcgagattggtaagcagttggagatagctgatcgattatggtcgattacgctcgtgacaatcgaagcggataaagcggcactcggtttgaaggtagccgaggctgatgacattgtctttccaatccggatcctcagcgtatcggaagcagtatccattatacaaggtaatctgccgcatatggaagatcgttgggttgtacctgggcattggaactataataccgactcggaagccttcgataagtggaagcaatcgctacaagaagaggcgatgtctgttagaacgaaccgggaaaagaaggaagcagaactggaggcgtggtggagaacggagcagagtctgacaagcttcgttgcgacataccctctcattcgatttaatgaaatcgacaaatcaatccgtgagagcagagagcagctcatccgattgtcacaggaaagtgtgaagttggatcatcgtttgaatgaactgatggcattagagggacaatttcggtcagactcggaagtgatgcaggcagaaattcaacaattgggcatctggctaagagatggccagcagtatatgttaattggatcggaaatgcagaagctggaagaagaaattgtgccaatcaaggaacagattgcaggcttgcgctcgcagcaacgcatgaaagatttccaactgaagcgtacactagatgaacgggaaggcattgaagcaacaattacggatttgaagataggccttcaaaacttgaagagcaatgagttatatcaggcggtacaatcctttgcctatgtgaataccaatcatacattaattgaattgaaagaagcatataaggcagtagaccgcgaacgagatggcattgggcgggtacgaagccaactggagcttgaatataatcatgagcaggaacgtgaagtgcaagcacggacagggatgacgacacttttgcgagagcatccgaatctggagcaagaggcgcagttgccggcggacatggataccttcaataaggaatggtgggaacgtgtcgagaaatatcgcgaacaagcaaagaacgcaggcgagaaattttctgatcaacatatgcaattgatgaaaatagaagcgacaattgagagaatgctcaaggaatttggagaacaatttcctgggggacaacgaatacagtttgatgataacctgttcgatgtgaagaataacctgcggctcaaggcggagcagctcgaacaggaacagaaggaattaaagcagcgcagcaaatacatcgaacgtcataatcgagaattggatagcgtactgcagctgtggaatcaatatattttgctgcatcgtctggaagatattcgactagctccagcgccgattgaagagcagcatcggagagaattcgattacgcccggatggattacacagagcgttcgatccatttgctcgaatcgtgcaagcaagctgtcgataaggaacagatgaacgtacgcaaaggaattcaaagcatgaaagcttattgtcttgagcatgtaaaggatattaagctgcggcagatggtcattcaaggtatcgagtttaaagagacttataccgatattatggagtttcagcaggtgatggaaacgagaattcagaaggcgattcatattatgacggagacgattcagactcatgatcgtgaattgcaagagtttattcatcgtattcatacccatttgaagcagatagcgaatgaactgcgggagctgcccaagaaaactcgtattcgcacagccgatggatggcgtgaaatttatagcttctttataccagagtgggataatcatgagggcaaggagcgaatacgagagcatattgagtggattctaattcaattagagaaggagcagtaccaagatgagccgggtaaggacatccaacagaatgttcgtaaaagcttggaacaatggctagattcgaagcaattgataaaggctgtaatgaaaggtgaagcaatgaaggtgtcatgccgcaaggttatgaacgattatcaagtaacgaaggcggcttattcctgggaacagtcgaatcgttggtccggcggagagaagtggagcaagaacatgacgctatttcttggcctgctcaattatgtcgctgagaaaaggcagtttatccgggcaaatatgaagctgcacagaagcgttattctggataacccattcgggaaagcatcaagcgatcatgtattaagcccggtattttttattgcggaacaacttggtttccaaatgatcgctttgacagcgcatgctgaaggaaagtttctgcaagattattttccgattgtgtatagctgccgtttacggtacacaacggattcctccaagcaagttgttgaatcaaccaagcaaattcggcatgcgtatttcaaggataatgcaccacagacacttgagcgcatcgatgggagagccgggcagatgactttatttgatttttag

SEQ ID NO: 51818 - DNA, 1053 bp, Paenibacillus curdlanolyticus YK9
atggagacaaagagaataattgagcattttcttcaagctttaaaaaaaactactatcacgcttgaagaattggaagctctctttagcggtgtccgcattgactggaatgaattttccactgtgctgctatgccttgaagaagataagacgttggaagcagtgaagtcagcaggccggacaaccaggtcgccaaagttagcgtaccgctatcgggtgaataagcatttgattagcagtgcgagtcggaacttgttgaatatggatcagcttgcctatcattcttctgttaaattggactattaccattctgtttcagttcaggaatacgagcaagataaacaatggattgcacgaatcgaccaatacataaagcataatggatttcctgaagaagctgcgccagctcccgaacgaagctttcaattagttagtaatgaaaaatggataacggattttggcggcgagactcttctgaaacggattggtttgtgggagcaaatgcgaatttatccggtatctgatcccttaatgttagcggttaatccggggctattcgacgatcccattaggaacgagtgtacgcatctcattgttgagaataagactacttttcaagcgctgcttccggttcttcgcgatacggctttccacacgctcatttacggctgtggtaacaagattacgggtaatatcgatatgtttccattgcagtaccctgtgaatcattgtgaacatcaattcttttattttggagatttggattacgaagggattcgaatctggtatgagacgaataagcaaagaccaatcaggccggcaactattttctatgaagccttgcttgaaatgccctttgttatcggaaaagataaccaaaggagaaatgatgcgtccgttcaagcttttttaacacattttacacagacgcagtgtgagaagattgaacgatgcctgactttcggaggctattatccgcaggaaacattaacaacatcgcaattgcagctgctatggaggagagaacagtggaagcaatggatcgaaatgaactag

SEQ ID NO: 51819 - DNA, 1020 bp, Bacillus cereus 03BB108
atgcatactttgatagaagatgaaaaaaagaagataaaaaaattacaaaacactattatcaaagatgctcttggtgtttctcaacgttctgaacttgaagtcatgataaaaagaattgatgaaaccttaaaggcagaaagagaacaatttaatgatttgaaaaacttagtagaagaaaaaattgatgaattctatgaaggtagcttaacagaaaaagaacaagaaggaatccatataatccaagaaattgaagggaaattagttcaagcaattagtgtgcatgaatccttatttactgaaaaacaaaaaacacaaaatattatgagtgaatcacttgaatcttccattattcacgcgttttcagttcatttagattttgaacaagaaatactaagggaactagtagaaacccctgctacagaagaagtattaaatgctatttctaaaccatttctacctttgaggcatcataaatcgtttaatccgctacttgcattagttcctcaaaagagatacaagaaaaaacaactaaaagaagaagaaattgttgaagtagatgaagaaaaaatgaggttgcaagaggaagaagaagctaggaaaaaggaagaaatcgaaaacaaagaatatcgatatataactgccttattgaaacacttggttgagaaggacaagtatctattaagtgatattttccaaatgattgaaactcaagatgaacgtctttatgaggatattctctacaatccagatccactgctaggattaattgcagaactacatcagtccgaatacaatcgttttgaaaaagtgacttcagatgtgtggaagaacctcccggatgataaaaagattaatagaatgttaataagactatcaagtgaatttgtaacattacaagagatagaatcctttagtttattagaaacaggtaggtctcactatatcggaactatgaaatacaaggatatgttaattacaaggggtgacttttatggagtggacagaagaaatcgtaagtaa

SEQ ID NO: 51820 - DNA, 753 bp, Bacillus cereus 03BB108
atggagtggacagaagaaatcgtaagtaaagggtttaccttgtatgtggcccttagtaaaaaagggtttattacaagcaaagaagatgaatattttcaatggtatgaggaaagggctgtgcaagattttattcggaaagtaattgaacctagagggaaagtcatgatttttctggatgaacaagatggcgttattcaaatggtgccggaggtcgagaatgaaacgatgtcttatacgaatgatgatttaaagaaagaattaggctttaaggacaataaggaaattcatctattctactttattttgttcatcttaatagcagagttagaacaaccatatgatacagagtctgctgatcggatgtatctcccgatggaagaactattggataaaatgaatggatacatcgggcaatatgaacgactgggcgaagagaaattagaagaattaagtgatgaatatgatgtggacgtggccgggattgtagaagcttggggaagaatggctgattttaaagaaggtgctacaagccatattcgaacaaaagataatcgacggatgtatatcgaaaaaacattgaaatttttagaaaaagaaaagcttatcagaataagagaacagactaatgtttctgttaccaataaaatgaaaaatattattagtcattattatcacaatgtcgagaacaagagcaaaattcatgatctattgctggtaacaaaagaaggaaccgtgggagaagaggaggaatga

SEQ ID NO: 51821 - DNA, 4374 bp, Bacillus cereus 03BB108
atgccacgattaatgaaagtgagaatgaccaatatccaattagatgaagggaagaagatcatctcaaacagcttgtgggaaccaaatgccaaagatgccttatttatcttagaaaacggcggaggaaaaacgagttttatccaactagttactcaaaccgtgcgtcctaattccaatttaagtaaacgtttattaaaagaagtggtgtataaaggtacaactggtcatattatgacggaatggaaactagatggagaaaaccttccgtatgaatacttatgtttagggtttacttatatgaatggggaaacaaaaacagaagaattaaattacttcacatatctgtttacttataacagaggggacacattaaatatcaatacccttcctaccacagtagatgggaaagtaacaagactaaatgaataccgcaagtttttaagacaaaatgatattcgtatatttgatgtcaatcgtgattataaaaaggaattaaaacgattccaccttattgaagatgaatggaagatgatacaaaagattaatggagatgaaggtggagtagataattacttcaaaactgcatccagcacgtatgacttattagtgaaacttcttatcccagaagttgaaaacactatatttgacagcgaagagaagaaaaaggaaatccaaacgtactttaaagaatacagtaagaatttattaagtattccggatatgaaaagagacttggatgatttccaaagaataaaaaatggtgctgaagacatggtaaaagcggtagaagactttcaagtaaaaaagaaatcctttgcggaagcgcaaaagcatgtagttactttaaagaaaagtattgaacttcaaattgcggataagaaagaaaagacccatatcttaattggagatattgaaaaaaatcaagcattgatgcatgaagcggattggaagattgatagctataaggctcatattttaaaaggacagatcgaagcaaaagaaatagagctagctgctgttgaaaatgaacttaaaatgaaaacagaacaactaaaacaagcaaaagcattactaaaacaactagaagcaaaaaaagaatatggagattatctagatattcataaaaaagtactgcagctaaatgaagatatatcttctttaacagcaagtgagccagaattagaaaagagaagaaatgaatctaaaactctcttaacagaggcgttaaattttctcatagaagaacaacaatttgctttggaggatattaacaccaacatcaaatttacagtagaagaaattaatcttaaaggtgcagaacgaaaacgattagagaaggggaaactagatttatatggcgagtacaaggatgcaaaaaatgatttaagtaactaccaaaaaggtaaacaaaaactgatagatgaattaggtgaagaagctggatattacccatctatcaagttcaaatcactaagtgaacaacaaaaacaatcttcagtgactattactcaaaaagaagagaaaagtcaattaaacgaacaggaaatagatgaaaagcgcgagtttgtaacaagtcaaagaattgttatgcaaaacaaaaataatgaaattacttcgttaaaggacgaacataccacatttgaaaaggagaaacataacttactttcacttctttcagacgatgggaaaaatacgataaacatatttgaagatatgcaggagttacttcggtattatcagtatcaaaaagtggaaacggaacgaaaaatagatgaacttaaacagtatattcatgatttaactcagaaacttaatctttgggaatcatacgattactttgttcctgacgaaactttattaaaggttcaacaacatctagaacaaaaaggtgttattactatgttaggtagtgaatggttatcggaactttctagtgaagaaatgaaaaatcagtaccttaattcctatccattgcttccttatacgttattggttgaagaagcaaatttaacggaagtcaaaaaatccttgaatagcttgaataaagaactgttaaacgtaccgttactgttttatgtaaagagtaaacttcaaattcaaacaaaatcagtagatgcaaaaatagatgagcttttccctctatatgatgagttatatctctatcatcagttagatgttcagtggtttgcatctagagctaaaatccaagaaattattgatggattaaaaatggagctttctcaatataaagaacaattaacttttgcaaaaacaactctcaataattacaatgaaatattaactgcattagaagcattccatactagttattctagtacattctcggaatccaacatgcaagctgtccagaaattatcggaagatataaaagagattcatcaacaaataaatgatatcaatgaatatattaagatgttagaaaatgagaacaaattaattagcgaatttatctcagatgaaaaagtaaaaatagccaaaagagattctcatagaacgcttcttcaaagctttatggacctttacccaaatcctgaagagttagttgaaaaagtaaaatatttaaaagaccaacatgaccaatacgggacaaaagttaatctgtgtgaagaggaagtaatagagctacgtgaaacattagatagacagaaagataagaaacgaaacattcaatctgttatggatggattagataaagaaagaaaacaatatcaattggacgagaaacttgaaccttctgatagttacaccagtgaagaaaagaatgagtacgtagcttgttttactgcagttcaaaaagagtacgctgacaaagatcaagcgaaaaattttcttgaagaaagtctttcagataaaaaaactgaacttttaaaatctgaaaaacgaatcaataatatcggatttgctctagaagaagttaaaatgttctactctgaagaaattaatctagaagagttaattacaaaacaaaaagagacagtcaaaacactttctatttccgcaaaggatatagaggttgaaaaaggaaaagtagaagaaaatttaaaagggaaaaccgaacaattagtattagttaagaaggagattgatgacgagtacggaaaagaagtattcctttatgaatggcagcatgaagaggaatttaactgtttcaagcaggcaaaggaacaattaggtgaagctaataacgaacttgtaactaagaaggaatcgttaggaaattctataacagatgctgaaaaagcaatggtacatttgcaaattaaaaacctccccctatacaatgaaagattcggtttaatacttgaagaagaaattatttcaaagtcaaaaacatatcaaaaatatgcacaaactcatgctaatgagcacttaacaaagttgcaaaagttagaggagagcaaaaaaggtgtatacctatcatttgaaacgtatttaaagaagattcaagaatctaataatcctaagactgaacaatttgcgaatggtttgtcaaaattgaaaacaagtgatcaaatatttgagttagagtttattttagaatcgtttaatcgcatctttgacaccattaatgcctttgaagaagatttaaaacgaaagataacagaatgtgaaaaggataaggtaaaactggtagacttatgttttcagcgagtagaggctatttataagaacgtaactgaaatcccgaaattctccaaagtgaaagtatttggttatgaattgcaattgattaaaatgagatgggaccgttttgatgatgaaaccactcatagtaatttacattaccatgtccaaaccattctggaaactttacaactaatgaagcgagataacaaattagaaaatgaattgaatgaatacctagtacaaaaacttgatacagtggtattattagataaaattgcacctatcaagaagtgttttgttagtatatataaaccacgaaaaaagtcacttatgacgaccagtccagaaaactggaagccttgggatgaagtttctaaatggtctggtggagaggaattcagttcctatatgtccatgtttatgatacttgtaacgtatttgcgtaaaaaagttaacgctagagacgattcttggaaagtgattattgcggataatccttttggtaaagcttcatcagaacacgtagtaaaaccaataatggaactagctagaaatagtaaaatacaactgttttgtctaacagctcataacaatgaagacattcgttctcattttgaatgtgtcatgagtaatcgttattacaatacagtaggtattgaactacttcaagtggaacatagggaaaaaggagtttcccttggaatgtttgcttatgagcatgattaa

SEQ ID NO: 51822 - DNA, 1077 bp, Bacillus cereus 03BB108
atgagcaaatgggaaatattcatcatagaatatatgaataaatatgggaaaaaaattgtgaaaacagtggatattgaacatcatcttaaaatattactgaaacaagaatatgatgacgatggtggatattttagattttcttctacgttgaagaatatggtagaagaggagaaaattcaaccagtaaaagcaagaggacataatcatcagaccccatctgtatttaatgaatatagattagtaaaacaagaaagaagaatgaaccccactcatattaaaaagttaatgaccgattatccattgttcaatatgactgctttttatgatgaagcagaatttgaaaaatggaagttttatatagatcgagttcatgtttttcttacacacaacagtgacaccaaaaagaatatgttaaaagcaaatgaacgttcctttgaactatttagaaatgaaaagtttcttttagataaagaaggaataaagtttttagctaatttaggactcgctctatcggatttaaactgtcgaagaacttatgaaccttttgtagagtaccaatcagatccctcaaaaaagccaaaaaacattttaattattgaaaatagagataccttcgattcagtaaaagagttaatgatgggtggcgttgatacatggagcggaattacctttgatatggtgatatacggagaaggggataaaatacaacgaagcttctatttcttagaggaatacaagctagaagattatgaagtctattactttggggatttagatgcaagagggattcatatttgttccgaattaatcaaaatagatagcagagtaaaaccatttactcctttttatatagcacttttaaatcgttatggtcatgagcctttaacgagaaccatcgaaagaaaattgaaacaagctattattgacaattcattaaaagtattttcagctttttttgaaggtgattatattgatgaactcaaaaaatatactaaaattaatcagaatgttcaaacgtatatcccgcaggaaggattgaatttagcaattcttcgtaaattaggggaaaggaggtag

SEQ ID NO: 51823 - DNA, 1548 bp, Eubacterium cellulosolvens 6
atgcttcgttctgatattaaagagatgcttgcggactttcagaacagaatgaagtttatcgatattgtgaggagtatcacggttaccagctacccggacgagattaagaagatgttcgggggcgattacgatatcataaacaacctggtggtcgcggttcttctgtatatcaaagaacgcacactcagcgatatgcagtcctgtacactgaaagatatcgccggttttcttgacaatcttctcccggtcatacccgaagaatacgaagttgatacgtataagctcgccggattcattgttgtaaatattctgcagaacaacggtaagctcatcgagtacaatactttttttgctgacaaagaggaattcaaaaagatgccggttcgtctggtgaatgaggagaagggctcctatcacctgacagatgacgtttttgatttcctgtaccggtcgaaggagatcgagtcggaactggactactccgtcacgcgctttaagatgcaggaatacatgaagagaaagaattactccgaggccttgtcccagagcagggaacttgtggcgcgacttaggaacatgagccacagcatggacgactttattcttcgctgccgggagaatatcgcgaagatcacggtggatgagtatgagcgcatcgtcgggcagttccggaatctgatgtacgatgagcagaaggaactggcggagattcagcagaacgcccgcagagaggcggagaccatacggaaagcactggatcagggagcggacacggaagaggcgagaaaaaatctgaagtccctggaggagatcaacaggaacctggatatcacgattctggagcagcgggcgctcatcaacgcgaagagctcagtatcggagagttacaaacagatgcttcgggacagctttgtgatcaaaagttttgaacgcatgaatttcgaacaggatatcatggcgaaactgcgaagaatgggagacggtctcggagatgccgtccgcgtcttcatggaacctctgatccggccggagcttgagaagaagttcagcattgagaatttctatgcggcctgcggaaccatcagcgaggaggaagaggacagcggattcaggatcgaggacgaggacagcagggcagaggaactggacagagagcgaaatcagagatacatggaaatttgcacagcttttttttcctatcttcagagggaggattcctttgagatcaagaaatttatccgctcgctctccatggatgaactcatgcggtggaacagggaaaacgccctgcccaatacactcatgaccatttatcagaaaaaggtgatcgacgtggaagcccttcataaagaagggaatcttctggcgaaggaacccctgggagagtttgatctcctctgggttcttgggaacctgccccggaattatctggacatgaagaagattctgttttttacctccgaccggaaatgtgagtttacggtagaggacggggaggtgtccatgacaatcgaaatgacgaattttacagttgaggtggaacgatga

SEQ ID NO: 51824 - DNA, 708 bp, Eubacterium cellulosolvens 6
atgaatacaaatgctctcaggctataccatgagcttatgaaaaaaggatggatcgaccgggacgaaaacagtgtgctgtggagtttcgtggaagatccggaggcaagggacgccttggatcagatgggcgcggaacttggttttgaaattgtgcctgcccagaacaggatctacatggttcccacacaggacaatgatctttttctgaaaaacaacgtggactacagggctgatataaaagccgccaatgatgtgcgagtgagggatttatacctgctgaactatctggcgatttatgtgctgttcacctttttcaaaggagagggggcggatgccctggtcagagagttcatcacaaaggaagaattgctgaaggaattcacgaagcactgtctgaacgcaacgcagaaaggcgtggacggtgaggaaaaggcggaggatttcagcgaaaacttttttatgctggcggaagactggctgggtaaaaaggaaggcgatccttccagcagaagagtggaagacagatacggcgtcataaacaagatcctcttaaagttccgggcagatgatctgttcctggaaggggatgacggcagaatcgtgcccacgaagaaaacaaaggatctgatgccctatgttctccgaaaagagcgggttcaggtgatcaatgcatggatagagggggatgaaaatgccgcagatcaataa

SEQ ID NO: 51825 - DNA, 4380 bp, Eubacterium cellulosolvens 6
atgccgcagatcaataagatcagaatcgttaatttcagttacaatgacggaaaccgttttatacccgatgaactctatgatctctcatcgggtggcggcgaggcgctgaattctctgttcaatctgaacaacggaggaggaaagacggtgcttgtacagctgatgatgcaacccgtgcatccaagagccatggcgggaggccggcggatcgaggactatttcggccgtccgggcgaccactccttcgttcttctggagtggaatctggatggaagcgacaataaacttctcaccggaattgccatcgccggcagcaccgccgcaggcggcgatgaaaaacagagaggaaattccatccgttattataccttcaagaccatctatgataattccgcttccccttacagcattgctgctatggagctgtccgcaaacgagaagggaaagtatgtgccggcttcttttgagtatgtcagagaaaaagcaaaaaacagcagaggcatgctggaatactattcctctgacgacagcgtgaaatgggcgaaggagctggctgcttacgggatcttccgctcggagtgggagacggtcatcgaggctctcaacaaggatgagggaggactgaaccagtatttcgacgaggcaaaaacctcggataagctcatctcgaaatttttcatccctgccatcgagaacaaaatgaagagcgcggaggcgaagggcacagattcttctctggagaccatgctgatcaactacgcgaagaagatctccgagaaggaaaacgtgatcagggaaagagataccaacaggaaacttcttggatctctttccgagctggaagagcaaagtagagaactgtataagtccggagaggagctggcagacggaatcgggaaagtctgcgccttcaaggctgctgtgggcagaaaaaccgatgagctgggcgagaacatcttgaacaaaacccgcgaggttcagctgttggaagagcagattcgacacatcgaacacgaggagaggtcaaaagaattttatcttgccggtgaggagtttgacgcctcgcatctggctttctccaaggcagggcaggcactggagcgggcaagggaagaggagtctgcgaaaaagcacgaggaagatgtacttcaatcagcaagacttcacagtcagattctctgcgaagacagcgatatttcttcctataaaacgctcatagaagaaaaagagaacaactctgaggatgcggaggcggtggcaaagctgaagtactctgtgtatgtaaaagccggccgggaaaaggatgagctgacacagaagctcggagaaatggatcagcagatcattcagcaaaaagaaaaactgcaggccggcatcgtggaactggaaaagagtgagaaagaaaaggatgaggtcagagagaactatgatcgcatccgtgcgaagctggaggtttccaaagagaatacagatgccagggccgaggctctggggctggctgccatgcgaatgcttgacggtttttattccggcagcgagatagaagaagagagaaagcaaaaagaagaagagcgggaaaaggtcactgcctctgccgcaaagatctgtgaggagcgaagtactctggaagagcggaagaacgcgattccggaggaactggcggatgtaaagctctctctcggaaaactggagacagtagagaagcaggcggaggctgagctctctctgtacggggagagactggaagaactggttcagatctgcgacaaatacagcctggaagctgaggctgttttttccggccggttaggtcgcgtccttcaggaagaaacggaaactactgcggctgctgtccgcaaacagcagcaggacagacagtctctggaagacaggttgaaggcggcgggagaaggccatgtacacgttctttcggacattatgaaatatgtgatttctacggggctttcttatcagaccggagaggaatacctgacagccctgctggaaaatggagccctcaccggtgagaaggtggaagaaatcctgactgctcatccggagtttgctttttctcttctctttaacaatgaaaaagatctggcaaaactcctttccgcaggaaacgtggactggctgccggcagcagtgcccctatttaccatggagcaggtaaatgaactcatggaaggaaggggagacaccggatctcatctcgcagcctatgacaaaacatatttttctgaccgggccggctactgcgacagactggaggcagagatccgggagaagaacgagcggctgaagcgtcttcaagagaagctctctgtctgcgaggctgagaaaaagcaggcggatgatttttcatatccggaggactggaaagctctgcaggagaaaaaaattcaggagctgcaggagaaggaaggtcagctggaagagaaacgtaagtcactggaagaggaactggaaagaataaaagagcagatgattgctctggagaaggagctggagtcctacaggcagactctgcagaaactcgagaaatggctggaatctttcgaagaactcgagaatatgttgtccagagagaaggagtggtatgacagatctcaggaagcatacggggttctgaaaaaagcagagagcaattatctggcaaagcaggaagaacataaaaaagcagttgaggcgctctccgaactggaaaatcagcgccgtcaacaggcggagtatctggcgtacgttgaaactgttctggaaaatgtggatacggcgaaggaaacagagattcaggagggtaccctggaagaactctattccggctaccgcacgctctccggaaacttaagtgaaagtctggaacagctgaggcaaaagctggccggcgcacagaagaacaaggcaggattggagaaggaactggcggattatggctgtgagagaacggaatatgaggcagtccgtttttcaccggaggctctgaagatcgtccgggacgcattccgggaagcatcggagaagcgggaaaaggcgcaggccgtgtatgtcgactgcaatgccagagaggctgcggcaaggcagcggcacgaagctgcagaaagatctctggaggagtttgagggagaagcacttccgcagaacgaaatcggagcggatttcaaaaaacgtatcagggctgctagacaggagatccggaaactggaggaaatcagaaatacactgggcgaagagaaaagggctctggagagaatctatgacagcgtgggaatcgtcctgaagtcgtacctgagcgtagaaagaaccgcgacggtggaactctccggaaaaccgggggcacagtggcaggaactccacgatcacctgcttcagaaggacgccgcctttaaaaaactgaaagaaaagatgctgagcggcattcgtgaaattgtgggtgaataccggaatatcgccctctttgaaatcgtcaataagctgggagcgatcagcgagatgctggaggattccggcatccgcggggatcgcctgtacacggtcagtgagagcatcagtgccatggtggcttccatagagaagatcaacagcaagatcgagacggatctgaaggaaatagagaacgatttcaacgacatagtggatcagtgcatgaatcagggcaagagaatgtatctggatctgcgtatgatcgctgcaagctccagggcacatatttttgaaggtaaaccgcagacacagatggtaaaaatgaaccttccggaggaaaaagagatctccgaggaggcttctcgaatatccatcaggacagagatcgaacaaggcgccaatgagatccgggaacttttgcggaacgaagcggaggaaaaacagatccggaagcgggcaagagccatcgtttccagcgaacgcctgcttcataaatatatccgccaggagtcgatccagatcaaagtgttcaagatcgatatgaacagcgccaattccgtgtataagcggtgggaggatactctgacgcagagctccggcgccgagaaattcgtggtcttcttctccgtcgtgctgactcttatgaattacacaaggtcgtcggcaggacttgtgagcaggaatacccgcagtgtgctgatcctggacaatccatttgggaagatcacttcggcgcacctgctgaaacccatgtttgatattgcgaagcatttccacgtacagctcatctgtctgtcggacatcaacaagagcgatgtcgtgggctgctttgactgcgtcatcaaactggtgatcaaggcgcagagcctctcgaatttcgaggttatgacccatgagggaaatgagagaatcgagcatggatactacaagattatgaacgggcagatgagcctgttttga

SEQ ID NO: 51826 - DNA, 1050 bp, Eubacterium cellulosolvens 6
ttgaacgtaagggaacggcttgtcgcctacggcagaaaaaccataacgttggaggcttttaaagcgatgatgaacatcggcgctatggatgagaaaacagcatatgagagaatctccgggctgctggaggaagctgcgctggaaccggtgaagtcttccgggacaaacggaaatgtgagttatcctctctataagaaatacaggatccttttgaaaatcgatgcggacggagtgcttatggaagaaatcaaccgtctgcatccactgcttctacggagtggttacctgtcggctgagcctgcggtttttcaaacatatacatcagagatccgaagtctcagcacttacctgttccgggaaaaggaggagatctatatatccagaaaagagcgttcctacgaaatcttcggaagggaaaaggtgctggatgacagcggaataaaggctcttttgcggaagctccggatcatggagacggatctgaaattctacgatacaccggagtattgtttccatgattacatcccggtgaggaaggagaagatgacgctcctgatctgtgagaacaaggatatctggttcaatatccgcagatgtatgtttgaggaggggacaggaaaactcttcgacacggctcttgatggcgtggtctacggggagggaaataagatctccaacaaaaaaggcgctctggaagagtatgtgaagttcatggggaacccggaggtgaccctcctgtactggggcgacattgacagggagggcttcgatattttccggaggacgagggaggcaaatcacggtctgaagatagagctttttgttgccggatacagaacgatgatggaacgggcaaggaaccgtgagatcgaggacagcccttcctccaggaaacagggagagagttttgaagatctcatccatgctttttctccggaggaacaaatctttctgcgggacatttttgaccgaaacaagctgatcccgcaggagatcataacgtataaagatttgagaaatgattggaggaaagaaaatgcttcgttctga

SEQ ID NO: 51827 - DNA, 1359 bp, Variovorax paradoxus EPS
atgtttcagttggaacgatccaaggcacttgtgctggaggccgacggctctagcccgttcgatggcgttgacacccattatttggcgctgtcggcactggatcacatgatggaggccacaacgatctccatgggcagtatgtcgtccgaggtgctgcagcatgtcgctgacacggccgcccgtatgcgtcctagcttgactttgacccaggcgcagagggtggccactgccgtcctcgacgccctggacaacaaagccaacaaacaccgggaattcgaggccgaatactttgacgccccttccggaagcgtgcggatgttccggttccggctggtgcagttccagccggatccccaggatgtctaccggtacacccccaccgccgagggataccttgtgtacctgggcatgctggacctgtcgccggaggactcccaggagctgatggagaagatgttggacctgctagtccggcgcggtcggttcgaggcggcgctggacattgcccggcgcgcccggaagctctccattgaattccgccagctgattagcgacaagctgcatcaggcataccgggccccgtcgtcggtgaactggagcaaggagatgcagggccggctggctgaggcccgcaaacacgtcagcgaccgtcaggcggaggatttccgaatggagcaggcagtcggcgacgcgcttcacgaagctacagaactacatactcgggaaaacttggtgctgctgcgagaaactctgcgcggcgccggcgacatccggatgaagctggtacgggacatctccgcctccaacgagctgtttattgcagcccagaaggctgccttccgggcgcgccggcccatggggttgccagacctcgaaagcgttatcttccctaacgtcatgcagctgcactcgccggtgctgctggccgaggccgacaacttcctctgtgccctgtatccgccccagccgctgaagatgttcgacctgaacaccgccttcacgatcctgcgggagacccgtaccaacgatacgccctcagcggagaacgagggtgagctggagcagttcaaccccgttcccgacccctttcccaaagccctcgtggacgaggctcgcaactggctcgcggccaagttcgaaacggacgccacctggcaggcggatttcctgctcgagctcgcgcgcgaagacggcctttctgcggcgtcccagcgctgcctagtcttcatcctctaccagtcctttgcccagagtgagagcacctttgagggtatggcgtcacgcaagagcggcgaggagttcatcctggactttgtacgcggcgacaacctcgaattcttcaagaaagacggccagtga

SEQ ID NO: 51828 - DNA, 4392 bp, Variovorax paradoxus EPS
atgcagcgaattagtcgcttttatttggggcactgtggctaccgcacggcttggtttgatggggagatcctgccgctgaccgacccgatcaccgacgcccccaccgacgccatcctccatttggagaacggcggcggcaaaacgaccttaatgagcttgatcttttcttgcttcgagaccgagcagaacaagttcttgaagcaccttcaagaggcgaacaaccgcttctcgcagtactttgaccagaccggcatcccaggcttcattgccgtggaatgggtgctgccgtcccgcacggccaaaggaaaaccgatccgcctcgttgtggggcaggcagtgtccgtgcgtgccaccgtggagccggcggatgtcgataggatcttcttttcgttccaggaacaggctgacctgcggctggaaaaccttccggcgccgcggctcggcccgacgcctgccgctagtctcgccgaagtgtcccggtggctgcaggagcagaaggcagccaaccccgacgtcttcttcgtcaagaaccaagcggagtggaagaggcacctgcaggtcgaccggctgatcgacctggaaatgctgcagatgcaagtggggttttcggcgcaggagggaggcttcgacgccttcatccgcatgaagaatgagtccgagttcattcaccggttcttctccctcacgctggacaccacccgcgccgatgaggcgcgcaagctcgtggtcgaggtctgcgaaaagcacagtcgcaagcccgagtaccaggcccgtcatagccaactgactctcttcaggagccagatgtccacgttcgcggacgcatcccgcgcctatttggactcggtagcgcagcaggggcagatccagcttcagggcgccctgactagcctcgcattgcagaagcgccaggtcacatccgcagaagcagagaaggaacatcgccgggaggagcagctgcagttgcagattcgccaacttgccgacgccgagggcggccggctggcgcgggagtacacgacggcattgcacgtgctgcaccagaaaaaacaagcgatggccaagttcgagcgcgaagccgcggacaagcaggtgaacgacctgcaggacaaggagcggttcgtgcgcgccgctgttctccagaaggacatccttgcctgcgagcagcggatcaaggacctcgaggccgtggcagaggcccaggcggaaggcctgaagccaatcaaggatcatgctgaagtgcagggctccttgttgcgcgcggccctgttcctggaagaaacccggctgacccggctgctgcaggacctgaccaccaagcagaagatcaggcacgaccttcgcggaacgctcggtgaggctcgcgacgatgccgaccggaaagagcgagccctggcgcaggagcagtcgaacctgaatggcgccgaggcccgtcgagcccagcgcctggacgcttttgtagcggagggcctcatcgagtccgtggagagggatgcgagcgctgcggcggtcaattggcagcatgcggttgtgcagcaccaacgcgaccgcgagagccaccacgccacgcgccggcaacagcgggagaccgccaaacagttgcgccgcgaatccagggccgagacggagcgggcggtgcagctggagcaggacgtacgccggctgcaggagctcatcgcgcaaggagagcacgcgcgggaggctctgtcgcagcatcccgcgttgacggaagcagcggaggcagacctcgccgatccgttctcgccaatccttcaccagcggctggccacgctagtggcctcctacagtcgccagatcgcgacgatcgacgtccgatatgcagagctgaacctcaccaagagcgcgatcgagagcacgggcgttgccggcgccggtgccgaggtggcccacgtggtgcgcgtgctgcgggacgctggggtccggtctgctcgtccgttcaacgagtacctggccgaaacaatcaaggatgcggagcggtccagagcattggtccagagcgacccggggcgctttctgggcgtgtgcgtcgcccggactgaattcgagaaggccgccggcgtggcatggaccggccggctgccccgcaagcccgtcacggtgtccgtggccagcctggatccagcagcgcctcaagccgaccgctgcgtggttgtcgccgaggacgattcggccttcaacaccgcggctgccgcacaactcgccccgaagctcgccgcggccatggacgcggacagccaagaacgcaaggcattggaaaagcggtatgagcgctgcgtaaaggcacagcaggagctcgagtccttcttggccacctatggggaagggcgcctggcggaagctcatgctaaggagcaagtcaccgccgaggactcgcaggcaacccgagcgcgcgccgcgagcctggacgaagacgctgtccggcaggaggcggccgctgaagaaagcgaagaaaaggcgagacagagcgaggaacagcgcgccgcggctgcggaagccatgcgccgagtggaagaattcattcgggaccacgatgccggtcgagcccaacgcctgcatcgcctcggtgaattgccggccctgatcgctgccgcagaggaagaccgcgcggctgcggtcgttgaactggaagaactgatggtcgaggaatcgacggacgcgacggtgcgggccgaagaaacggttaagcgcgatggcatggccacggagcgcggccagatcgagtactacgacaagaactacgacgcggcgaagcacctgaaggagcatccgcgcgccctggacatcctgcgcggccagtacaaggacgccgcatcgatctatcgcactaaggaggaggatgtactgggcaagctccacgaaaagcttcaaagtgagcgggacaagaagaccgagaaggccaaccaattcgccaagacctgcaagggtgtgacggccacggacatgaagccgtacctgcatgtcgatcacgatgctgtactgcgggaaacgagcagtgagatggagcaggcccgcggcacgcaggtcgacaaaaaaacgatcgagcaactagcgataagggacgccgagcgctggtacgccagcaacaagagcctcgtgaacgctccgccgaatcctgcgatcgtcgccatgggggttgatgacctgcagggcgaggttgctcgtctcgacgaactgcatagagttgaggtgactcgctccgagacggcaattgaagccggcaagcgggcacgactgcgtgccgaggaaaagaagtcgcaggccgatatggatcagaacgccgaccaaatgctttgcggcgccctgggcctcaccgagcagactaccgtcgtgcagatcgtggccgaaacacacgcgctgaccggcctaactctcgacgctggagaccccgtcgttctggagcaacctgccgccgcgcaggtcgctgccttgggcaggtcgtacgggcagaagggcgcggctgtgaagaagcttggcaacaaggcgcgtgaggaattcgacgacctcaagcaggcagctgcatcaccagatttcgccaaggcggatgcggccgttgcgcagcagatgcaggtcaatagcttcgaagacacgtgccgcgcggctgagaagatcctgaccgccctggatgatcgcatctctaccaccaagtccactctcgacaccatgcaagcggatttcgacgcttgcatcgaggaggtgaccgaagtcgtgcgcatcgccatctcgaccctgaacaaggcgaccagctccgacaagcgcgtgccagccggcgccccgtacatcgggggcaagcaagtgctgcggatgcgggcgaacttcagcaacatcaacacggatctgcgaaagcaacggatgcgtgattaccttgacatcctggccgctagcaaagcaattccggtgaccggcacggacctgatctctgaatcggtgatgcgtgtgtacggcgccccgctcggcatccagatgctcaagatgtcggtggaggaaacggagcagtacgtggtcgtcgaccggatctcgaactcgggaggggagggtgtggttatggccatgttcctgtacctgctgatcaacgagctgagggcagaaaattacgccagcgtccagaagtccgccggggggccgctgctgctggacaatccgttcgcaaaggtcacctcgggggccatgtggaaagcccagcgcctgctggccgcctcaatgggggtgcaactcatcttcgcgaccgcggtagaggactacaacgcgttggccgagttcaaccgattcgtgcgcctgcgtaaggccggaccccataccggaacgagacgctggcacctggaggtagccaattacaccttcacgccgaaacacgaggaggcaccggctacgtga

SEQ ID NO: 51829 - DNA, 1005 bp, Variovorax paradoxus EPS
gtgaacacattcctgaagaatctccggacatgcccccgccgacgtgtccagctcgatgagattcggcggcacttctacgctgccttccctgaggtgcaagacagcgctcaacgtggggcccagctcctgaaaggcctgcaggagctggaaatcgccggccacctcaagctgccggcccgcgggagctgggagagcttcggccagcctccactaccgctttggatcacccttgctaggattccgcagcaggccggccgcagggactacggcactgtcgcctgggcgccggaactggacttctggccccgattgaaggctccgcaactcgaggccttgatgccggtgaacgactttctcctgcgccggcgtggcctcctgccgttggtgccggccaaggagcggtcgctggagatcttcggcgacgagaagcggctggaacgcatgtgccaaagtggaatgctttttggcaagctcccgctttcagctctggggtgcttccaggtctccgcgcctcttccgtaccgcccggccgtagcccccggccggcctgcccttgtcctggaaaacaaagacgcgtactggagttttggggaatggaataccacggcgaactacttttctgccgtggtctacggcggcggcgaggccttccagagcaccggagcggccctcgcccagatgatgcgtgaagtgagagcaggacgcgccctgtacttcggcgacctggatccgaagggagttcgcattcccttggaattcaatcgaaaagccgcccccggccagccgcaggtttcccctgcgatagagctctatgcctggctgatatccaacggtgtgcgcaggccgaagcctgagtgtactgaagctccattcgatctcgtggcgacctggcttgaagagccgctggcatcggctgtccacgcgatctggaggcaaggggactggctcccccaggaggccttaggctccgagacgctgcagcaaggcgttatccctcttagttag

SEQ ID NO: 51830 - DNA, 1521 bp, Bacillus sp. 2_A_57_CT2
atggaggagatggatgtgaacgaatcatgggaaggattcgcccagcggatgcagcgattgaacccgctgtttgagcttgggagaggaatggaagtcggagagctgaagcctcatatccaaacgattctgatgcaggtgctccttaccattttttatcgggaattgaatgatgatgatcatcggagaaaatcggatattaagtatatggtcgaagattcaattaagcaaatgaagcttttggccgatgagaagcaggttgaacggatcacaagcgggcttctgtatcaggggaaagaagagtacagcagaccttttgaagccctatattacgatgaaatcaggcaatcatgggagactcaggttttccgctatgtgacgatggatgaattatatacgaacctggagataggcggatccattgtctacaagctcaccgatgtctcacaggagatgattttcatgagcagggaaatggcagaggaattctcgatcaccattgaacagctttatagtatgcagctgataaaaaacggtaatttccgcaaagctactcgaaacctcgatcacctcatttcacgggttaaccgcttaatggcaaaagaattttcctttcaaaaagaaatgatcaataatcccaaaatcttattgatggaagaagaaatgcaaagggctgataaccgtgcggaaattgaaaagcagttcgaagaagagaagaatcacttccgcaccatcagcagcatgattgagaaaacgaaacgaagaaatgaggaagatgatcttattcaaaaagaattgatccttctccaggaaaagatcggccatacaaggcagctgcatgaccgtttcgcaaagcttgtgattcaaaatatctcttatgaaatgaagctgaaagcggaaaacccatccctgttttgggaaacgagccttgtttcattcagggaacatatttatgagaactggttcatgaaagaagggttttcttcattcgatagagttgaaaaagtattaggtcctttattttcgccaaggaatgaatttatcttacctttggactggatttggggagagcaggaatttgatgaaaagcagctgacagaggtaatggaggaagaagcgcaagaggaaagcattatccatcagagggtaacgaactgggattctgtcatcaaggcctggagctatgtgtttcaatatttgcagacatacggagagttttccttggctgatttaacgacattgccgctcgaagtccaggatttatggtttgaagaatcggaaacgattgatttatggatgatgtttgataaaaaaccgctgaaggttcaggtgctgcatcggaaagaagagtcattaagtgatgaacgggagattctcctctataaactgatgcaggaatacccgcaattccaggtgtttgaaggcttgaaaatttataccgaatttgatcatcgggctgaacccttcctctggtatcaaatgaaaatcactccgtttaaaatttgtgtacaggaggagaaatga

SEQ ID NO: 51831 - DNA, 750 bp, Bacillus sp. 2_A_57_CT2
atgatgagtgcagatagtatcaagaaagcatcagcggtttattttacgcttttaaaagacaaagtcatcgacgaaaacagcgagcactttcaggcgtatttcgatcctgatgtaagacagacggtacttttattggcagacgaatccggcacctttatcattgaatcgccaaaacggattcagctcgtcgtgcagccgaccggctctgtttttgctacaaattttactcatatgaaggataggcataagcaggttgaaacgaagaaacattttcacctgatgagcgtagtcattatggcattcctggcaagcatcgaccgcagccaggcggctaaaatccgtacgaagcgtgaagggattagcttctataccctggaacggcaagtcaatgatgtcatcatgaattgggatagcatacttaaggtaaagcaggattttggagaagaggaaaaaattgatatgaaggatgttgtgacaacatggaaatacatggaggtcgacaccgatgattatggatctaagaaagccaatcgccggacgcgtatcggtttgattgcaagcagtatgcgtcttttggagacagaaggacttatcgtcattctcgatcgggaggatattccaaaggcgattccgaaacaggaattatttgagcggattgaatatttgtatcatgattatgaccgttatgaaatgttcaaggaattaatgacgacagaggaggatcagcatgccgaaaatccatcgaattag

SEQ ID NO: 51832 - DNA, 2310 bp, Bacillus sp. 2_A_57_CT2
atgccgaaaatccatcgaattagaattgccggcctgaaatatgatggcatgcaaaagcaatacaaggatacaacatttaacttccataatgaagatacctccacaaatggccttatttccatgatgaatggaggagggaaaggggttttcctgcagaccattttccagattcttaagccaggaacttcttggggaaagcagaataatcgctattatcagcaattcttttttaataataaagagcaattcattccttatacctttcatgttcttatgcaatgggagctcgacggggctgattgcaggcatttggtgacgggcggaatgttttcagcagaacagcggatttccatgaacgaagaaggcggagaagccaaaacacttgaacaggaagcaaaaattgtcccgaatattacgttttatacaagggagtttgaacggaaagaagaagcatcccttgaacatattccgctctatgaagatggtgaactggctgatacggaaggcctgaaggattatttaaaatggaatggctatgatgtctaccgcgatacaaagaagcactaccgcatccttgatacatacggcattaaccgcaaagactgggatattatgaaagacattaacaaggatgaaggcggcgttggaaagttttttgaaggcgctgaggatgatcattccctgttccaaaagcggattattcctacagtcagtcagatcctgcaccgaacggagcatcagaagaacgatctggtggagatttttaagagtcaggcaagtattgcaaaggacctgcctgttttgctcaaaagagagcaggctcataaagagttcctggaagatattattccatttgaagagagtctggcaaagggcatcaagcataaagaaattgttgaagacagcattaaggtcgggagacagctgcttggtgctttggagcatttgaagaaaacggaagaagaaacactcattgagctggaaaaggaaatcgaaaaattaacgggcaagcaagtggaactgcgctttcagaaagataaccttgagtatgcaaaagctcaccgggaagtgctggattgggagaagaaactaggggaagaacagaagaagcatacgatcctgcaggaaacggtgaaagaaaagcaggagcgaaaagatgagctggcttttcaccttttattgaaagaatggcatgaaggggaacagagcatccgcgctctttcccagcagattgtgaagcttgagcaaaacagcggcctggagcaagtgaatcaaagaatggatgaaatcaaaaaagaagcggcacagcattgggaaaaatccgccgcagctattagggaagccgttcagcattattccggatatcagaagtttttaaagaagaaaacaaacgaactgtcaaagcaggataaacaaaagacccgggagattgcccagcttcgtacggaaattgattttctttatactaaaattcatgaatttgaatcaaaagaagaacaacttatcaaagaattcggtgatcgcttaacctatgatttacagggatttatcgaaaatcttaacaagcagatagaatccaaaaaagaggctctcgaagatttacaggcaaaagagaaacaatcaaatgaaaagcaaaatcagctagcatctgcgcatggtacgcttgctcaatccattcagttttctgaagagaagtgtaaagagttaaagatgaaaagtgaagagatgcatcgaaaagaagcgaagctgtacgataagctgcaagttgtgcttgacgatgtctcagcgcagttcacgaatgctcttttatccaaatatgcccagcaggtggaagagctcctcgttcaaaatcgtgagcaaggggaagaaataaagaaagcgctctgggaaacgcagctggattttgctttgaatgatgagcatttctggattgcgaataatgatgtgaaggaactgaaggaatggattgatgagaaaacagggatagatgtgttctacggctcacaatttctgcaatctttaaaaccggatgaaatggctagccacatgctcactcatccgctcctgccctacggcttagtggtcagcaggccgcaatgggaaaaagtgaataaacatgtccttgcaggaagaatgtttaagagccctgtcccgatttttatgagggaagaaatggcgggcgaaaatcagcaaaatacgtttgtgatgatcaccggtacggagaaggaacttctgacaaataaaaatcagttcacgaactggaaaattaagattgccaaagaaatagaagaaaaaaagatgcacttctag

SEQ ID NO: 51833 - DNA, 1086 bp, Bacillus sp. 2_A_57_CT2
atgtttaagaaggtgaaaaaaatcaacatcatcgaaacaagggtgagaagtttcattgaagatattcagcacccgaagcaaaagaagaagttaaacataaacgatttagaatttcagctgcgaaaattgctggatgattattacgaaatggatggttattcgctgttttatgaagccattcaatcattgcaagatgaagggcagctgactcctatacataataatcaacacaatgggaaaacaccgtctttgcctttatattactgggttaatgtgaaggctcaagccgacaaatgggaccggctcgggatgatgaagctgagtgatctgtttgatttttcattttatgaaaggcacccggaatggcagacgaaagaggaatggagccgtattcagagtttatatggttttctccaatccagcggtgaacgggaagtcgtttcactagaagaacgaagcctggagctgttcggccatgaagaattcctgcatgacggggtcagttttcctgatggaaaaggctttttagcccgaattggcgtatctgaagagcagctgaaagtagtgaaatacggggagccttttgtattttggatgaagcagggaaaagaaatcaaagatattcagagagtgctgattgtcgagaaactatcattctttcatacttccattcaattattggaaagtgatctgcttgattatgagccggaactcatcatttatggggaaggcactaaaattgaacggagcttttcgtttttctttaaaatttttccggctaaatcgtatctcctctactatgcaggagatcttgatgcggcaggatacgggatcatgacccggctgattgaaaaatacccggattgctgcattcagcctgcattaaagatttatcgtaaaatgcttgaatgtctggatcaaagaaatgaacagaaatctggccagcttcaaaatcttaaataccgagatgcgttcttcaggtggtttacggaagaagagcaggaactcttaatgcaattatggcaggaaaaaaaacggattcctcaggaagtcttaacaattgaaacatggaggagatggatgtga

SEQ ID NO: 51834 - DNA, 1497 bp, Bacillus sp. 2_A_57_CT2
atggatttgatggattatcagaatataggcgaacggaccaaaaggctaaatccgatttggcacttagggagagggatggatttaggtcctgaattaaatccttaccgcgagcccatttgcctgcggattttgcttgaaatcttccaaagagaagtccgtgataacggcaatcgaacgatacccaatttggaagaaatcgcggatagctgcatccgtcaacttaaacttcagacagacaaagaaaagaatgagcggttaattgaaggtttgatatggagcgggaatcccgtctacctcagttcttttcaagcgccgtttttcaatgagaccacaaaagagtgggaggagcattccttccggtatctagaagaagatatggagttcagcgtcccggaagaacaatactacgtatataagttgtcggaagaatcatatgaaatcatctttatgagtcatgaaattttagatgaacttgatattcctattcagtcctgggtggcgcttcagctcattaaaaagaagaattatcgggatgcattggaccgcctgcagcagttaatcatccgggtgcggaagttaataaggaaggaagccgaatatgctgagaacctaaaacgcaatccgaaaattatcaaccagctgcctttcgaatcaggtgaagaacacaaagaaaaagtgcaacagcagttcacagaagagaaaaaacgttatttggaaatggaaaaactgctaagtcgattggaggacaatcctgaagtagaagtggagatttacatccttctggataaaattaatgagactagagagcagcatgacctcctcgcacagctcgttatcgaaaatgtcaaaacggagattgatatacgcaaaaatcatttcgaacacctctggaaaagacctcgcatctcctttaaggaagccatttgggaagaattaatccttcaaaagggattcaagaacccggatgacatgttcctgttactcaacaagatagtctctcctaagaaaccatttaagtacccattggattggtccattgaacaagaagtcaccttgcctgccatcgatatagacgatgaggacgaacctgtggttgatgaagatagcttacatgaaccaccactagattttaaaccgatagtgcttctttggaagccggtctttcagaaactgttgcagtacggggaagttcatctgaacaccattttggaaggggaagagacgaaagaagaatggctgaatcaaaaatatgcagtggaactttggaatcaatttgtgaacagtaaattaaaggtaagcaaggaagatttattaaattccactgaccagcgcgtccgtttaattcgagaattgattcatgaagatgacgtgtttgaagacttattaaataaagaaattataacgcattttgacatgaacgatttgctcaccttttatttgaaagatgaacgaggattaaaaattactaactaccgtattgaattaaaggaggcttaa

SEQ ID NO: 51835 - DNA, 741 bp, Bacillus sp. 2_A_57_CT2
atgctcacgatggaaagcgtcgataccgcgaatgaaatatattgtgcgttaattgaaaaaggagctctgaaagattcagattctttagtgtctaaatacaaagataaagacaatgaagcggtacgccaaatcattaagaatcgatgcaaaaaagaggggacggatgttctcctagggaaagactatcttcatctcatctccactgagaacagtgtctactgcacgtccttctcagaactgcgtgacaaatactattccattgaaagcaagaagtatctgcatctcatcgggttgattcatttaacttttttttcggaagccaataacgaaatgaccagtttgcaattgaattggcttcacaacggcatttcctattacaagctgattgaccaggtagacagagtgatttcccagctgtatgaaaagcaagtacaatcgaacggcgatttttccaaggagttttcaatagccattgatgatgtataccatctctggaaaagaaaagacacggataagcccaatcgacagaggattgcgcccagtaataaaaccaaatttggattagttcataccgctatgaagatattagaagatgataatttggttttcattaaggtcgtcaaaaccagtgctcaagcgattcctacccctctgttacatgagcgtcttgatttgcagtttaacaataacgtcaatttccaggaaattaaacaattaatcaacgaaaccaagaacggataa

SEQ ID NO: 51836 - DNA, 1917 bp, Bacillus sp. 2_A_57_CT2
atggataccttaatggcaaaagctcggattgttagcttaaagtacaacaaaatgcaaaaacaatataaaaatctgatgtttgaatttgaacaggacgaaaaacctgtgcatgcactcatcacccttatgaacacaggaggaaagggggtctttttgcacgcgctctttcaactgattgacccccttatacgctggggaaaagaagacaagagggtcgagagttttttctttaaacaaaagaaaaaattcgctccgtatacatttcatattttaatagaatggaaggttggttcggaaccacatacgaaactattaaccgggattgctgtcacagccaaaccaaaactcggctacaaaaatgatggttcgccgattgacttggaatacattacatatgtgtccgaacaccatgaacactccccttttgatattgaaagcatcccgctttggaatgatgaaaccgaaacagcattgccgcttgataacttgaaaacctacttaaaaaggcacgaaggtcacgtcaaagtgtttaaccgaaaccaaaagagagaataccttcaaactcttaagcaatatggcattgaccatgcggaatggaaaatactcaaaagcattaataaagacgagggagatgcctctgctttcttcgctaaagccaatgataaccacagcttaatgtcaaacctcattattccaagcattgataaacaaattgaaccggagtacaaaaagacttaccaggaatctaaaagcttggcagagacctttaaggatgtggcgatagccagtcacgagatgccaaaactattaaatcgagaattcacgtaccggattatgaaggacgagctgactccattaaccaagtatttaaaaaagtgtgcggaaatcgaactgcagctaaaaaagcatagggaaaacgggtttatcctaaaggaatttatgaataaggaagcagaacataaaagccgcctcaatgcccacctggcagatgatttgcaaaaaattgaggatgagttgaaagaattaaagtgggaagcaacgaatttgaagtatgcgaagaccttttctacgattcgtgagttagaggacgaactggaagagctcactgccaaatatcaggacattcaagctcgaataaagaaagaagaagaactgaaactggcgtttaccttaaaacttagattacacgaacgcgattatttacggaaacagctcaatgagcaagttgagaaagcgaatgaacttaaacgggtcttaaaggttgacgacttggaaaatgaaattgcccgaaatgttggatccataaagaatcagtgggacaaaaccagagtagcttggacagaaacgaaacgggaacatgtccactatatgaatcaattggaccaggaacttaatgaacatagaagccatcaaaaaagtattgagagcgacattgaaaagctgagtactactctcgttcaaactctgacaaagatggatatgcacgaaacacataagaaagagttgaaaaatagatacggggaccaattcgtagaggacacatacagatatcacaaagaaatgaaggagaaaaaggaacgattgcttcaaaaacatgattcacttcaggagcagttaacgaatcttttagcggaacaaaagtcacttcaaaagaaatcaggagaaaccgaaaccaccattgtgaacctgaaaggaaaaatagattccctttcacaagaaataacggaaaaacaagaagaagaacgcgagttaatggatgaactatccggtgtattgaaagaaaaacggaaggttattcgaaagaaaccattgtattgtttgtcgaaaccctcaagcagcttgcctctcaaaccgaaagggcaattgaagccagcctgcaagataaatggaaatgggaaaaccaatacgccatcatga

SEQ ID NO: 51837 - DNA, 1059 bp, Bacillus sp. 2_A_57_CT2
atgtattcggctttgctgagaatcgttgtcgagattgcgaagaaaaagaagacgaaaagtaagatttcggtaaaggtattggaaaatgagatacagaaatcataccatagccacattgactatatggaagcgggcggatatgacacgttctaccaagccatgcagaggctgacgaaagaaggagtcatgacgccgataaaagcctctcccttgacggataaagcccttcctttgcatgaatactactggatttttgggaaaagaaagacggagaaatgggatgatgccatcattttcatgctgagtgatgaaattgatatgcacaaataccggtccttcccctttttgcaaaccaagaagaactcaagccgtttgttatccctgtatcgctttcttaagtcaatcgatggtcatcaatggataaatagagaagaacgttcgtttatgctatttggagatgaaaagttccttggttctccccaaggaaaaacgtttctgaaccgcatcaacctgaccttggacgatttaaaaatagaaccgccggaaggggaattggagttctggcaatcgccccgtttcgaagacaaaccgagtgtcaccattttaatcgtggaaaatcacgcaacctacaaaacctttaaaaaatgtttgaaagtggggaaatgggatttctcccatcagccggacatgctggttttcggtggaggcaatggcattgcttcgaccctttcgcatcttcatgcctatgtgaaggggaaagacgtgtctattcggtactccggagatattgacccagcgggattgaatatcttttatacactagtgtcccgctaccctgaatatcagattacgctcgcagaagacatttacctctttatgcttcaaagaaaggacagagcgtgccagcaagagaccttacaaaagcttagcagggatgcaagagattacattcaagagaatcatgcatttctgtttaaacgggctgaagacctattcttgcaaaataaacgcatccctcaggagattattaattcagatactatctacgaaagtgggtga

SEQ ID NO: 51838 - DNA, 1398 bp, Paenibacillus larvae subsp. larvae B-3650
atgagggatatatcttatttatcaggagtgttgagtgatctgggatctcagaatgcattccaaacacctgctgaaattttgaagtttttacggattattcaattgattaatgaagaagcgcttgggcttgacgaccagatcgagaattcggatacgctttattaccgctataggaaccgttatagcgatccggatccgccaagcaggagaaaggtagagcaaattatcaatgtgctcgtcaaatacaactggatttccaagcaatcaaggcagttgaagatgagagatatcggaaaacggatgatggatgctcttattcgattggctaacgattcacttgcttattacatgcatgacgatattgggcgttcactgtttcaggctagacgggatgcggagctcagcgaagcctatgatgatcacggaatatctggcggcaataaaattgccagcatgattagaaatgttgagaatgccattcaattgatgtatgagagggaactggagatgcttgccgaccgcaacgccttgccgcaacttgaaattatccatgaactcatgcaggaacttgaggtgaagcttacggagcgttttcgccagttccagacgttggaagatagcctcgttcttagtaatctgatgcagcaaggtacggctgttcttgcggagggaacgaatcttagcatcgggatgatcaataaatatttgaagtttacgacgatgcagcaaactgtgctcttatcgaccattaatcctgaaaaggtaagggagttcatcttgcggatgtatgatcctccactggaatcggatattccgaacgctcatcagcttatgagctttatggagcagaatcaatataaaggggaatcagcagatggattatgggtacccgttaagtttgcagcacctatatcggcaaatgctattcgtgaatccgtgcattacttggaaacgtatgaacctgtaattaatccgttaagggaagaagagacggaggtggagtatatggaagaggaaatatatattgatcaattgagcgagctgatgggggaatcacagtggatgcttacgaaatcgatgattcagactgatgccattgaatcatatatggaacaagtcgaagtggcgccgatggagcaggtgatgatcgaagcaacctctgcagaatggggtgatgccatcaatgcgttgactgctattgcagccttggtcggtaacaagaaattgatgatcgatcaggcttcaaagggcgtaactatcgatcagccgctttacgagaaaaagtgggaatggatgagccgggatgatcgatatcagcttgttaggaaacggaacagccgggtacgttcagaccagaccgagactcaggggaatggaggaaacaaggaagatgtctga

SEQ ID NO: 51839 - DNA, 762 bp, Paenibacillus larvae subsp. larvae B-3650
atgtctgaacaggacattagctttttagaagcaggaaaaattactggaaagcatgaagagttttccagtccgttagaacggcgtgcggataacgttggatatgctgaaagtcccaatgttacccctctcaacatcatgcaatcattaaaaggtatgctgactgaggaagaggaactgacattcatgaatattttattttcgtcctccgcgacgattcgtgccgggaactttggtttgtcgagaagagaggtcgagaagcaactgcggatttcagaacaagatgagaaatttttttcatttttacaaagagtcaatcaggcagtaagccgctatttccaagttatttatgatgaaaaacgtgatcaggttgttgctatgatgagaattccggccagagccgcccgcagtactttatcaaaggaaagcctggcgattcttttgttcatattctatcagcaggaggtactacagcatgaattcacgctctttgaccagctgctgaatgcgtttggccatgagactacgaaagcgaaccagcgcctgttgcttaatattgatccacttaagaagattggagcggtagaagaatacgatacgaattctcaggagaaggcatatcagcttacagcgattggggtacatatgttctcggattcctttttacgccgtacggtcgaattcagccagtccaatcaattgaacaaagaagaagtactgaaattcttcaagcgatataacctgtaccaggaaggaattgagtaa

SEQ ID NO: 51840 - DNA, 3087 bp, Paenibacillus larvae subsp. larvae B-3650
atgggggccgtattgtattcttccaaggtagatattgaaggcttgaggtcgcgcaatctggccccggatgaaatctggaaggcacaaatccggctgctttttaagaatgagggctatgcacgaatcgatgctccggattatgttgagttttcactttccatccttcaggagccaggacagcccgtcaagaaggaattcatcatttccaccggagatgatcctgaggaatgggaggagaaaattcgttatacctctggcgaccgccaatataatttcagcgcttacaagaaggatctccaatataagtacaaaatcgatccggatatgttttatcttatctggtatcaacaggaggtcaatcagtttgcggttatgcatcctgaggagcggtttcggatatttgcagaaatgcatggtatcgatcaggtgcagcgtaactgggaagagagtatggagaagttaaaggagacgcaggagacactgcgtgtggctgaaagcaatgtggcaaataaaaagcaatggttacagatcaagaaatctgagctggatcggtatgaggataatcagcagcgattgcttgaaggtggaaaatggtatgcacattctctgcttcaactggaagcctattataaacgcgaacaagagcaactgaatagtcaaattgagcagtttgagctagaaaaagaacaacagcaggagcatataggtgaaatgaaggggcgggaagctgaagtcaacgtgaagatgacggctcttcagaaggagatcgatcagttaaaagctgaactgtctcaatgtgatgaacagcttcaggcattggatatcgtgatgaaggaaaccaagacggccataaccgagctggaacgtgagctgcaggaagtcagcaaagagaaggaacgcattacacggacagaagacgaagtaaagcagcagttgaccgacgttaccttgcaattgaacgatacgttggagcaagatactaagctgaactttgagattgagaaaagcgaggtaagaaatcaagagcttacaggagtcatatccaggctggaggctttaatcgagcgggatcagaaagaggagaccgagcatcaggaacggcttcgtcagtttgtaagcagtcatcatgttcaggaagagctgaatcggctagaacaatcgcttcttatcgctaaggataaaagacatgagcatttaaattgcgttcgtgatttaaaagaggagcttgcccggcttgaagatgagcgtgattggtcacggcggcaaatggattctttgacatatttcagttcgagagggatccgggcatatgcattacgtgaactggtggagctggatggttccgcgcagctcaaatcagaagagcgctttaactccatcaagtacacgatattttttgatggacatatggttgccgttccgaatgacctgtaccatgttccgctgcgcaaggtggtgcctgatcgttcggtgacggagcttatgccgcttcaacttcgggtaaaggaaggattggatgaggaagtgtttcctcacgcagtcaaagctttgtggtgggttgagcagttttttaaggacggtgacattcggattgaacatggtgttctggtagatccgatggggattcgcgggccacaggaacaaagccgttatattttgagcgcacgtgccctcattgcccgcaaggaggaagttgcgaggagcattcgtgagctgtcgctgaagctggaggaactcgatgaatcgatccggcaagatacaaaacgaatgcaagagctaaacagcatcattcatttggttcgggaagcagaggcatttatgacgagggagcatgagcgggccagtagagtcataaaacaggaagaggaaacagcgagacgagaagaacttgtggagcatatacgggagttgcgaaaagttcaaaaagagcttatagaaaagcggctgaagttggaacgcgatcagggcgagctgaagggagaagccgagttttatgtgagacttggtcagcagaaggagaaatatcaagatctgaacgccaagcagcggtatcttcgaagcttgagtgggcagcatgaagaactggaacatcagcatgagaattgtgaggatcaactggacaatttagagaaggagcttcgaaagcagcagcgtgagctgcaggacatccaggatcaacaggagcgcgaggaacgcaagttgcgccagattcataatcaactgcagtcaagaatcgactctcttgacactgtgaagggagggtatgtgagctcgattcaggaattggaagagtttaagcggttagctccgcatatttacaacgaagtggcaaggggggatagtttgcagtcagtcaacccaagccaactttcttccttatctcaaatccgttcggaccttgaaacaggcaaagtaaaattcaaccatgcccgaaatgaaacgggtatcgacccagaggcgccggaaaattataaggtggttgaaaaggaatatcaacgtcatcaagatgaatataaacggacgagcgtattgttcgagcaggaccaagaacgtaccggccaactgaaggaccagttggagactacgattaacatgagagttctcgaaataaaacagcgtttcaaatcctatatgggtttgtttcaattcgagggagaaattgaatgggatcaatttgaggatcgtcgggggcggacacatttcaatctgtatattaaagcgcgcaaggagggacacagaggaactctggaagatgtcagcgttaaggctcgcggcggcaaagtcggcaagggtgtatccggcggcgaggaatccttgagttccctgctgttcgcactcgccctactgcaaaatttgcaaacgaccccgggattcattgtattagacgagttcgacagcgccttggacgagcagcggaagttgaaggttttcgatctttatggacgggagcttgagcgaaagctcatcatacttacaccaaaatcccatgagaaatcgtacctcgaccgattctctaaagcgtacattgtacatcatgatccgactgtaccccgaagtaaagttacgggaataataaaaaaatattaa

SEQ ID NO: 51841 - DNA, 1305 bp, Paenibacillus larvae subsp. larvae B-3650
atgagcgcaatagaaaacatcttttcatatatatcgcaatatatcttaaagaacggcgagcaattggatacaaattataccaggattacatctttggttgatgtcgatatcgtaaaacaaacagcacgtaccttccggagagttggtactttaactctatcactggatgcctatgcgcaagaggatgcacaaatcccggacattcctttgttaaaatggactcttggcaagcgggcgattctcgatgatttacaagcctttgagtggcttaataagggatggattatgaaggaaatgcgctttaagcaagacgggaaaacgatagaacgagttcactatcggatgggttaccgtttatttgtatatttgcagaaaaaaacggatcgagaacatcaggagaagataagacagtttgcgagctatcaattagatgcccaaaaggtgctaagagggctggtctttgatgataaagagcgtgcagttcttttatcttcgctcacgcatcatgtatcagacagcatttattggaagattgaagaactggccgaatcagacttgtttccttcgagttggagtgcgctaaagagaatcaaatgtttaacttttctgttagcattcattatgatatccaatcataaagagttgttcgattggaaagaaatcggtgcgcaatattatggcgggatcggaggatctaaagcatttgatgattacaaagaagaatttatttgtgttctagaggagtggagtaagcaatcggtagaaatcttggggatgattagccctgggaaaataatacctttatattttgcgggacatctgaggggggaacggtcgtgctttcaggcgggtcctgtttatgcattgacggatctttctatcgcacaggatcagtacagtacggatgcaacgacactgtggctggtcgaaaatcgaggaattttaacaaggttgtctgctgagcgtaattttttgcgggaaacaggctcgctgattgtatgtgtagatggtcaccttaggagcgtacataaaagattcatccataacttgctcaaaaacagctgcattcgtcaagcgatcttctggagcgactacgataaagatggtcttctcattgcgggagaaatggttgaagcggtttcggtgtatcctcttacgttgaaatggatttgtcacgatcacaaggtgattaaaaattggtcagaatatcaacagtatatgggggctcttcttcaggaagtttgtctggagcaggaattgatattagggaaggcagaggattggagacgatggataataaattaa

SEQ ID NO: 51842 - DNA, 1590 bp, Clostridium symbiosum WAL-14163
atgaaacatgttggtctttatgcagttcttttacagggcagcctgcagaaaaccacctggcagaaatacgggtttgtacgggcggatgagcagattaacctaatctttgcagtacttctatatatcatggagcagtctttaaaggaagaatattgcacaaaagacgacatcggcgtttttattgatgaactgaatatggagtatttaaaaaaggatatggcctatgaggactgcaagagcctgggcgattttattttaaatgtggttctgtccaatgaagggaaggccatgtactttgatggctataattttgagcagaaggcgtatcagatcatgaatatcagctatgtggccaatcggattgtgtatgtggaggatgaggtgaagcgcacctcctattacctgactgatgacggctataacctgcttttgggaacgctggagatggagagcaacatgaagctgaccatccatgagatgatttttaagatgcacctggaaaagcagagctatgataaagcggtggatgagataaagaatgtatttaatctgctgcggattcagctccagaagattcaggaggccatgggcaaggtaaggcggaatgcgctgaattattctgtggcggagtatggagatattttagatgaaaatctcgatacgatcagcgataccaaccagaaattccaggattacagagagcttgtgaaggcgcgggccagagaactggaaaaggagaaaatcaatatcagaaggttgactccggaagaagaggagaagcttaaaaatctaagggaaatcgagagctatctgaccagaaccattgacgagcatcaaagaattttaaatggccattttgatttaaaggcgctgtatacaagggagttggagcagctttcacagatgtctctgattaaacgttttccgctgcgaagcgcattttacgacaaggtgctggagaaaccggagattatggagcggatggatctgtttttgcgtccgctgtttggacaggatccggataaaatttataacctgaataaagcgcttgagatccagaagcccatacgccgccgccgggaagaggaggagacggagcttctggatttggatgaggatgcgtggcaggaggagcaggaaagacggcttcgggaaaagctgaaacggtatgagggcagcttatcttttctgttggagctggcgtcggaaaagggagagatcacgctggaggaaatcagcagcaggctgccggaggatgaggagcaatcggcggaccgggagcggctgattcctaatacggaaatttttaaagaaatcatggtggaattaatcaagaaccagcagattgatatacgggcgctgaggaaagagcgaagcgaatatatacgggaaaaggcagacagcttccagttgaatgagatgcttctggatctggcagaccggcagggcgatccgatacagagaattgaggtgtaccgactggaggacgggaaggtgatcgaattcggccgggtaaagagtgaggatggcagaataaagcgggtagcctgctccaatgtgctgctgcgggtgattcgggaggatagataa

SEQ ID NO: 51843 - DNA, 711 bp, Clostridium symbiosum WAL-14163
atggcatacgaaatagaggatatcaggctcagccaggagattttttattatcttctggagcatcatgagctgcgggaagacaatgaattgagattatacaaagcatacacccaggaagagaccattcagaacctggtcaagtcccagggcgaaatcagcgactgccatatcgaacggtacggcaatgtgatttatctgatacccaaggagaacaacagctttctgggcttttccaaagcccagatgaaggcggcgctgtgccgctccaatgccacggataaggattattatttatcccaatttgtgattctgacgcttttggtggaattcttcgacgggcagggcagcagtgccaagtccagggaatatatgcgggtgggagaactccaaaactgtatttcaaagcgcctgaaagagggggcaaagagccggggagaagaggaggaagagaagcagggaattgcattttcgaatatgctggaggcgtatgaggcgctgcggtcggaggaaaagggctcccgcgccaggacgacgaaagagggatttctgtaccatcttcttacctttttgcagaaacagggcctgattgattacgtggaagaagatgaaatgattaaaacgacaaagaagctggacagctttatggactggaatctgttgaatcaaaatcattttcagagagtgaagaaggtattgggggaggttgaatga

SEQ ID NO: 51844 - DNA, 4218 bp, Clostridium symbiosum WAL-14163
atgagtaagataaatgcaatccggctgattaatctgaactataataataatgccataaaaatcagtgatgaaacctttcatttgaatggagagagtacgcttttgtccctgagaaacggaggcggtaaatcggtgctggtgcagatgatgacggcgccgttcgtgcataagcgctaccgtgatgccaaggacaggccctttgagagctattttaccggcagcagacccacctttattctggtggaatgggcgctggatcagggggcaggctatgtcatgaccggaatgatggtgcgcaagcggcaggagatttccggcgaggagacaggttccggagaagaacttgaaattgtgaacctgatcagtgaatacaaagagcggtgcctactggatatcagccacttaccggtggtggaaaagacaaagaaagagattaccctaaagagtttcggcgcctgccgccagttatttgaatcgtggaaacgcgataaaagtgtcaatttctttttctatgatatgaacaatcaggcccaatcgagacagtattttgacaagctgaaggagtaccagatcaattataaagagtgggagacgatcattaagaaggtcaatttaaaggaatccggtctctcggatttatttgccgactgccgtgacgaaaagggactggtggaaaaatggtttctcgacgctgtggagagcaagctgaaccgggacaggaaccggatgaaagaatttcagaatatcgtagaaaaatacgtggagcagtataaaaataaccgttccaaaattgaacggcgcgataccatccgctgcttttgtgaggagggggagaaaatccgggcggaggcccttcaatttgaggagtcgcttaagcaggtggcatttcatgaaaatcagattgccggtctgagagcagagctgggccgtctgagaaatgaggaagaggaggccagagaaaagcttttacaggaaatgaaggagattcaggaaaagcgggagtatctgctctacaaaaaattatccggagagtattatgagctggaaaaacaggagcgttttcacagcagcagccgggatatgattgatatggagcgggaggcactgaaacgggagtgcagcgagactgagaagcgtctgcatttattggaatgtgccaggcagcaggatgaaacggacgaagacggccgggctcttctggaggccgtggaacggtttgagcttgcaaagaaaaagggagaatctctggaaccggaacggcagcgattaggttccctgttgaagcaatactatcaggaggccttaaaaagctgggaggcgaagcaggaacagaaccggaaagagcaggagacggtaagggagacgctgaaatcaaaagaagagcggctggaggagctgcagaatcaaattatagattacgcctccaggatggcagggcaaaagaccagaatcgcagtatttgaccagagagaaaaccgctttaataaaatgtatggggagagtctcaaacgaaacctgttgggagagtacgaaccgggagcgctgcagatccttcttcaaatttatgaaaagacactggaggatgtgattaaggagaggctcaccctccggcagaagcaggaaacagagacagaagagaaaaagaagctggagcggagactggaggatttaaagcaggagctgggaagaaacggagaagaacagagagagcttttgcgaatcggccgggaatacggggaggagctttccgagcgcaggaaaattttgcgctatctggagcttaaggactccctggtatttgagcaggatgccattcttcaggcttcgggacggaaactgaaagaaatccagattgccaggcgggaactggagcaggaggaagagcggtgccagaaggaatacgaacgcctgacccagggaaaggtgctggagcttcctaaagagtttgaagccatgctgagggagctggaaatcccatgcgtttacggtatggaatggctgcggaaaaacggcagaagcacaggcgaaaaccagaaactggtgaaacgccatccatttttgccttactcacttttgatttccaagagggagcttaaaatcctgctttcctttacagaaaaaggagacggaaaagaggtctatacttcctttccggtgccaatgcttttgcgggaagagctggaaggcagggccggcgaggaggcgggaaccgttctggaatggaacaaaatccatttttacgtatatttcaatcaaaatctcttagacgaggcagccctgaaacgtatggtggaggaaaaggcacatcagatggataagctgaaaggtgccatttccagaaaacaagaggaatatcagggttattttgaaaagcaggaaaaagtacggaaccagaaggtgacgaaagagtcctaccaggaaaaccaggaaaaactggaagaaaacggccgccgggagcaggagctgaaaggacagatcgaagctgcggccgcacaagccagaaccctggaagaggagctggagcagctcagaggcaggattcagaaactggaaaatgatgacaggtggcagacgcagcgtttatccgagtttaaagaattttcatccgaatatgcagcctatcttgaagagagaaatgagctggaacgctgtgaaaagaaggcggccagcctgtcggagcaaaaggccgtgtgcagagagcagatggagcggcttagacggcagcttcagacacttgataatgcagccgcagatctgaaagagaaggtccgggataaccgggaaaaatatctggtgtatgagacatttccggaacattttgcagagatagaagcgccttggcagaccggggaaggccgggaagaagcatatgcacagatggaggcgagatatcaggccattacggccggcttttcaatggaacagcaggaactggaaagatgggtgttagagtgcagaaaacgccatagaaaatcgaaggaggaactggcctggctcagggataagtataagctggaggatggagcctggaagacggttctgtacagcagagaggaagagtaccaccaacgatccgtcttggaagagcggagcgaaaagaaaatcctgaaagattccgaatggaataaggaggacagagtgttattgctgctgcgtcagtcgatgaagcagaaaaaagagaaaatggcggagacctgcggcaaagacgagcctcttccccagagtgagattatgccggaggatatcgatgcacagatgaatgagctttcctggcaggagaaagagaaaaagcagcagcaggagcggcacgaaaaaaggattaacagctatgagcaaaatattacctctctgtccgagtataatcatttggagcagcgggaggagataagctgggaaacagatatatccctgcttgataagaaacagcttgatgattttaagggggagacagtcagggagtaccgcttaagcatcagcgcctctggagaatgtaaggctcggatggtacagcagctcaatcgaattctcagaatggatgtattccgggaggaattttaccggaagcccctggaagccatgctggaggtttcaggtattgccgcccaggtattggctcagcttaacataacggtacagtcgtatcagagcctgatggaaaagctggaggtagatatttcgctggtggaaaaggaaaaagccagaattgcagagatattggaggattatctgaaggatgtccatgaaaatttggggaaaattgatcacaattctaccatcaccgtgagggaacggccgattaagatgctccgccttgagcttccttcctgggaggaaaatttgactgtatatcagcttagaatcaatgactttctgaacgagattacgagacagggaattgaatggtttgagcgcaacgaaaatgcccaggaatattttggcacccagctcacaacgaaacatctctatgatacggttgccggcattggaaatgtacagattcatctcttcaagatcgaggagcagagggagtatcccatcacctggaccgatgtggccagaaactcgggaggggagggctttttgccgcctttatcatcctttccagcctgctctgctatatgcggcgggatgattcagatttcttcgcagacagaaatgaaggaaaggttctcgtcatggataatccatttgcccagaccaacgcggtccatcttttaa

SEQ ID NO: 51845 - DNA, 984 bp, Clostridium symbiosum WAL-14163
atgaagcgaatcactttagaagaaatagaaaaaaacggaaaatttgaaacatatgaagctctgtaccgccatattctgtctgaaatttcctccgggagactgagtccggtgaaggcatccggtatcaacggaaagaaaccggcgctttatctgcggtactgggtcacggaggaggaaaaagattacgggtgtttaaaggaagaattaatctacgggctgacgcccctgatctccccggattactacttaaagaacctgtcactctatgaaaaagacagggagtgggtgcggatgctgaatggattcctgacagaacgaagagagctgttaaatcagacagaatcaattaatgaacggagttttgaaatctggggtcaggaaaaatttttaaaaaggggccagggaatgaggattctgaaaaactgcggaatttcccctgactttttgaattattatgagactacagagccgatgccctgttatacccatacgagagaggtgccgcaaaatctgctactgctggaaaataaggataccttttacagcatgagaaggcatttgctggagggcaaagataccatcctgggcatgaaaatcgggacattgatctatggggccggaaagggaatcttaaaatccttccaggacttttcgatttgtgcggagccatatatgcagaacaggcagaatcagatttactattttggcgatttagactatgagggaatcgggatatatgagaaactggagcagctttttggggaccaatattcgattcgtccatttatgccgggctatttcagaatgcttgaaaaagcggaaggcgttttgcttccgattacaaaagagcagcaaaaccggaatctcacaggacagttttttgcctgtttccccaaaagcgcagtggagcaaatgaagaaaatactggaaagtgagcagtatattccgcaggaaatcttgaatatcagggattttggtgaataa

SEQ ID NO: 51846 - DNA, 1626 bp, Clostridium symbiosum WAL-14673
atgcggtatgattttttaaagcattttcccaaacgaatgaaacatgttggtctttatgcagttcttttacagggcagcctgcagaaaaccacctggcagaaatacgggtttgtacgggcggatgagcagattaacctaatctttgcagtccttctatatatcatggagcagtctttaaaggaagaatattgcacaaaagacgacatcggcgtttttattgatgaactgaatatggagtatttaaaaaaggatatggcctatgaggactgcaagagcctgggcgattttattttaaatgttgttctgtccaatgaagggaaggccatgtactttgatggctataattttgagcagaaggcgtatcagattatgaatatcagctatgtggccaatcggattgtgtatgtggaggatgaggtgaagcgcacctcctattacctgactgatgacggctataacctgcttctcggaacgctggagatggagagcaacatgaagctgaccatccatgagatgatttttaagatgcacctggaaaagcagagctatgataaagcggtggatgagataaagaatgtatttaatctgctgcggattcagctccagaagattcaggaggccatgggcaaggtaaggcggaatgcgctgaattattctgtggcggagtatggagatattttagatgaaaatctcgatacgatcagcgataccaaccagaaattccaggattacagagagcttgtgaaggcgcgggccagagaactggaaaaggagaaaatcaatatcagaaggttgactccggaagaagaggagaagcttaaaaatctaagggaaatcgagagctatctgaccagaaccattgacgagcatcaaagaattttaaatggccattttgatttaaaggcgctgtatacaagggagttggagcagctttcacagatgtctctgattaaacgttttccgctgcgaagcgcattttacgacaaggtgctggagaaaccggagattatggagcggatggatctgtttttgcgtccgctgtttggacaggatccggataaaatttataacctgaataaagcgcttgagatccagaagcccatacgccgccgccgggaagaggaggagacggagcttctggatttggatgaggatgcgtggcaggaggagcaggaaagacggcttcgggaaaagctgaaacggtatgagggaagcttatcttttctgttggagctggcgtcggaaaagggagagatcacgctggaggaaatcagcagcaggctgccggaggatgaggaacaatcggcggaccgggagcggctgattcccaatacggaaatttttaaagaaatcatggtggaattaatcaagaaccagcagattgatatacgggcgctgaggaaagagcgaagcgaatatatacgggaaaaggcagacagcttccagttgaatgagatgcttctggatctggcagaccggcagggcgatccgatacagagaattgaggtgtaccgactggaggacgggaaggtgatcgaatttggccgggtaaagagtgaggatggcagaataaagcgggtagcctgctccaatgtgctgctgcgggtgatccgggaggatagataa

SEQ ID NO: 51847 - DNA, 711 bp, Clostridium symbiosum WAL-14673
atggcatacgaaatagaggatatcaggctcagccaggagattttttattatcttctggagcatcatgagctgcgggaagacaatgaattgagattatacaaagcatacacccaggaagagaccattcagaacctggtcaagtcccagggtgaaatcagcgactgccatatcgaacggtacggcaatgtgatttatctgatacccaaggagaacaacagctttctgggcttttccaaagcccagatgaaggcggcgctgtgccgctccaatgccacggataaggattattatttatcccaatttgtgattctgacgcttttggtggaattcttcgacgggcagggcagcagtgccaagtccagggaatatatgcgggtgggagaactccaaaactgtatttcaaagcgcctgaaagagggggcaaagagccggggagaagaggaggaagagaagcagggaattgcattttcgaatatgctggaggcgtatgaggcgctgcggtcggaggaaaagggctcccgcgccaggacgacgaaagagggatttctgtaccatcttcttacctttttgcagaaacagggcctgattgattacgtggaagaagatgaaatgattaaaacgacaaagaagctggacagctttatggactggaatctgttgaatcaaaatcattttcagagagtgaagaaggtattgggggaggttgaatga

SEQ ID NO: 51848 - DNA, 4452 bp, Clostridium symbiosum WAL-14673
atgagtaagataaatgcaatccggctgattaatctgaactataataataatgccataaaaatcagtgatgaaacctttcacttgaatggagagagtacgcttttgtccctgagaaacggaggcggtaaatcggtgctggtgcagatgatgacggcgccgttcgtgcataagcgctaccgtgatgccaaggacaggccctttgagagctattttaccggcagcagacccacctttattctggtggaatgggcgctggatcagggggccggctatgtcatgaccggaatgatggtgcgcaagcggcaggagatttccggcgaggagacaggttccggagaagaacttgaaattgtgaacctgatcagtgaatacaaagagcggtgcctactggatatcagccacttaccggtggtggaaaagacgaagaaagagattaccctaaagagtttcggcgcctgccgccagttatttgaatcgtggaaacgcgataaaagtgtcaatttctttttctatgatatgaacaatcaggcccaatcgagacagtattttgacaagctgaaggagtaccagatcaattataaagagtgggagacgatcattaagaaggtcaatttaaaggaatccggtctctcggatttatttgccgactgccgtgacgaaaagggactggtggaaaaatggtttctcgacgctgtggagagcaagctgaaccgggacaggaaccggatgaaagaatttcagaatatcgtagaaaaatacgtggagcagtataaaaataaccgttccaaaattgaacggcgcgataccatccgctgcttttgtgaggagggggagaaaatccgggcggaggcccttcaatttgaggagtcgcttaagcaggtggcatttcatgaaaatcagattgccggtctgagagcagagctgggccgtctgagaaatgaggaagaggaggccagagaaaagcttttacaggaaataaaggagattcaggaaaagcgggagtatctgctctacaaaaaattatccggagagtattatgagctggaaaaacaggagcgttttcacagcagcagccgggatatgattgatatggagcgggaggcactgaaacgggagtgcagcgagactgagaagcgtctgcatttattggaatgtgccaggcagcaggatgaaacggatgaagacggccgggctcttctggaggccgtggaacggtttgagcttgcaaagaaaaagggagaatctctggaaccggaacggcagcgattaggttccctgttgaagcaatactatcaggaggccttaaaaagctgggaggcgaagcaggaacagaaccggaaagagcaggagacggtaagggagacgctgaaatcaaaagaagagcggctggaggagctgcagaatcaaattatagattacgcctccaggatggcagggcaaaagaccagaatcgcagtatttgaccagagagaaaaccgctttaataaaatgtatggggagagtctcaaacgaaacctgttgggagagtacgaaccgggagcgctgcagatccttcttcaaatttatgaaaagacactggaggatgtgattaaggagaggctcaccctccggcagaagcaggaaacagagacagaagagaaaaagaagctggagcggagactggaggatttaaagcaggagctgggaagaaacggagaagaacagagagagcttttgcgaatcggccgggaatacggggaggagctttccgagcgcaggaaaattttgcgctatctggagcttaaggactccctggtatttgagcaggatgccattcttcaggcttcgggacggaaactgaaagaaatccagattgccaggcgggaactggagcaggaggaagagcggtgccagaaggaatacgaacgcctgacccagggaaaggtgctggagcttcctaaagagtttgaagccatgctgagggagctggaaatcccatgcgtttacggtatggaatggctgcggaaaaacggcagaagcacaggcgaaaaccagaaactggtgaaacgccatccatttttgccttactcacttttgatttcaaagagggagcttaaaatcctgctttcctttacagaaaaaggagacggaaaagaggtctatacttcctttccggtgccaatgcttttgcgggaagagctggaaggcagggccggcgaggaggcgggaaccgttctggaatggaacaaaatccatttttacgtatatttcaatcaaaatctcttagacgaggcagccctgaaacgtatggtggaggaaaaggcacatcagatggataagctgaaaggtgccatttccagaaaacaagaggaatatcagggttattttgaaaagcaggaaaaagtacggaaccagaaggtgacgaaagagtcctaccaggaaaaccaggaaaaactggaagaaaacggccgccgggagcaggagctgaaaggacagatcgaagctgcggccgcacaagccagaaccctggaagaggagctggagcagctcagaggccggattcagaaactggaaaatgatgacaggtggcagacgcagcgtttatccgagtttaaagaattttcatccgaatatgcagcctatcttgaagagagaaatgagctggaacgctgtgaaaagaaggcggccagcctgtcggagcaaaaggccgtgtgcagagagcagatggagcggcttagacggcagcttcatacccttgagaatgcagccgcagatctgaaagagaaggtccgggataaccgggaaaaatatctggtgtatgagacatttccggaacattttgcagaggtagaagcgccttggcagaccggggaaggccgggaagaagcatatgcacagatggaggcgagatatcaggccattacggccggcttttcaatggaacagcaggaactggaaagatgggtgttagagtgcagaaaacgccatggaaaatcgaaggaggaactggcctggctcagggataagtataagctggaggatggagcctggaagacggttctgtacagcagagaggaagagtaccaccagcgatccgtcttggaagagcggagcgaaaagaaaatcctgaaagattccgaatggaataaggaggacagagtgttattgctgctgcgtcagtcgatgaagcagaaaaaagagaaaatggcggagacctgcggcaaagacgagcctcttccccagagtgagattatgccggaggatatcgatgcacagatgaatgagctttcctggcaggagaaagagaaaaagcagcagcaggagcggcacgaaaaaaggattaacagctatgagcaaaatattacctctctgtccgagtataatcatttggagcagcgggaggagataagctgggaaacagatatatccctgcttgataagaaacagcttgatgattttaagggggagacagtcagggagtaccgcttaagcatcagcgcctccggagaatgtaaggctcggatggtacagcagctcaatcgaattctcagaatggatgtattccgggaggaattttaccggaagcccctggaagccatgctggaggtttcaggtattgccgcccaggtattggctcagcttaacataacggtacagtcgtatcagagcctgatggaaaagctggaggtagatatttcgctggtggaaaaggaaaaagccagaattgcagagatattggaggattatctgaaggatgtccatgaaaatttggggaaaatcgatcacaattctaccatcaccgtgagggaacggccgattaagatgctccgccttgagcttccttcctgggaggaaaatttgactgtatatcagcttagaatcaatgactttctgaacgagattacgagacagggaattgaatggtttgagcgcaacgaaaatgcccaggaatattttggcacccagctcacaacgaaacatctctatgatacggttgccggtattggaaatgtacagattcatctcttcaagatcgaggagcagagggagtatcccatcacctgggccgatgtggccagaaactcgggaggggagggctttttgtccgcctttatcatcctttccagcctgctctgctatatgcggcgggatgattcagatttcttcgcagacagaaatgaaggaaaggttctcgtcatggataatccatttgcccagaccaacgcggtccatcttttaaagccgctgatggatatggcaaagaagaccaacacgcagcttatctgcctgtcaggccttggcggagagtccatttataaccggtttgacaatatctacgtcctgaatctggttgccgccggtctcagaaattccgtccagtatgtgcggacggaacatatcaaaggaaccgaggcggagacagtgattgcgtcgcggatacaggtggcggagcagatggagatgatgttttag

SEQ ID NO: 51849 - DNA, 1023 bp, Clostridium symbiosum WAL-14673
atgaagcgaatcactttagaagaattagaaaaaaacggaaaatttgaaacatatgaagctctgtaccgccatattctgtctgaaatttcctccgggagactgagtccggtgaaggcatccggtatcaatggaaagaaaccggcgctttatctgcggtactgggtcacggaggaggaaaaagattacgggtgtttaaaggaagaattaatcttcgggctgacgcccctgatttccccggattactacttaaagaacctgtcactctatgaaaaagacagggagtgggtgcggatgctgaatagattcctgacagaacgaagagagctgttaaatcagacagaatcaatcaatgaacggagttttgaaatctggggtcaggaaaaatttttaaaaaggggccagggaatgaggattctgaaaaactgcggaatttcccctgactttttgaattattatgagactacagagccgatgccctgttatacccatacgagagaggtgccgcaaaatctgctactgctggaaaataaggataccttttacagcatgagaaggcatttgctggagggcaaagataccattctgggcatgaaaatcgggacattgatctatggggccggaaagggaatcttaaaatccttccaggacttttcgatttgtgcggagccatatatgcagaacaggcagaatcagatttactattttggcgatttagactatgagggaatcgggatatatgagaaactggagcagctttttggggagcaatattcgattcttccatttatgccgggctatttcagaatgcttgaaaaagcggaaggcgttttgcttccgattacaaaagagcagcaaaaccggaatctcacaggacagtttttcgcctgtttccccctaagcgcagtggagcaaatgaagaaaatactggaaagtgagcagtatattccgcaggaaatcttgaatatcagggattttggcggactggagcgtgttaatctcccacaaagtgtgacgcacagctga

SEQ ID NO: 51850 - DNA, 1395 bp, Bacillus thuringiensis serovar finitimus YBT-020
ttggaaggaatggatcagtcagtaatttcgattttgcaaacagatccgtcgcatatgggagtacgaaatgcgatgaaagatttaaataaattatcaggtgttatttcagagcttggagagagtgagtattttaatgatccattgaaaacgtatgagtttctactattattaaatattttaaatgaagaagcgcttggattgacgtcttctattgaagatgtgcgtacgttgaaattccgttaccgtaatatgtacggcggggatccgtcaattcgtttagagcatttcattaatattttagataaatatggatggatctcaaaagggaaaagcaagattacgatgatggacgttgggaagcgaatgattgatgtgttaattcgcctagcaaacgattcgttagcgtattacatgcaagatgaaataacgaggtctttatatcaagcaaaccgtgatgcggatttaagtgaagcgtatgatgataaaggtgtatcgggcggaaataaattagcgagtatgataaaaaatgtagaagaagcggtagaaagactgaaagagagagaactcgaatatttagcggaccgctatgcgttgccgcaagtgcagattattcatcgtttaatgaatgaattaaatgttcgttttgaagaaaggttccaaaagtttcaaacgtttgaagaaagtcttgtgttagagcctcttgtgaaaagaggaacgagcgttatgtttgaaggttcacaggttagtcttggaacgattaagaagattttacattttacacatattcagcagtctacagtcggagcgaatattcgtcatgatgcgcttcgtcgttttattgaaaattgttttacgaagcaaaatatggaattgccagatgcacatgaaattttaagttttatggagcaagaccgtagagaaggcgagagacaagatgggttatggatgccagtacagtttgcggcgccgttatcaagtgctgcgatttctagtggtattcagtttttagaagagtacgagccatatacggatcatatagaagaagttgtgcaggaagaatatgaagagatagaagaaatgtcagaagcagaagtgaagaagctaatggcagatcagcagtggagtatgacgaaagagcaaattcaaacggaacgattagaagagtttcttatggaacaagaagaagtcgatatggaagagcttgtgcttgaagccggttctaatacgtggggagatgcggtaaatgcattaatcgcactgtcagctttaaccgctaataataaggcggatattatcgataatcaaaatgtaaaagaaagaaacatagaaaaagaatgggaatggggcagtgacgatgataaaagaaaacgagttcgaagccgagaaaggaattaa

SEQ ID NO: 51851 - DNA, 684 bp, Bacillus thuringiensis serovar finitimus YBT-020
atgataaaagaaaacgagttcgaagccgagaaaggaattaatccgctcgcgaaattaggagaacttcggtacatattgtctcgtgatgaagagcatacgtttatgcaacttttattttcatcttcagcgcgtatgagagcaacaaattttggattgcgccgcaaagaagtaatgaaaatgcttgggttaaatagtgaggatatagaagggtttgagtcatttgtaatgcgaataaatggtgcgctaagtggctattttcagtgtgtatatgatgagagacgtgatcaagtcattgtgatgatgcgagtaccagcaaaacaagcgagagaagtattatcttcagaaagtttaggattacttatgtttattttctaccatcaagaagtgttgcaaaatgaatttacattatttaatcaattacttagtgcgcttggacatgaaacgttgcaagcacgtagaaaagtacaaacaaatttagatccacttttaaaaattggggctattacgaaatatgattctccgtcccaagaagaagcatatgcgttaactgccattggaagtagaatgttttcagattcgttcttacatagggcggctgagtttagtcagtcacaacaacttcatatggatgatgttttaaaattctttaagcgttataacgtaggaggtggagagacgatatga

SEQ ID NO: 51852 - DNA, 3222 bp, Bacillus thuringiensis serovar finitimus YBT-020
atgattccataccgtatttctttttctggtatacgtgattataagccgagaacgatttctttaatggggaagcgtgatcacattttaatttcaggtgcaaatggtgccgggaaatcgacgctgacattttgctggggcgctgttatggcgtctacgaaagtaaatgtggaagggcttcgttcgaaaaatcttccagacaatagagtatggcgagcgaaaattgaacttatatatgaaaatgatggatttgtagatgcagcaagatttgtgagatttacgcttgatttagaacaagagccaggtcatccattgaaaaaagaatattatattgcagaaggcgatcgggtagatgagtgggagcaagaaacgcgtttctcatcttcagataagcattttaactttagagagtataaaagaatgcttcttcaaaaatataaaattgatccagatgcgttctatttaatttggtaccaacaagatgtaaatcaatttgcagtgatgaagcctgaagagaggttccgtatttttagcgagatgacaggaattgaaagtattcaaaagtcttgggagtctttcaaagaacaagaacgtgataaggaagcgattttgcaaacggctcgtaataaccaaattcaatataagttcgaacttgagcgttgggagaaagagaaaaatcgttatgaagatcaacaaagccgtataaaacgagggattctgcaatataaaacagcgttatgtacactagaagatcattattatacagaacgtatgaagtataaggatgagctagaagatgtgaaagagaatcttgatgagaagtatgaagaagctcagcaaggagaaaaacagtttgcacaattagaggcggagttactagcgaaacaagctgagtttcaaagtgcagaaaaagagcgtgaaattgccgaggaacgacaactacagtgcaaaaaggaaagtaaagataaagagcgagaatggaatgcaatgaaagaagagataaaagacgtaacagatcgcgtgaaaaatataggaattagtgaagatgttgtaagagcagaaaagagtagtaaagagcagcaattgcaagaagctgaaaaggaaaaggtatatacagagcagcttattagtgagacaagttataatttaaatgaattaaggtcagaagttgcgaagctagaagtgcaagtagataatgatgaagcagctgtcgtttctgcaaagaattacatagtgcaatataagtctagtttctatatggaagaaaagcatacaaaagtagaaagtatgatgagacagacgaaagatcttgttgaaacggtgaagaaagatcttcagcaaaaatacgaagagaaaaagcagctagagctaaatcgttacgtcagtccgaggcaagaagaaggacttagatacttaagaagggaagggttacaagcttatccgcttcgagacttaatagaattagaaggcgacgcagaatttcgtcatgaagatattttaaatacaattaaatatgcgatcttcgtagaatcaaaagaattcagaccaccgaatgatttgtattacgtaccgttgccactcattgttccaactgaaagtgttatttccttaccgcagtataagctgagaattaaagaaggagacaacgaaaaacttgtttctgtagcaatgaaagctttatggtgggtaaaacaattctttacaggtgagcagccatgtattcaaaagaatagtttaattgatataagaggattccgtggggaacaagaaaaaacggaatacattttaagtgaaaaagcaattatgcaacgtttagaagagacaggaaaatggattgaagaacatgaaaaacagctcatccaatatgagcgtgatattcaaacactggaagaaaaagaaagaaaacttcacgacattgtatataaactaagagatgcagaagccgttttacaaaaagctgccgaacgcacatttagaatcgaacagttagggcgaaaaacggaagagaaacaaaggctagaacaggaaatacaaaggctatatgcaattaaccaagaattgcatacgcgcatatctcgcttaagagagcgtcttgaaacgttagaacagtacgaaatgatatatgaagaactgcataaggaaaaagaaaaaattgcacatatgcaaaagcttgaacaaattcatagagagttattggatgagctcaagagagtagtagagcaaagagatatactggatgagacttgtaatagattggaaattgaatgtaataaagcgagtcaaaaaacgaaacaacaaaaacaagaagtagaagaactacgcgcgtatattcagcgtttagaaaagaaaaaacaagatgttcaagagcatttcataacgacagaagaaaaactaattagcatacaaagagaaaaccaggatgcgaatgacacgtatggaaaattattagagcaactaggttgggaaaaacaaatagaagagtggtctgaagcgaaagcactttctcaaaaacaaagcgcagagattacactagaaggagcactcggtgaaacagttgatccactagcgccagaaaattacgcgaagatgaaagaagaaaatgaaaaaagtaatgcagaactgcataacgcagaacaaattttgaacgaacttcgcgaaaatatagcacttatgagagaacgtctcgaaacgacgatccaaatgaatgctcataaaatccataaaaagtttgaacagtacatggaacaattccacttcgaaggaaaagtagaatggaacatggacacaaacaaacacggtgacatgcgttactatctctacataaaagcgcgtaaaaaaggtcaccgtggcaaaatggaagacattagcgccaaaggacgcggaggcaaagtaggaagcggcgtatcaggaggagaagaatccctttcatctctactattcgcactagccttactacaaacaatcgaagcatccccaggctacatcatcctagacgaatacgacagcgccctagacgacagccgaaaagaaaaagtcttcaccctattcgaagaggaactaaatcggaaaatgatcatcgtctcaccaaaaagtcatgatccaaactacttacaacacttctcgcaagcattaacagttatgcacgatgcgagtgtgccggttagtcgaattttgcagattaagagggcggtagaagaaactgaaactgtaatcaaggataactaa

SEQ ID NO: 51853 - DNA, 1257 bp, Bacillus thuringiensis serovar finitimus YBT-020
atgaatggtatacaatttgttcaattgtatgtaatgaaaagtgctgaaaagattgatgagttgtatataaaaaaagaacaaggtatcacaactctccccattataaagcagaccccgcgtaagattataaaaacagcggaacttctttttagtgaagaagaggtttcggatgtttctactactattacaaaaaacttttattcacctaatgtaaggaaaagagaaagtgatgttttaaagtggttaacgatacatgaaatgatagattgtatagaacgagggattttaattaaggaagttcgttttgagaaggatgggaaaactgtgcattccattttctatcgaatggggtacggtttgtttacatatatggaaaagaaacaacagctagaaaaggtaagagaggaagaggctttacagcaatggatgaagcgcaagcagtctatgccgaagtacataaatgagtatacggaaagattgtggcatgttttgtgcaatattgaaagtgatttgtcttctatagatgaaaaacgttggtcgtttcagaagacgtttttatttttagagtttttacttgctacatataaaatgagttgtgaaaagcgtacgtttgattggaaagagattggtgcggcgtattatgaagtgattggtggttctaaaaagtttgatcaacataaaaaagagtttcttaataagctggaagatttgttagatgctccgccgcattgtttaggtttagtgagcttagggacagtgacgcctatctttttttgcgggaatttatatgaaggtaatacgcgttatgagtgtgacacagtgcgttctttaacggatttagttgtatttcgtcatgcgtataaaacggatgcgaaggtgttatggctcgttgaaaatagagcggtattaacgaggattgccgcagaggatgattttatttcaagtacaggtagtctcgttatcggagtggatgggcaattacgtagtgggcataaaaggttgattcaaagcgtattggaccactcaaaatctattacgaaaattattatttggacggattatgatggggcaggagagattattagtgataagttattcgaactagttgctccatatgaacagtatacaagatggatttcttcagaaggtaaggcgttaaataaagatgaatttgagcaatccgttcgtttacgcgaaagtgaacaagaagagagtttaggaggtgtggatgcttggaaggaatggatcagtcagtaa

SEQ ID NO: 51854 - DNA, 1551 bp, Lachnospiraceae bacterium 6_1_37FAA
atggagttacatagaaatttgcttgaggagatccgggcggaacaagggcttcggatggagagtatgaaaaaatattatccattttttgagattgtcagtcatgatctgaagcagtttcaaaatggaaaatacaagtcgattgacataggatatgtgttgatggcagtgcttagaatgttgatcgaagaaaataattttaacaataccggagtaacttatacggactatttaaattttgtcattccgtttttggagagtgagtttgcactggactgtacaccggaagagtatgctcagcttgcagggtatgtgtttgataagataaaaaatgacggaaagccgttctcctatgaattttatgatccagaggagaagatccggaaggttgccagagtatggctgatgaaaagtcattttcaagaaggaaatatttattattacattacggagagtgggattgaattttatctgaacacaaaggagttcaaagaagaaagcaagattagtatacagcagcttctgttggagaagatgatccgcacccagaacttcaaaggcggtcgtgagattgtaaagcgaatctgcaatgaggtactcaaactgaaaatgcagaagagagaagtactgcaggtacttgtgcatgatttgaaaaacggactttctctctaccgggaattttttcaggagagtgtctgctggtttgatgaggaacacgatctgtttatgaaaaatacgaggctgattgccggggcaatgtccatgctatctccggttgatcagatcaaaaataaagaagagatctttttgctggatagcgaactgaagcgggcgatggcgatgcattcagagttattgagtgagtgtatggatttgaggagaaaagtcgacagtatggtagaacaggggacattaaacgcgattcgtccggttgtctatttccgtcagtttcttgagacggcccttaaaaaagatgatgtggaacaattgaaattgcttgcggagcccttgtttcaggcgaaaaagaagaagatgtttgatctgaagcggctggatgaaatgctggcattacgccgcggtatggatgaggaacgtgaggagatcgagtcagaggaagaggcggattatgtctatgatgacgaactggaagaacagcggatcagcagcaattaccggatccttgtgcgggaattgtttgcgatgttgaagaaaacagactgtttcacgctgcgggagtggaatgagcaattagaggtacggtatggacagaagatttttgcaaatggagattattattcgttcctcgtcaatctgtgccagaagcatgagattgtaattcgggatgcagtaagacacccggcgacaaattttgaggcagttttgaaacaatattttgaaatagaaggcaccgaggaagagttgcagatggatttttgtctggaaacactgacggatgaggaaccagttacttttctcgaatgtttttcggtgacgaacataagagtggaaaggatgaatggagatgacagagcagacgctggaaacagggattga

SEQ ID NO: 51855 - DNA, 717 bp, Lachnospiraceae bacterium 6_1_37FAA
atgacagagcagacgctggaaacagggattgagatttttgccagactgatcaatcaggaggcagtaaaatatcagggtgaacatacgaagctctatgaggcatatacgcagaatggagacatatttgatacggtaaataagattacaaaggcgctgaatctggagatttatgattaccggggagggttgtatctgacaccgggagaatcgaatcatgtttttggatatacgaatgaagaactaaaggagatgatcggacttcggctcaatcgggagttgtttctttgctacttcattatttatcacatcatcacaaaattttatacagattcagcgacttatacttatcaggagtatgtcaaggttccggaaattgtggaagcagtagatgcttcttttcaagggttggcggagaaagtggagacgcttgcactgacagaggtggaggaatacagttttgagcagatggcgcttgcctgggatttgccacttctcaccaatgaggatagttccgtgatccgtgcagaaaaaggttcccgggcaggaatggtaaagaagacatttcaatttctgatccgtcaaggattgtttctggaagtggaggatcgatattatccgacagaccgtttttcggcgctgatcgagagttattttgagtcggagcagagtcgtatttatgagattatgacaggaggtagagacgatgccgcatattaa

SEQ ID NO: 51856 - DNA, 4413 bp, Lachnospiraceae bacterium 6_1_37FAA
atgccgcatattaacagaatccgggtaaacaacatcaaatataacgtgggaactcagttttatgacgacttgtgccttcggtttcaaggaaaaaacagcctttatgatctggcaaatggagggggaaagagtgttctgatgcttctgcttttacagaatctgatcccaaactgtacactggatgacaaacagccggtagaaaagttgtttcggggaagcaccgggagcagtgtcatccactctttgatcgagtgggaccttgacaggccggatcaggaagagtgtggatttcggtttatgacgactggattctgtgcacgaaagaaggcagatcggatcaaagagggggaggaggaagtctcatcttcggcgattgaatattttaactactgtattttttataatgagtttaatgcttatgatattttaaatcttcctcttgtaaatggaaaagagcggattacctttaaagggctaaaagaactcatcaaacggcttcaggccgaatcaaaccggaagctttcagtgaaaatttttgaaaattccaaaagtgaatatcaaagtttcattgcaggccatggattatatgagagtcagtggaacattatccgcgggatcaataagacagaaggtcatgttcgtacttattttgagagcaattataggacaagcagaaaagtagtagaggatcttttgatcgaggagattattcaaaaggcataccagcttcaaaccggtaaggaaaaggatgctgaagaactggcacagacactgttggatatccgggaacagatggtagaactgtcaaagaaaaaggagcagatttctaattacgacaggcagattacggtgattcaagagtttctgacaaagtttgagccattgttacagaactttgaactgtgcagggaaaatgagcagaagacaagcgtattttatcatacccttcttgatgaaagagagcggattgaggcagaagcggagcaattggaggaagcgctgcagaacatgcaggaacaacagcaggaaacggagcgaatcttgttgactttagatctgcaggaactggaatgtcatcttgatgaagccaattatgaaagagaacagaaggaaaagcagaaagagcagttgaaagaggcagtcgaagaattaagacagactgtgacagagaaagagtctgtccaatattttcttaattacgcaaaagcacagtcgcgggcacatactatcgaggtagagatggagcggatgaagcagggaaatgaggaactctaccagtctttgctggagatgactgcccagaaaaaaagaaaagatgagcagatttttgaacagcttaacaggcagaaagatgaggctgagaaaaatcgagagacttccagaagagaaaaggaagaggcagataaaaaggagcgggaaagcgataatgcctgcgctgtattagaaagccgtcttatagaaaatgagaaagagcgcaccgctctgcaaaaagaaatcggcgaggggatgaaagcattcccatttcttctccgggagcagattaaggatacgatcatagaaaaagaaaaggaagaggatgccgagcgagagtcgaagagaacgctggaacaagagtgtgagacgataaaagaacagcttcagtcagacaggctgatggctaaggatctggagcatgaggcaaaggaattgcatacaaaagaggaggaatgtcaggcacagttggcaatctatgaggagctgacagaaaaagtagcacagagaatggaagtatatggcgagaaagatgtctaccggttactggagttgttaaaggagaaacagcgggagacgattattttgctccatgatggacagaaccgtcagtcagaactgcaaaaacagctggagcagcttcaaaaaggaattttattccaggtaactccggaagcagagcagctgaaagagtttctttaccgaaaatacggggatggagtgcttggcacagagttgttagagcagatgcagggggagaaaaaggaagaggtgcttggccggattccatacttgccgtacagcattgtcgtcgggcaccggatctacgagaagatccttgcagaaccaaaaccggaagagtggcagaatgtaagctggatgatcccggtcgtggatcagacatatctggagcatggacagtttgatgcaggggacggagtgatgtttgcaggaaaagaagctgcgtattttctggaaaaagagcagctggaaaaagaaatacaccggacagaagaagtattggatctggaacataaaaagcaggaacagttgagagaacaacagaaagtgctgacagcggacacagatggcgtgcaagagtatgtgacaaactatttcgaaaactatgccggctggctggaagaacagcaggagagaaaagaaaaaagagcacaggtgatggaggcacaggaacagttaaaagagaaggaaaagaaactgtgtgcaagagctgcagagctggagagaaagattcctgaaagtgcagcaaagattaagaaactggcagaggagatcctgtccttgcaaaggctggaggacatatttagaaagtcagatcttgtggaagcaaatcaaagggagtggaaggaaaagaaagcagagctggaactggaaaaggaagcactttggagactggtgcaggcaaaagaacgggagatttctgaagcagacggacgaatccggcagattacggcacagattatggaacggaagatgggatgggagagatatgctgcctattataaagaagagattccgatccaagaaccgattccggaacgtctggaggaagagttggatggtgccatcgcagcatttgaaaaggaaaataaagatgtaagagaaaaaagcgagacacttcaggtcatccgggaacagattacatcctatctgcgagaattaagaagcagaaaggcagatgtaaagatgctggaacagctctatgaggagcagaaacttgcggaagtgtccgacgaagagattgaggcgcagaaagaacatctgatggaggaagagaagctattacaaagatgtgagaaaaaagtatcggagctggtacttgcatgtacgcgattccagtcacaggcagatgtgatcgccgggcagatcagggagagattctaccgaatcgagcggctcccgattgcagcagggacgattgagatagagaaggaacggcagaaagagctacaacagcagtgcaagagagaactggcagaattgttccggaaacagaaggaaactggaaaagcgcaggaagaaatccagacgatgatcggaaagattacatgggttgcagaagagtatcacatcaaagatatgtccgtcaagacacttccaggatttgttatcttagactggaaggaaaccgagcgtcagatcatgagtggatggcagaagatgaaagcgagaaaaacagcggcagaaactgcatttggcaaggcaaaggcgtggtgtgaagagacgctgaccggacttggcgcaggaagttttgcactgcagatgaaagaacaaatcccggttccgcaaagttttgaggaggcagataagacgattaagcggttggaagaagcatgtgtgatgatccaaatgggaagagatcagattgaggaaagccttcgtgatatcgagaagattaaaagtagttttgaaaatcaatgtttacagcggtgtaatacgatccgcatggaactggataagtttccgaaactcagcagtattatgatcgatgagaaactgacgcagattgtccggttgaagattccatatgtgagagaagagcagcagcaaatgcagatttccaattatcttggacaagtgattgaaaacctgggaaaatacgagaccgagcaggaaaagaaaaaatatctcattcaagaactgtcgatgaagcggatgttctcggcaatcgtcacagatatgaaccggatcagtctggaactttacaaaagagagcggatcaaagaacagagccgccacctaagatacgaggaggcagttggaagtaccggacagtcgcagggaatctatatccagtttttgatcgcaatcatcaattacattgcaagtattcattcctaccatgcaaatgaggagtctctaaagaaagtaatcttcatcgacaatccatttggtgcggcgaaggatacatatatctgggaaccaatctttgcgatgcttgcagcaaatcgggtgcagctgatcgtgccgacaagaggtgcgacaccggcgatcatcggcaaatttgatgtcaactatctgctcgggcagaagatggtcggacaaaaacagcagaccgttattgtagattatcgcagcaagatcgatgtagaagaagctgagtatgtaaaaatggaatatgagcagacaacactgttttaa

SEQ ID NO: 51857 - DNA, 1032 bp, Lachnospiraceae bacterium 6_1_37FAA
ttggaagcgtttgttcaggagggagtgctaagtccggtgaaaagaagtaagaaaccaggatatctggcgacggtctatgaacggtatgagattgtcggcaataaagaaaaagtggtggaagatccggaatatcttgctcttttgcattcatatgtgggcacgaaggtgcttgaattttataagagaaaccggagagcgtttgagcaggatcgggaagcgattgatatactctataactactattgcaggatagagaaagtatggatgactgcaaatgaacttggctattacctgttcggggatgagaaagcattcgaacagccggagggagaaaaagagaagcaagcgtcagatgagcaggaaatgagtacggaaaaggatggtgggggaaggcacaggaaaaaggccggagcttacacgcatctgttaaatcggatgggatttgacatagagacggatctgcatgctttctatacgaaagagccatttatttgtcaggtgcgcccctctttttttgaaaagaatatcaggaaaattttgattgtagaaaataaagatacgtattttcggatcaagaacggaatatatggaaaggaatatgattgtgtgatttacggggaggggtggaagattataagagccttttctctcgcagaagaaactggtataatggagacagatatcatagaatattttggagatatcgatcccgaagggtttgcgatttattatgaattaaaaacacagtatgcatcgtattcgatccggctgaagatggagttttatgagaagattttagaggcagtcagaggaagtgagagaaagcccgggaaaatcagagggaagattcagaatcgggcgcgggaggtactaccatctgcccttcaggaatttgatacagagacagcagattttttgcagagaatgatgttgaaagatctgtgctatatcccgcaggaagcactgattcttgtcggggaagcagaggtggaaaatactacaaggagaatcagaagtaatggagttacatag

SEQ ID NO: 51858 - DNA, 1566 bp, Pseudonocardia dioxanivorans CB1190
atgacgggtgcgtacgggggcgtggtctcgcccgccgccgacgcgtccgcacgcgaccggtggcgggcgctggcgctgaccgacccggtgtcgcggctggtccgcaacgccgcccacgccggcatcgacgacgacgagtacgacctgcggctgctcgcgctcgccgcggtggacatcgtcgtcggatcgatggggttcgcccgcgaggccaccctcgacgacgtggtcgacgagctcgccggcctcgccgcccggatggcgccgcaccggcccgaccaggcccgcgacgtcgcccagacggtcgtgcgcggactgctcaacgacgcccacgagcaacgccgcttcacctaccgcttcgccgacctcggcgcgcccggcgagcccgcgcgctgggaggcctacagcttccggctgctgtcgctgcgcgaggccgagtacgggccggtcctcgtcgcgagcgaccaggcggtgacgttgttcctgcacgggctcgacgtcgacctcgaggacgccgaccgcgcgctcgcccacgtcctgcagcgccagctcgacgaccgccggttcgacgcggccgcgcgcaccgccgcccaggcggaacggacgagcgtcgggatgtcggcgatgctcgccgagctgctcgacgcgacgcggcgcgacgtcggctcgcacgactgggagcgcgaggtccccgagcggctgctgcgcgcccgccggcacgtcgagtcccgcatcgccgaggacgaccggctgctcgagcacgtccagggcgggctcgacgccgagacctcgccggaggtgcgggcggtgtcgggccggatcgtcgacctgctcggccgggcccggcaggtacacctggacctggagcggcggctggtcggcgcgcgcgaggtgttcctgtcggcgcaggtgcgtcagcggctggcgcggcggcgccggctgcggatgctcgcgctgcgcgaggagctgctgctgccggtgctggagctgccgcgggcggaggccgccctcgtcgcctccgcgttcgccgaccgcgcgctcggggtgagcgtgccgcggctggtccggttcgacgacctggtcgacgcgctgtgggcgccgccgcgggcgcgcgaggcggccgagccggagatcgagctcgtgcccgacgtcgacgtctccgacgacgtgcagcgctaccccgagcaggtcgtggcggccgcccgcgaggtgctgggagccgccgcggacggcgaggtccgcctctcggagctgctcgccgcggtccccgacggccccgacgccgccgaggtcaccgagctcgtcctgctgtcggcgctgtgggcgttcgcccccgacgtcgcggccgaggccgagggcgaggtcgccgccgaggtcgacgtgctcgcgggcgggatcgaggccgagcgcgccgacgagctcctcgacgtcccgggtgtcggcgggcccgacctggtcgtgcgcctgcgcggcggcgcgaccggggcgacggagacgcctgcggagcctgccgacgtcctgttcgtcgacgtctacggtgacgcctacagcagggagaccgtgtcgtga

SEQ ID NO: 51859 - DNA, 4521 bp, Pseudonocardia dioxanivorans CB1190
gtgagcccggccgtgcccgtgatgtggacgatgcgccgcgtccgcctgcaccggatcgggccgcgcgccgcgcggttcgtcgacgtgaccctcgatctcaccgacgccgacggccgcgccctgcactcgatcctgtggctgcgcaacggcggcgggaagtccacggtcctctcgctcatctgcgcgctggtccgcccgcaccgccgggacttcctcgcgacgtcctcgaccggcaagcacctcgaggactacgtgctgggctcggacaccgcgcacgtcgtcgtcgagtggtcggggccgggcgggcagacgctcgtcaccggcgcggtctacgagtgggccgaccgcgcgcagcccgccgaccccaaccgcgaccacgaccgtctcggcgcccgctggtacgtgttccgggcccagccgggtacgcggtcgggcgcgtcgctggacacgctcccgttcggccccgacgacgccccgacgccgttgcgcgacttcgtcgccgcggtcaagcgctgggacgcgatcccgaactgcggcgtcgccgtgaccgactcgcaggaccgctggagcaggctgctcgacgagcacggcctcgatcccgcgatcttcaccgcgatcctgcagatgaacgccaccgagggcggcatcgaggggcagttccagttccgcgggcccgaccagttcgtgcggtacctgctggagctgatcgtcgatcccgaagtgccgggccaggtctcggacatcctggagaaggtccgcgagggcctggccgcgcgcccggagatcctcgccgacctggccttcgccgacgaggcgggtccgctgctcggtgagctgtccgcggcccgcacgacgcacgccggggccacggccgcggtcgcggccgccgaggccggcgccacgaacctggccaccgcgctcgccgccgccgccgcgcgggccgaggccgcggccgcggagcacgccgagcgggtcgcggagctgaccgcgacgggcgccgcgcacgagaccgccgcccaggaggctcgggtgcgggaggtcgcggcgcgccgggcggccgccgcgcatcgcgtccgggccgccgagctgcgcgccgacgggctcgcggccgagcacgcgcgcgccggtgccctcgtcgcgggctggcacgcggtcgcgaccgtcgacgcggcgcggcaggcccgccggcgggtccgctcgctggaggagcagctcgcggctgcgacggccgaggccgagcccctgcgcgcccggcgcgacgcgacggccgccggctacgcccgcgccctcgacgcgagcatcgccgccgtcgcggcgcgcgtcgcggcgctcgacgcggaggcctgcgacgccggtgcggccgaacgcgccgcgcggacggcgtggcaggaggcgtcgcagcgccggggcacgctgaccgggcggctcgccgccctcaccgacgccctcgccgggctcgacgccgatctcgccgccgcccggagtctcctcgccgggtccgggtccgggtccgggtccgggtccgggtccggggatctcggtgccggggtgacggtcgccgcgggagggagcgtcgacgcggccgcggtggaggacgccctcgcccggcacgaggccgtcgacgccgaggcggccgacgagctcgaccggctcgccgccgagcgcgccacgctgcgcgagcgccgggccgagctggccgccgcggccgagaccctcaccgcacagcggcggaccgccgagcgcgccgcggaggcggccggcgaccgggccgtggagctgcgcggacgcgtcgccgacctcgcgtccgacgaccggctccggggtctcgccggcggcaccgacgtcgacccggtcgccgaggcgggcgacctcgtcgcgctgctcaccgccgccgtcgcccgggccgaacgcggtcgcgtcgagctcgccgtcgccgacgccgaggacgagcgtgcgctcgccgcgctgggggccgaccggctgctcccgcccacgctcgacgtcgtccgtgcgctcgacgtcctcgaccgggccggcatcccggcgaccacgggatggcgctaccttgccgactccgtgcccgcgggccggcgcgccgagctgatgcgggccgcgcccgccctcgcgggcggcgtgctcgtccacgacccggccgacctgccggccgcccgctcggtgctcgacggtgccgcgctgcgcccgacgtcgccggtcgtgctggccaccaccggcgacctcgacgccgcccacggccccgcgaccgggcacctcgtcgacccggccagggccctgaccgaccgcgcgggcgcgggcgccgagatcgacgaacgcgagtcggcccgcgccgcccggtcggccgcggacgccgagctcgtcgccgcccgcgacgccgacgccgaccggcgtcgccggctcgaacggctgcgcgtggactgcccgcccggcacgctcgaggccctcgacgccgaggtccgggccgcgcgggacgccgtcgcggccgccgacgccgacctcgcccggatcgcctctgacctggcctccgtcggggaccgcgaggccgacgccgacgcccggcgcggcgatctcgaacgctgccggcgcgacgccgccgccgcgatcgcgacgctcacgcagctgctgccgcgggtgcgcgaggccgccgaccggagggcggaggcggcggcgctgcccgcggagatcgcggacctcgacgcgtcgctcgacgccgccgtcgcggccgaggacgccgcccggaccgcggccgccgcggccaccgggcaggccgatgtgttgcgtcgcagcctcggcgagcagcgggagctgcgcgccgggctgtccgaccccggatccgaccccgggccgggcgccgggtcggagggggagccggtcgcgctcgacgaggcccgccgggcctgggagagcgccgaccaggcctaccggcgcgaggtgtcggagtccgccctcgcggcgtcgctgcaggaggcgacgcgcgcgctggccgacccggcggcccgggtcgcggacctgccggaggtcgtgcggcagcgtgccgaggcactgctcgacggtcccgacggcaccgacgcgggcacccgcgcggcggcgatcgtccgggcggagtccgccgccgccgcgctcgcgacgtcgatcggcgagctgcgcgcggagctgcgggaggcgaaggccgagctggccgggctcgccgagccggcggcgcagatgcaggtggagccggcggagcaggccgcgtgtgacgacccggacgcgctcgacgccgcccgcgccgacgcgctcgccgcggccgctcgggccgccaccgaggcgggtgagctcgtcgccctgcacgcggccgccgggtccgccgcccgcgacgccgacgcccgccgcgccgccgcccgcgaacgcgcgaccggtctcgggcacctgctggagctgctgggcgtcgaccccggcaccggccccggccccggcatcgaccccggccccggggacgtcggctccctcgacgacgcccatgccgccgtcacggccgcccggggccggctcgacggcgcggtcgccgtcgcccgccgcgccgcgcgcgacgtcgaggccgtcgcgcaccggatcgcccggtgggcgggcgccgaccggttcgccggggtgaagtccgacgtccgcgaccgcttccgggtcgacgacgtcgcgggcgagctcggacccgtcgccgacgagctcgccggatcgctcgcggtctacgccgccaacctgcgcgaaaggctcgccgagctggaggagcacaagggcgtcgtcgtcaccgcgatgaccggcatggtgcgccaggcgctgcgctcgctcgcccgcgcgcaggcgctgtccgagctgccggagtcgttgggggagtgggccgggcagcggttcctggaggtggggccgcgctcgaccgtcgagaccgccgacgccgtcgtgcgcgaccgttgctcccggctggtcgacgcgctcaccgcccgcggcgcggaggtgccgcgggggttggagctgctgtggcaggccaccgacgccgtcgtcggcgacgggaactggaaggcgcgggtcctcaagccgtcgacgacgttcgcgatcgagcgggtgtcggtggagcggatgcgcaagtggtcgggcggggagaaggtgacgatctcgctgctgctgttctgcatggtcgccaaactgcgggccaccaaccgtggccgcgacgtgccggggctgggcgccctgccgttggacaacccgctcggcaaggccaactacgtcgtgttcctcgacctgcaacgcaaggtcgccgccgccaacggcgtgcagctgatcttcctgaccggtgtcggcgacctgaaggccgtcggccgtttcccgaacatcatccggatgcgcaacgtcgcgggccgggggcggcagtacgtgcggcaggaggagcgcatcctcgcgggcgacgacccggccggcgtcgtcgacaccacccggatctggcgggaggacccggtcctcacgctgccgctgggatga

SEQ ID NO: 51860 - DNA, 1080 bp, Pseudonocardia dioxanivorans CB1190
atgaccaccgtcgaggaggacgagtccccggagctgtcgccgctcgccgccaggctcgccggcgtcgtggccgcgtcgcgcaccggccgcatcgggatcgaggtcctgcgcggcgccgcccacgaggccgacccgagcctcgcgggtgcgccggacggccgcgcccggctgcgcgagctgtgcgacgagctcgccggtgcgggcgtcgtccggctgccgcgggtcggcggcaccggctgggacgcgctgccgcgcccggcgttgccgcggttcgtcacccgggtcggccggcccggtctcgtgctcgacccgccggacgtgcgaccggccaccgcgaccgcctggcacgcgcagctgcgctgggtgccggcgttcctgcgcgacgaggacccgtccgatgccgaacgtgccctgctcgacggcgtccagcggctgctcgccgacggcggcccgcgcgacgtcgtcgcggtgcaggagcggtcgctgcggctgaccggtgacgagcaggccctcgacgcgctgcggcgtggccggctcttccggcccggccggctcacccccgagctgctcggcatccgccgcgcccgctgggagcccatcacgcgcaccgtcggggacggcaggatcaccctcctcgtcgagaacgtcgcgacctgggagtcgctggccgacgcgctgcccgccgacggcgcggtcggccgcgtggtgtgggggatgggcaaccagctgtcgacggtcctcaccgccctggccgacgggcccggccacccgggcgagctgtcgtacttcggcgacctcgacgtcggcgggctggagatcgcccggcgcggcgccgagaccgcggagacgctcgggttggcgccgctgcgggcgtcgacgctctacacctggttgctcgacgagggtgtgccccagccggggagcctgcccgtcggcgacgtcgccgagctcaccgcatggctgccgccggtgctgcacgagcccgtggcggagctgctcggggcgggcgagcggctggcccaggagtggctcggccgtgagctgctggccgaggccgacgacctgcgcgacctgcgctga

SEQ ID NO: 51861 - DNA, 1500 bp, Streptomyces griseoaurantiacus M045
atgaaggcgctggcggtggtccgcccgctactggcgctcgacagcagcaaggccaaggccgagcgggggtgggagggctaccgcctggctgagctggcgctggctgcgatcgatgtcgtcacgctgcgcacggacatgcgcacggcggtccgccaggagacggtggtggaccatgtgtccgagttcgccgcgctgcagctgccgggacgcccggctgaggagtaccgggccgtcgcgcgctgggtgaccgaacggctgatcaacaccgaggagcgcgaccgggcgttccgtcacgcgatcggcagcgtgatggacgaggggttccagacccgtatgacgtcgttccagatcctcaaggaggtgcctgaccatgtggggcaggccgcgctgattgccacggatgcggcgatcaccgtgctggtgcatgccatcgacgtggacatcgcttccgaacagatcgctgccgaggccaagttggaggcgctgctcaagcgtgcccgtatcggcgaggcgtggcagatcgcgcacacggcccgtctgcagagcatccgttacgccaaggacatccatgggcgcatcgaggcgatgaagcggaacgtgcgggcggtggactgggatactgaggtcaaggagaccgtcgacgatgccctggagcacgtccgcagccgctccgcgactgagcagcagctcaaggagcgagtcgaccagctgctggaggtcactgacgacgcgcacaagcgtcgacagttggaggggctgggggcgctgatcgtcgaatgcatgcaacggcattcggtgcttatcgacatgctgttgaaggtcggcccggagtaccggcgccaacaggaccgccaggtgttcgtggccccgacgctgcacgcccgggtgcacatgcacgagcagctcctgcagccggtgatggaattttccctggatgcctgcctggaacccttggaggcgttcaccagggccctcctgggcccgcagcagccccgcgtgatgtatctgccggactatttcgaggccctggcccgcgtcagcgaatcggccgcgggggacctggtaccggttgcacaggacgacgacccagacgacagcgagcacacggccctgttcagcgacgcgcagcacgaggcggtggacgccctgctggacacggccaccgaccagggagtgcggctgtccgcgctgctgggctccgcccgcctgcctggccccggcatgggtcctgaatccggcacggacgcactcctggcgatgcgcgtgcagcagctcttccggcgggtgccggtgcgtcaactggccgtcggtgagcctgccgtcgtggctctcgacgacggcaccgagctggtggacgaacgcttcggcggcagcgacttcctgctgatccgcgcccaatcgcagccctcggtcccacccggaccatccgatgcccccaccgacaacaaccggctgtcgtcggtgacgcccatccccgaccgtgaccaggagagcgcgtga

SEQ ID NO: 51862 - DNA, 4461 bp, Streptomyces griseoaurantiacus M045
atgtatgaactcaatcggattctgctgcgcaatttcggcccggtcgacgcacggtacgaagacgtcaccctggacttctccggcgccggcccggaggtggaaaccgcttcgctgatcccggccgccggccatgtcacccaccgcccggccccggccaacctgatcatgctgcaaaacggcggcggcaagggcgtactgctgaccggcatcacctgcaccaccatcccgcaccgccaccaggatgtggagacgctgcgcaacttcacggtgtccctggcacagccctctcacgtggttctcgaatgggccgacgcgaggaccggacgcctgctggtcaccgcccagatcctggcgccggaccgcgaggggaaactgcaccgccgcttttacagcttccacccggccgccgccctggacgccgaccgtctgcccttccaccgcgacgggcactggctgccgttcgaggactattgcaccgagttgcgggacgtacagcgccgcgtcgacgccctggaactgcgcatcgaggacggccaggaacgatgggagaaacaccagcgcaccctgggcctgcagcccgatctgttcgacgtgcagcgccggatgaacgccaaggagagcgacgcggcggcggcattcaccaccaccacatccgacgcctttgtggactggctgctacgcaaggccaccgacgacgaccagtacgccgagctgggcaccgccttccactcctacgcccatgcccacgaccagcgcgccgcatgggacaaggaacgacagttcgccctgaccatgcagcgagcctgtggggaggtcgccatccttcaccagacccggcagaagaccgctcacgccgccgagagcgcgcagcaacggctcgtgcacctgaccgccactgtccagctccgcgagcagcaactgtccgacgcgctcacggtccacgccgacgccatcacggacacctaccgagcgcacgaggaggcaaagcgggcagccgagcgggccgagcagcgcgtgcaccacgtacgccatcacgccagcgccctcgaactggccaccgtccgggcaaagcagcgcggcgccgagcaggacaagaaggagaccgaagccgaaaagtcgggctgggagacggtcccggtggcgctacgccatgcgcatgctgtggacgatcacacccgcgcccaggaagccctcagccaggcagagcgcaccgccgcgccctacctccgggccgtccaccaggcagcagccgacctccgtgctgggtacgcccgcgccgaggccgccgcccaggacaaggtccgccgactggccgaggccaaccagcagaccgagaccgacatcgagcagtggcagcaccgccgcgaacagctccttgaagacaccggcgcggcccaggccgatctccgcacgctccgcgagcagatcgactccttcaccaccacgctgggtcgggcgcgccatgaccggctcgtcgagccggacgaactagccggggacgccgcggcccgcgccgaggcgcacacccgccacctcgaccagctcatggacgaggccaaacaagcacgtcagactgcccgcaccgggcgggaccatgcgcaccggcacctggccgacacgcagcggcaggcgctgtccgaccgtgccgcggctgatgcggcgctcgcccagaccgaccggctgcgcaagcaggccacggcggtccagtccctgccgctgtgcgccgacctcctcgaagccacgcccgacgagctgcgcgccgccgacgcgttggaatggctccatgagcatgccaccgtgctgggggaggccgccggacgccgcatcgcgaacctggagaccacgctcaccgggacccgcctcggcctgcgcgaggaccaggacctgctcgacgtgctcgatacgagcgggggcctgcacccggccagcgctgccgtgcggcgcctgtgtgaggaccttgtcacgcacggcatctcggcctggcccggctggcggtggatgcacgacaacgtgcccgccgacgcccacccccaggtcatccgcgcgcaccccgacctggtcggcgggatcatcgtgggcggcgccgatggcctggacgccgctcgccgccacatggaacaaacccgccccctcccggccgccgccgtgaccgtgggcaccggcgagcgcctgctgcgcccgggctcctgcgacgacgaccgcttcgtaatcgagccctcccccgccctgcacgacgaagacgccgccgaacgcgaacgaggcgaggtcaccgcgcgcatcacggccgccacccgccagctgcaagacctcgatgcgcgcctggcggaggcccgggagctggagcggcacctcgccaactggcttgacgcctgcgcgcagatgcccgtccccgaccgcctcgctcagctgaacgacttgcagaccaccgccgccgcgtccgagaccgccgcccaggaggcccgcgacgcggccgagggtcacgacgccgccctacacgaggcggagcaggcgtacgaggtcctcgtcgaccgggccggtcaagcccagcgcgccctgcacgtcctccggcaactggccagcgccgagaccgaggccggccaggcccgcgaccgcatctccgccctgaccgcgcagtgccaagagtggcggaccgaagccgacgatttgcgtgccgcgtgcaagcgggccgaagcggagctgctgcgccgcgcccaggccatcgaagccgcccggcaggaggccgacagccatgccgagagccgtcgggccgtccccgccccgcccggcggcgacgcggctatcgaacccgacgcaccgcacgagcctctccccgtgctcaagcaccgctacgagcaggccctggacgagctgcgcgccgtccaggtgggggaagaccagcagcagcgcgccgcccgcgccgaagaacaccttctgacgtgccagagggaatggaaccaggtgcccgggccgattcaggcgctcgcccagaagttcagcgcggacccgcgggccaccgacgaggtccaacgccacgccatcctgcgcgacgtggccggacagctcaccgacctcgacgaccggctcaacgcactgcgtgacaaggagagcgagctgaaggtccgcaccgaccaccttaagtccgccgccgcggcagcaccgctgaccggcgaggaggccgccgcctggacgccggccaccctggaggatgccaccgccctgagtgcccgcgcggcacgggagctggaggaagcccgtaccacggagcgcgccgcgtccgaacgctacaacggcgcccgccgcagccaggccaacagcagccgcgaccttgcggcgttccggtccgtcctgccgcgcctggaaagcgccgcccacggtctcgacctgcccgccgccgcggagccctatccgggcaccgccgaggctgccgagacagaggcccggcaggccaccgaggaataccgcacctgccaccaggctgcccgcgacgccgaccgcgctctggaaaccggcgtcagccgcctcaaagaggaggccgccgacgtccgcttcgaaggactcgacatcccgctgcgcacgcagatctccgccctgggcggcgcgaagattcctgccctggctgagaactggacccaggcgctcggctcccgcatcgccgcactgaccagcgacctggatgccatggccaagacccgcgatgccctcgcatcccagctcggcgcccacgtcaccgatctcctgcaccgcctcgaccaggccagccgcttctccgccttccccgacggcgacgcaccctgggccggacagaaattcctcaccatccgctataagaaacccgaccagcagcccctcgccgccgcgatgcgcgaaaccgtcgatgccctcgcccaaaacccccgcacccgcaaactcaaaggcatcgacgtcgtcctgcgctgcctcaaggaggccgtaccgcgcggattcaccgccgaggtcatgaagcccaacgccgcccagcggatcacccgcgtgcccgtggagaagatgggcaccaccttctccggcggtcaggaactcaccggcgccatcctcctctactgcgccctcgctgcgctgcgcacctcacccggcccccgcagtcgtacccgcaacggcggactgctgctcctggacaaccccatcggccgcgccaacgccacctacctcgtcgacctccagttcgagatggccgccgccctgggcatccagctcatctacaccaccggcctgagcgacgaggaggtcaccgcccgcttcccgatgtgcatcccgctgcgcaacgacgccgaagcccgcgccggcctgtccctgatccgcctcgacgagcgcattcgccacgccctcgtcccctcccctcgcatcgtccccgacgacagcgccgccgtcccgtccggctacctccactccgcacgcctgcacacgaaggagacccccgctcaatga

SEQ ID NO: 51863 - DNA, 969 bp, Streptomyces griseoaurantiacus M045
gtgtcccgcgccaccctcgtcgaagcatttaccgcagccctgcccggcctggccagtggcgagcacgcgcgcacctcgctcgccacacttctgcacgaactcgccgaccaccgcctcctcaacctgcccaccagcagagcccactgggacgccggccgaccacgcctgcccgaacaagtacgcctgcccgccaccacccaggcgacgccgcgtgcaccgcgtgaacccgtctcgtggcgcccggaactcgactgggcctacaccgcccgtctcaccgccgcacagaccgaggacctcctggcgtgcaaccgctggttccgggacagcagcaacgccgccgaccggcgtacgccgatcccgctgcgcgagcggtcctacgagatcttccgcgacgagaaacgtctcgacgccctcatctccggcgcgctgttcgcccccgggcgcctcacccttgatcagctggccacctaccgccagccgcccccgctcgcccaccaccaagtcggcgacggcgacacccttctagtggtggagaacagcgacacctacgccacactccacgacctgctctccaagcagcccggccgcacgcggttcgtcgcctttggagccggacgttccttcgaagcctccgtcagccgcctcacagaactctccggcatccaccgcattctctactacggcgacctcgacgccgacggcctggccatccctgctcgcgcgtccctcaccgccctccagcacggcctgcccccgatcgaaccggcaactgacctctaccgactcctcctcggccacacccccacgccctccgctctcgttgccgacgaccatgccgagacgctcactgcctggctgccgccgcccctgtccacacaggcccacgatctactcaccgccggccagcgcctcgcgcaggaagcgaccaatcgcaaccagctctccatcgactccagttggcgcacttga

SEQ ID NO: 51864 - DNA, 1632 bp, Selenomonas sputigena ATCC 35185; identical to SEQ ID NO: 51777

SEQ ID NO: 51865 - DNA, 756 bp, Selenomonas sputigena ATCC 35185; identical to SEQ ID NO: 51778

SEQ ID NO: 51866 - DNA, 4413 bp, Selenomonas sputigena ATCC 35185; identical to SEQ ID NO: 51779

SEQ ID NO: 51867 - DNA, 978 bp, Selenomonas sputigena ATCC 35185
ttgaagcgtgtatctttggagcagctgctcaagggacggtcggcggctccttacgaggagcagtaccgcttcatcatggggcttctggcagaggggcgcatcaagccgctgaagagcccgggcacgaacggcaagcggccggccctgcacctcgaatattggctcagcgaggaagcgcccgattatgcggcgtatcgggaggagcttctctaccgcacgatgccgcgcctctcggtcgactattacctgcgccacctcgccgtctatgagaaggagcgggcggcggtgcgcgcgctgcacgatttcctgcagctgcacgcggcaaagctcgggcaggagatttcctgcaacgagcgcagcttccagatctggggcgaggagaagttcctgctgcagggcgcgggcaggagcgtcttgaagcactgcggcttcgaactggcgcagctcaactgctacaggacggcggagcctttttcctattacgcacagcacagggaaacgccgcagaagatactcatcgtcgagaacaaggacacgtttttcagcatgcggcgccacttgctggcaggggcgtcgtctcttctgggcgaggcggtcggcagcttgatctacggtgcgggcaagcgcgtcgtgagcagctttcgcgagttttctgtcagcgcggagccgtatatgaaggaggaggcgaacgagctcctctacttcggcgatctcgattacgagggcatcggcatttacgaaaatctcgccgaggctctcgccgcgccatggacagtgcggccttttttggcggcgtaccgcgccatgctcgaaaaggcggcgggcatcgctctgccgcagacgaaggagaagcagaaccggcatatcacgggcggctttttcgcgcatttcgcagcggcggacgtcctcgccatgcagcagatcctggagggggggcgctacatcccgcaggagatattgcacttggaagatttttga

SEQ ID NO: 51868 - DNA, 1551 bp, Lachnospiraceae bacterium 9_1_43BFAA
atggagttacatagagatttgcttgaggagatccgggcagaacaagggcttcggatggagagtatgaaaaaatattatccattttttgagattgtcagtcatgatctgaagcagtttcaaaatggaaaatacaagtcgattgacataggatatgtgttgatggcagtgcttagaatgttgatcgaagaaaataattttaacaataccggagtaacttatacggactatttaaattttgttattccgtttttggagagtgagtttgcactggactgtacaccggaagagtatgctcagcttgcagggtatgtgtttgataagataaaaaatgacggaaagccgttctcctatgaattttatgatccaaaggagaagattcggaaggttgccagagtatggctgatgaaaagtcattttcaagaaggaaatatttattattacattacggagagtgggattgaattttatctgaacacaaaggagttcaaagaagaaagcaagattagtatacagcagcttcttttggagaagatgatccgcacccagaacttcaaaggcggtcgtgagattgtaaagcgaatctgcaatgaggtactcaaactgaaaatgcagaagagagaagtactgcaggtacttgtgcatgatttgaaaaacggactttctctctaccgggaattttttcaggagagtgtctgctggtttgatgaggaacacgatctgtttatgaaaaatacgaggctgattgccggggcaatgtccatgctatctccggttgatcagatcaaaaataaagaagagatctttttgctggatagcgaactgaagcgggcgatggcgatgcattcagagttattgagtgagtgtatggatttgaggagaaaagtcgacagtatggtggaacaggggacattaaacgcgattcgtccggttgtctatttccgtcagtttcttgagacggcccttgcaaaagatgatgtggaacaattgaaattgcttgcggagcccttgtttcaggcgaaaaagaagaagatgtttgatctgaagcggctggatgaaatgctggcattacgccgcggtatggatgaggaacgtgaggagatcgagtcagaggaagaggcggattatgtctatgatgacgaactggaagaacagcggatcagcagcaattaccggatccttgtgcgggaattgtttgcgatgttgaagaaaacagactgtttcacgctgcgggagtggaatgagcaattagaggtacggtatggacagaagatttttgcaaatggagattattattcgttcctcgtcaatctgtgccagaagcatgagattgtaattcgggatgcagtaagacacccggcgacaaattttgaggcagttttgaaacaatattttgaaatagaaggcaccgaggaagagttgcagatggatttttatctggaaacactgacggatgaggaaccagttacttttctcgaatgtttttcggtgacgaacataagagtggaaaggatgaatggagatgacagagcagacgctggaaacagggattga

SEQ ID NO: 51869 - DNA, 717 bp, Lachnospiraceae bacterium 9_1_43BFAA
atgacagagcagacgctggaaacagggattgagatttttgccagactgatcaatcaggaggcagtaaaatatcagggcgaacatacgaagctctatgaggcatatacgcagaatggagacatatttgatacggtaaataagattacaaaggcgctgaatctggagatttatgattaccggggagggttgtatctgacaccgggagaatcgaatcatgtttttggatatacgaatgaagaactaaaggagatgatcggacttcggctcaatcgggagttgttcctttgctacttcattatttatcacatcatcacaaaattttatacagattcagcgacttatacttatcaggagtatgtcaaggttccggaaattgtggaagcagtagatgcttcttttcaagggttagcagagaaagtggagacgcttgcactgacagaggtggaggaatacagttttgagcagatggcgcttgcctgggatttgccacttctcaccaatgaggatagttccgtgatccgggcagaaaaaggttcccgggcaggaatggtaaagaagacatttcaatttctgatccgtcaaggattgtttctggaagtggaggatcgatattatccgacagaccgtttttcggcgctgatcgagagctattttgagtcggagcagagtcgtatttatgagattatgacaggaggtagagacgatgccgcatattaa

SEQ ID NO: 51870 - DNA, 4413 bp, Lachnospiraceae bacterium 9_1_43BFAA
atgccgcatattaacagaatccgggtaaacaacatcaaatataacgtgggaactcagttttatgacgacttgtgccttcggtttcaagggaaaaacagcctttatgatctggcaaatggagggggaaagagtgttctgatgcttctgcttttacagaatctgatcccaaactgtacactggatgacaaacagccggtagaaaagttgtttcggggaagcaccgggagcagtgtcattcactctttgatcgagtgggaccttgacaggccggatcaggaagagtgtggatttcggtttatgacgactggattctgtgcacgaaagaaggcagatcggatcaaagagggggaggaggaagtctcatcttcggcgattgaatattttaactactgtattttttataatgagtttaatgattatgatattttaaatcttcctcttgtaaatggaaaagagcgggttacctttaaagggctaaaagaactcatcaaacggcttcaggccgaatcaaaccggaagctttcagtgaaaatttttgaaaattccaaaagtgaatatcaaagtttcattgcaggacatggattatatgagagtcagtggaacattatccgcgggatcaataagacggaaggtcatgtacgtacttattttgagagcaattataggacaagccgaaaagtagtagaagatcttttgatcgaggagattattcaaaaggcataccagcttcagaccggtaaggaaaaggatgctgaagaactggcacagacactgttggatatccgggaacagatggtagaactgtcaaagaaaaaggagcagatttctaattacgacaggcagattacggtgattcaagagtttctgacaaagtttgaaccattgttacagaactttgaattgtgcagggaaaatgagcagaagacaagcgtattttatcataccctccttgatgaaagagagcggattgaggcagaagcggagcaattggaggaagcgctacagaacatgcaggaacaacagcaggaaacggagcgaatcttgttgactttagatctgcaggaactggaatgtcatcttgatgaagccaattatgaaagagaacagaaggaaaagcagaaagagcagttgaaagaggcagtcgaagaattaagacagactgtgacagagaaagagtctgtccagtattttcttaattacgcaaaagcacagtcgcgggcacatactatcgaggcagagatggagcggatgaagcagggaaatgaggaactctaccagtctttactggagatgactgcccagaaaaaaagaaaagatgagcagatttttgaacagcttaacaggcagaaagatgaggctgagaaaaatcgagagacttccagaagagaaaaggaagaggcagacaaaaaggagcgggaaagcgataatgcccgcgctgtattaaaaagccgtcttatagaaaatgagaaagagcgcaccgctctgcaaaaagaaatcggcgaggggatgaaagcattcccatttcttctccgggagcagattaaggatacgatcatagaaaaagaaaagaaagaagatgccgagcgagagtcgaagagaacgctggaacaagagtgtgagacgataaaagaacagcttcagtcagacaggctgatggctaaggatctggagcatgaggcaaaggaattgcatacaaaagaggaggaatgtcaggcacagctggcaatctatgaggagctgacagaaaaagtagcacagagaatggaagtatatggcgagaaagatgtctaccggttactggagttgttaaaggagaaacagcgggagacgatcattttgctccatggcggacagaaccgtcagtcagaactgcaaaaacagctggagcagcttcaaaaaggaattttattccaggtaactccggaagcagagcagctgaaagagtttctttaccgaaaatacggggatggagtgcttggcacagagttgttagagcagatgcagggggagaaaaaggaagaggtgcttggccggattccatacttgccgtacagcattgtcgtcgggcaccggatctacgagaagatccttgcagaaccaaaaccggaagagtggcagaatgtaagctggatgatcccggtcgtggatcagacatatctggagcatggacagtttgatgcaggggacggagtgatgtttgcaggaaaagaaactgcgtattttctggaaaaagagcagctggaaaaagaaatacaccggacagaagaagtattgaatctggaacataaaaagcaggaacagttgagagaacaacagaaagtgctgacagcggacacagatggcgtgcaagagtatgtgacaaactatttcgaaaactatgccggttggctggaagaacagcaggagagaaaagaaaaaagagcacaggtgatggaggcacaggaacagttaaaagagaaggaaaagaaactgtgtgcaagagctgcagagctggagagaaagattcctgaaagtgcagcaaagattaagaaactggcagaggagatcctgtccttgcaaaggctggaggacatatttagaaagtcagatcttgtggaagcaaatcaaagggagtggaaggaaaagaaagcagagctggaactggaaaaggaaacactttggagactggtgcaggcaaaagagcaggagatttctgaggcagacggacgaatccggcagattacggcacagattatggaacggaagatgggatgggagagatatgctacctattataaagaagagattccgatccaagaaccgattccggaacgtctggaggaagagttggatggtgccatcgcagcatttgaaaaggaaaataaagatgtaagagaaaaaagcgagacacttcaggttatccgggaacagattacatcctatctgcgagaattaagaagcagaaaggcagatgtaaagatgctggaacagctctatgaggagcagaaacttgcggaagtgtccgacgaagagattgaggcgcagaaagaacatctgatggaggaagagaagctattacaaagatgtgagaaaaaagtatcggagctggtacttgcatgtacgcgattccagtcacaggcagatgtgatcgccgggcagatcagggagagattctaccgaatcgagcggctcccgattgcagcagggacgattgagatagagaaggaacggcagaaggagctacaacagcagtgcaagagagaactggcagaattgttccggaaacagaaggaaactggaaaagcgcaggaagaaatccagacgatgatcggaaagattacatgggttgcagaagagtatcacatcaaagatatgtccgtcaagacacttccaggatttgttatcttagactggaaagaaaccgagcgtcagatcatgagtggatggcagaagatgaaagcgagaaaaacagcggcagaaactgcatttggcaaggcaaaggcgtggtgtgaagagacactgaccggacttggcgcaggaagttttgcactgcagatgaaagaacagatcccggttccgcaaagttttgaggaggcagataagacgattaagcggttggaagaagcatgtgtgatgatccaaatgggaagagatcagattgaggaaagccttcgtgatatcgagaagattaaaagtagttttgaaaatcaatgtttacagcggtgtaatacgatccgcatggaactggataagtttccgaaactcagcagtattatgatcgatgagaaactgacgcagatcgtccggttgaagattccatatgtgagagaagaacagcagcaaatgcagatttccaattatcttggacaagtgattgaaaacctgaaaaaatacgagaccgagcaggaaaagaaaaaatatctcattcaagaactgtcgatgaagcgaatgttctcggcaatcgtcacagatatgaaccggatcagtctggaactttacaaaagagagcggatcaaagaacagagtcgccacctaagatacgaggaggcagttggaagtaccggacagtcgcagggaatctacatccagtttttgatcgcaatcatcaattacattgcaagtattcattcctaccatgcaaatgaggagtctctaaaaaaagtaatcttcatcgacaatccatttggtgcggcgaaggatacatatatctgggaaccaatctttgcgatgcttgcagcaaatcgggtgcagctgatcgtgccgacaagaggtgcgacacctgcgatcatcggcaaatttgatgtcaactatctgctcgggcagaagatggtcggacaaaaacagcagaccgttattgtagattatcgcagcaagatcgatgtagaagaagctgagtatgtaaaaatggaatatgagcaggcaacactgttttaa

SEQ ID NO: 51871 - DNA, 1230 bp, Lachnospiraceae bacterium 9_1_43BFAA
atgattggagtacgaaaaagtgagggggcaaagaggatgagaaagaatctggaacggtattttgcagagcgcagagagaagaaaaaaacagggaatatccgtgtcacctatgaggaattgcttgagcaggcagcgggaaacgaagagcggaagcttctggagatcagaaccgggagagtaagggagtttcagcagcttttggaagcgtttgttcaggagggagtgctaagtccggtgaaaagaagtaagaaaccgggatacatggcgacggtctatgaacggtatgagattgtcggcaataaagaaaaagtggtggaagatccggaatatcttgctcttttgcattcctatgtgggcacgaaggtgcttgaattttataagagaaaccggagagcgtttgagcaggatcgggaagcgattggtatactctataactactattgcaggacagagaaagtatggatgactgcaaatgaacttggctattacctgttcggtgatgagaaagcattcgaacagccggagggagaaaaagagaagcaagtgtcagatgagcaggaaacgagtacggaaaaggatggtaggggaaggtacaggaaaaaggccggagcttacacacatctgttaaatcggatgggatttgatatagagacggatctgcatgctttctatacgaaggagccatttatttgtcaggtacgcccatctttttttgaaaagaatatcaggaaaattttgatcgtagaaaataaagatacgtattttcggatcaagaacggaatatatggaacggaatatgactgtgtgatttacgggtcggggtggaagattataagagccttttctctcgcagaagaaactggtataatggagacagataccatagaatattttggagatatcgatcccgaagggtttgcgatttattatgaattgaaaacgcagtatgcatcgtattcgattcggctgaagatggagttttatgagaagattttagaggcagtcagaggaagtgagagaaagcccgagaaaatcagagggaagattcagaatcgggcacgggaggtactaccatctgcccttcaggaatttgatacagagacagcagattttttgcagagaatgatgttgaaagatctgtgctatatcccgcaggaagcactgattcttgtcggggaagcagaggtggaaaatactacaaggagaatcagaagtaatggagttacatag

SEQ ID NO: 51872 - DNA, 1611 bp, butyrate-producing bacterium SS3/4
atgatcgataaagattttttgaaaaattttgatcagagaatgaagtgcgtcggccgatattcggtgctttgcagcaacagctttgataaaaagctctggaaagaatatgggatcgagacacgggatgagcagatgaatatgctgtttacattgctccttttcattatggagtattctctgcgggaagaaaactgcacgatggacgagatcgcgtcatttgtggaggacatcagctacggatattacgggcggaaattaaactttgagaaaagtcaggaatttgcaaggtttatggtggaagatatccttgggaacagcggttcttccatgtattttaagacctttgattatgaaaaacggacctatcaggacatcaatatccgctatattgataataaggtcgtatatctggagaatggcgtcaggagaacctcctactatctgacagacgagggctataacatgatcttcgccacgatggagatggaaaacaacttaaaactttccgtccatgagatgctttttaagcttcatatggaaaaggcggattacaatcgcgctgttgatgacatcaaaaatattttcggtcagctgcgcaaacagagccagaagatcgaggaggcaattttagccgtccggagaaacgctttatcctattccgtggaagagtatggaaaattagtggaggacaatatcagcaccgtggtggagaccagggaaaagttccggctccaccgcgattttattgaagaaaaaattgaagaattcgaagaaaagcagatgaatgcggaagagttcacggaaaaagaaaaagcgaatctgggaaatctcagaacgatcggacggtatctgacgcagacgctggacgagcatcagcggattctgggacagcactttgacctgaagaaactgtacgatgaggagttggaaaattattccaatatgacattggtgcagcggtttccgttccggagtgatgtctatgacaagattttgaaggatgcgtcacttctgaaaaacgcggataaaatatttgcgcccctgtttagaagccggatcaataagattttcaacccggaaaaaatgatggaatatcagaaaaagctaaagaaatcagatgtggaagatgagtctatggaactggattttgatgaggaaaaatacaaccgggaaaaggagcagagcaggcaggaacggatgaaaaaatatgagggctgcgtcaatgtgatcctggaacagctggtaatccataaggaaatgacactggaaacattaaatatcagctgtaaagaggaagaacgggaacggctgcttccaactgcggaaatattcagggaagccatcatcgagttcctgacagccggaacgatcgatatcgggacgattcagaaagaacagacagactatctcatggatgcctcagagggctttgtactgaatgagatgcttctggctattctggaagaccggagataccggaaaatcgggaagatccatatattcccaatggaagacgggaaacatgtacattttaaaaacgtgatggacgaagccgggaaccggagaaatttcaaatgttccaacgtgggcttttgctatgaggagagataa

SEQ ID NO: 51873 - DNA, 747 bp, butyrate-producing bacterium SS3/4
atggcatacgaagcagagatgatcacatacagccagaaaatattttactaccttttgtgccatggagcattaagcgatctggacgcgggagtcaatgatctgtaccgcgcctatgtggagcacgaggaggtcatgaatttagtaaaaaatcaggcggagattgcggattgtaagatcgagagatacggaaccacgatctatctgatgccggatatcgacaataaatatcttggatttacgaaggcagatctgaaaaaagaattatgtaaacccaatgccacggaccgggactactatctggctcagtttgtgatcctgacgctgcttgcagaattctatgacgggcagggaagcaccagcaaatccagagaattcctgaaactcggagagctgcagaatatcgtgtcagagcggttgaaggcgggactcgcgcttgaacaggagagggagcaggatggaacgaatctttacaccgagatgtacgaaactgttctggattataagagcatgagtgaagcttatgaatcgttaaagagtgtggaggcaggcagccggtcaaagtatacgaaggaaggatatgtgagcattatctgtaattttttggaccggcaggggctgatcatctttatcccggaagatgagatgatcaagaccacagcaaaactcgacaatattatggaatacaagatcctgaacaaggaaaattacgcaaggatcatggagacattgggggagacacatgagtaa

SEQ ID NO: 51874 - DNA, 4560 bp, butyrate-producing bacterium SS3/4
atgagtaagatatcgcggatccggattttaaacctgaactacaataataataccataaagatcgacgacgaaacctttgatctcggcgggcagaatacgctgatctccctgcggaacggcggcggaaaaagtgtgctggtgcagatgatcgtgagtctttttgtgaaccggacataccgggatttcggagatcgtccgtttaagagttactttacaacgaaccgtccgacgttcctcataacggaatggattcttgataatggaatcgaccgttttctggcggggatgatggtgcggaaaaaccagaaggaagataacgacacggaagagctggaaatgtacacatttaccgggagctattcgaatggctgtaaatatgaccttgacaatcttccaatcattcgacaggacggaaataaaaagatcctgaagggcttcggagaatgcaaaaatcttctggaagagatcagcaggaatgaaccgggagatttccgcctgtatgatatggcgagccagtacgggagacgccagtatttttccacactccgccagtatcagatcaacaataaggaatgggagagcattatccggaaggtaaaccagaaggagtccggactttcggagctattccagaacgctaaggacgagaaggatctagtggaaaactggtttctgcgtcccatcgaggataaattaaatcaggaaaagaataagatcgacgagttccggaagctggcattccagtttattgaacagtaccggagcaatcagtcgaagatcctccgcaaggggatcattgagcagtattttgaggacacgaaaccgctgaaagatatgattgatgattatgcgcagaaagaccgggacgctgtgaatctcagaacggagatgatcctctatgcgaaatcgctccggaaagaactggaccggctgcagacggagatcgctgccggtcaggagaagttcgaacagatcgagagagagcagagacagatcgtttacgaacagctctcctaccagatctatctcagtgaggaccagaaaacggagatcctttcacagagagcgcagcaggagatcgagatcacaagactcacttctctgaagaatcatctcttacgaaagatcgatacgtatgatcttcataagatctatctggaattaaaggattttgaacgccagaaggcggaggtggacgcgaaacttcaggtacttttacagaaaacggaagaatcgaaggatgagatcgagaagatcggatgccgcttatatgcgctgtattcggaaaatgccaaaaagctgaaggatcagagacagtcggaggaggaaacacttgcggaaacggaaagagcccgggaaaatgcacaacgggagcgggacgagaaggagcgggaaatccggaaattaagcggagatatcggagcgaaagagagcagagtcaggagctatgatgaggtggaagactcctttaaccgggagtttaacgccgaactcaggagaaacctccttgggctttatgaagatggagcgctggagattttccggaaggagatcgatgcgggactgcaggagaagaaaaataagtcggtgaaatatgcccggaaactcatggaacaggaacaaacccggaaaaagctttcgcaggaagcttcggacggaactgtgacgttaaatgacattgcccataagttcgaccatgtttctgagaaacttgcagatctggagagacagaaaaaggaacgtctgaggatcatgaaatatgtcaatgtggacgaagaacatcttgacagaagagatctgatcctggatcagcttgacggaaagatcagggaactggatgtcgcgagaagcagattgatccagaaaaaaggagatcaggaaaagcatttcagacagttaaaagagggaaagaccacggagcttccggaaaacatcaggacttatatggagcagaacgggatcgaccttgtatacggaatggaatggctctcgaaaaatggcagaacagccgcggaaaatgccgaacttgtgaagaagaatccgtttatcccctactcgatcctgatggaacggtcgatccttgagcgatttcaaaagaacggggaggaattatatacaagcttcccgattccgatcattgtgaaggaagagctggaacaggagcaggaacatgtagattccagatttgcggcttatgggaatgtacatttttatgtcatgttcaacacacatcttcttgaccgggaggagctggaaaagattctggggaagatccgccgggagatcgaagatctgaaaaaggcggtggaggacaaggacgccgatcttgagacctacagaagctaccggagtgtggttgaaaatcagacgttcagcacggctctctgtcagcagacagaaaaagagatcaatcgtctgaaggatgagaggacagccgtaaaaggacgtctggaagagatctatcgggagcagagcaggctggaagaggagaaaaaagagatcgaaacgcttgcggatacggtaaaggaacagatcgacggcttaaagagaatggacgtacagtttgagatcctcctcaaaaaatatgatcagtatgagacggaccggacaagtctggaacgtctgaaaaaggagaatcgtgaacttacggagaagcagacagcgctttccgtgcgtctgggtgaactccgggaacaggagatgggacttagggcactggtgaaggaatttgcggagaagatcgaccgcgaggagaagaaacaggcggaatttgaagagatcgcgagaacagcggagaacagggatctgtcttctttgacgcagatgacctcggaagagctggaagcgagatactatgcgctgacgaaggtgatatcggacagtgtggaagagcttcgaaagtcacagacggactggatcggaagaatcagcgggaagaggacagagctcaaaaagaaaaatgaggacagtcagatcccggagaaagaataccagagtctcgtgtgtacggaagaacagtatgacgcatggaagcggcagaaaaagcagacggagagggaacttaataaagcgaacgaagaaaatacggctcttggaagaaaagaaggcgcgctgacaacaacgatcacgctctatatgaagaatctgaaaaaggaaaccggatatgagcagccggcagagagaaagacgatcacagatacggaattcgaaaaacgtctgaatctcaaggaatatgagcttacggcacatcagaaggaattgagtcagcttcgggagagaaatatacagatagcttcgcaggcggcaggtgtggaggagtatgtggatgagccgattccggcagagttgatttctggagatggtctgagttctgtagatgaacggatgtctgtggagcgttcgatcgcgtcaggtggtctgattccagagaatggggctgacgcgtattcggaaaccggagagaataaaattcttttggccattcaggagcggatccctgatgtgcggaatgaggaaatggatgtcataaaagggtaccagaaggagatccgcaggaagatcacggagagttccaaggcactggaccggtgcaggggtgacgtatcagagatgatccgcgggatcgcgtccggaaaaacgtatgcggatgattactttaagaagactttcgaaagcctgctctcccagacagccagcccgcggaatctgttcaggcagtttgaaatgaaccggcaggcgtacgaaaatcagctggaaaaactgaagatcgatctcgcccatatcgatgatgaacagaaaaatctggaaatgatgtttctggaatacgtcgagcagatcaatgcgaatatcggcatgatcgataagaactctacgatctctgtgagaggaagaagtctgaaaatgcttcggatccaggtgcctgactgggagacggagaaagagcacttccggctgaagctgcatgattattttgaaaatatcgtgaagcttggaatcgagacgatcgaaaaaaatggaaatctgacagagtttctgggaagagtgatcaccaccagaaagctgtacgatgatgttgcaggaatccagaacgtgaagatccggctgtacaagatcgaggcggagcgcgaagtgccgatctcctggtccgaggtatccgccaactccggcggcgaaggattcctgtccgccttcgtgatcctgacctgccttttaagctatatgcggcgcgatgagacggatctctttacctccggagaggaaggaaagaccctgatcatggacaacccgtttgcccagacaaatgcggagcatctcttaaaacccctgatcgagatggcaaaaaagacaaacacgcagttgatctgtctttccggattaggcggcgattccatttacaaccggtttgataatatctatgtattaaagcttgtcgaatccagtatccggaatggggtacagagagtggatgtgacccatatgaagggtgaggagacgaaacggatggtattgtcggagtttaagatggagcagatgagtttgtttgagatgatggaggagtaa

SEQ ID NO: 51875 - DNA, 993 bp, butyrate-producing bacterium SS3/4
atgaagaaacacaaggtctacttacaggaactgtcagcagagttttcggaggcagattattcaaagttttatgaagttgtcatgcggcggatcgagaacggagagcttgttccgatgaaaagtgcaaagaataacgggaggaagccggcactgccgctatgcttttgggaatacgaaaaagaagcggattatacggagctttatgaggaactgaaatatcggtatcatcccaggatcaatacgttctattaccgagaacatccggaatgctacgagagggacagggagaagctgcagcttttgagcgattatctaaaggatcattcggagcttttgttggttcaggaaacaatgaatgagcgcagctttgagattttccacagggagaagtatttccagagagagggcggtcttgagctttgtaagagagttgcgatcactccggaaacgctggctttttatgaaacatcagagccgctttcttattattcctgttccaagcagacaccgcagaatattctgatcatagaaaataaggacaccttttttgatattcggagatatatgaattccggaaatgacaggatcatgggaagggagttcggtacagtgatctacggagccggaaaaggaatctggaagacctttgaggattatgtcaatggtgcggaacgatatttcctgggaaagaatgcattgttttatttcggtgatcttgattttgagggcattctgatctttgaacatttgatcgagcagaagcagtaccgggagagcggaatccatatttttaaagaggcgtatgaaaagatgttagataaggcatggcagcttgggttttccagactaccggatatgaaggaaaagcagaacgccaacatcggaaccggctttttgtcggcatttgatgcggagcggaggcatcagatccgggagctgcttgatatgggaaaatacattccacaggaaattttaaatgaacatgattggtga

SEQ ID NO: 51876 - DNA, 1629 bp, Coprococcus sp. ART55/1
atggcactcaaatacgtgatgataaatgacataattgaagaacataatgcaagaatgcagaatctgaggaaatattacccgttttttgttctggctgagaccacatttgcgcagtataaggaaggtcgttatgcacagctggacatgggttatataaccatggcgattctgcgtttttttattcaggagaacagcttcaatgagcgtgaagtgtcatacgatgaatatgaggaattcatgggacagctccttgaccgtgatttcgatgtggagatcgcgggagatgacagggctgacctgataatgtatatatttgacaagatcaagaacgacggaagagcatttgaattcacgttctatgatccgggaaagaagcagcgcaagacgggacgagtgaagctgatagacagccatatagtggatggcaaggttctgtatttcattactgcggatggaatcgaattctatctggacaccaaggagatcaaggacgagagcaagatcaacgtgcagcagcttcttctggaaaagatgatcgttggagagaacttccgtggcggtatcgaggtcgtgcgcaggatcaatagcgaggtgaacaggctgatccgcgagaaggatgagatagtaaatcttctgtccatcgacgtgttcaagggcgcggaggagtacgagaattatatgaagaccgtcggcaaatggttcgctgacgagcagaagctctttgccaagaacaaagctctggtggacaaagcgatcactaaggcgagctatgataatatgggcaagggcaacctgaaagctatggaggagataagccagcttgagcttgaactcaagaggaccatcatcaagcacggaagtctgataagcagcaccatggagctgcagaacatatcggacaatatcatacacaaggcaaagctgcagaagcttagacctgcatttgactttgcaggacagcttcagagtatcataaaagaggacagaccggataagatactcaccatacttgcgcctctcttcgctccgaggatcgtgaaaacgttcagcatgacatccatagatcacatgctcacgctgaagtccgaggacaatgcgaagaccacaaaggtgaagaaggagcagcttgatccgaacttccgttacgaagatgaactgctcgatgaacagataagtgccaacttcacaaagctgttccacgagcttcttgaccagctgaacaaatggggacacctgagtctcaaggaattcaatggaatacttgaagttaagtttggaaaagaaatctacgacaacaaagattactattccttcctcacacacctggctcagaaggacaggtacagcgtggatgagatactggcaaagccggacactatgctggagggaatgttggtagatcacatagagagaataaagaaagttgacgaaaaaacgctggcggcatctgtatctggagatcaggctggtggcagcagatccggtctctcccgtgagatgtatgcaccggaactcacattggatgcgttcagaggcatgacatttacactggaattccatccagacgaagagatacagattggcgaggacatgtacgttacgggaattcagtttaacaaaaccagctga

SEQ ID NO: 51877 - DNA, 720 bp, Coprococcus sp. ART55/1
atggaaagtaagaatctggacaaggcgatagagatatattccaagttaatatcaggtgaggagatctgtaagaagcatcccgacaatggcccgttgtacgatgagttctacggcaatgccgaggtgtacgatattgtcatgaatatgatgaagaagatgaacctgtcactgtacgagtacaatgacagcttgtatataacagccggagagggcaacagggtatttggctatacgaatgacgacatgaagaagcttctgggacttcgtctgaacaaggagctctatctgtgttacttcattatgtatatgacacttctctatttttacaaggattcatccagctatcagttcagggagtatgtgaagtcagagaacattatagatgagacaagcaaatatcttgcggacataacgaagaagcttgatgttctgtcaactgatgaggtggagcaggacagcttcaaggcgatagcgcttctgtgggatgagctcccggcggtgacgggcaatcaggagggcgacagcgccagggcgtccaaggcatcccgggcgggttatgtgaagctggtgttcaacttcatgtcggcccagcggttatttgtggagaatgcggacaggtactatccgacagacaggatgaaagctttgtcggagaactattttgaggaatacagaggacggctgtatcagctgcttggaggtgaagaagaggatgcctag

SEQ ID NO: 51878 - DNA, 4476 bp, Coprococcus sp. ART55/1
atgcctagtatcaacaggataagggtcaacaatgtaaaatataactttggtacacagcagtacgatgacttcaccatgagaatgtatggaaagaacacgctgtatgatctggcaaatggaggaggaaagagtattctcatgcttctgctccttcagaacctgataccgaactgtactctggatgagaagcagcctgtggagaagcttttccgtgcgggcggcggcaacacagtcatccattcgctgatcgagtggaagcttgacgaggcggatataaaggatggctacagatacatgaccaccggattctgtgccagaaaggcaaaggatacggcggatgccggggaggtacagaaggacactgcatccatagagtattttaattactgcattttctacagggaatataacaagaatgacatagtgaaccttcctttgtcggaggggaatgagaggatcacattcaacggtttaaagacatatctcaaggatctcggacacagggatatgagcctggagatcagggtatttgacaagaagggcgagtaccagagatttataagtggctatggtctccacgagagccactgggaaatcatacgtggaatcaacaagacagaggggcacgtaagaacgtattttgagacaaattacaggaccacaaggaaggtcgtggaggatctgcttatagaggagatcatagagaaggcatttgccacaaagacaggacgaaacggtgaggaagacaccatggcagagactcttctcgacatcaaggacaagctgaacgttctggcacagagaaagcgtgacatagccaactatgaccaccagatagaattgataaatgtgctcgagggcaaggtgaactcatgcgtaggtctctacgaggacaacgacaggatatgtaagggcctggccgatgtgtatgccacaggaagggcgtgtacacaggagggcgacacccatatggaggagctggcgaaggcaaaggctgacgccggggagcagatggaacagcagaacaagcgtctggcaaatctcagggtcaccagggattatctgcgccttgaggacatgaaccgcaagatggatgacactgccacgcagatagaggacaatgagaagaagcttgcggagctaaaaaaccagatcggctacaaggagagtgcaaatgactaccttgtatacagggagaacaagcgacagtacgaagagagcagactgatagtcgacaatataagaaacaacatcggatcatccagtgagaagatggcggtgtatgcgtacaacagacgcatccgtgatgagaagaagcttgcagagctcatggcggcaagggaagaggcccagaccagctatgatcacgcacttgaggaggcggagtactgcagaaaggtcatgagggagggcgagatcgcccaggcggtggcggagaacaatatcgctgatgccacagccaagattgatgagataagtgcccgcataagtgagctggcagcatcggtcaacctgctcgtagtgggtgatgtgaaggatatgatgaacaaggctcaggaggagtctgacaggatacttgctgagatgacagagttggagatagccatagcagatggcaggacaaagctgtacgatgacagatacagactgacgactgtgcaggctgagtatgatgcgctggagagaagctgcgaggatgcaaggcttgacgccgaggcgtacaggcagtcgggaagccagctcgacagcatcatggcagtatactctgtggagaatccacaggatataacaggtgttataaatgacaggattaggggcaccataacagagacgatcaagcgccagcaggagatcgacagactgacaaagcttgcgaaatgctatgaggatggcagaccatttccgccgtcggagggggctgagactgtgataaactacatctccaccagacatgggctcatggccatgcatggtgcggattatctgtcggcactcccgggtgatacaaaggaggagctgcttcaggcaaatccatacctgccgtacagtgttgtgacaaagggatttgatagtctggaggatgatataaatctcggttcgatagacaccggcagcgaatgtgtaatggtgtacgatatggataagctttcagactcagcgatagttcccgccgagaacatgcttatcataggaagagacaggaaatatttcatgtctaaggactccatggaggacgccagaaaggcaaatgctgataagatagcaggtctcacggaggagatcagtctgataaatgagaagcttgcgacttatcaggaggatcttgcatttgtcacaaggcttgtggatgcgagatatacaggtgccgaggacagggagagagagctgaaccaggcactgctcgataagaaggatgagcttgaggagcttaagacatcgatcaaggttacagagacggagcttaataataacactgagagatatggagacctgcagcagagtcagcagaaggaatctgacagaagacagacatttgtcatgatagagcagctgtcggatcttgcaagaccggaggagcagagacttgccgagtataagcagaggaagtctgaccttgtggcaaagctgtcaggacttcagagcgatgtgctgaagtggtcgacgacggttggagagactgagtcaaagcttgcggggcttacaaggaatatagaggatatccagtacaagtggacggagtatttcgaaccgtatctgccgaagtctgagaatgcgggagttgctgaaaatacagatggtgtaggcgtggctgctgcggcatggcaggacggaataccggaggaatacaaggagactttggacatttcagatgaacggcttgaacaggaatttatggctatgctggcggtttcaaaggagcatgcgccggatcttgaggacaagaagaagctcatggatgcgctgaagaagtcaatggacagaatacagaagaccatagagaagagaggctttgacatggcggtatttgccgaggcaggagagctctatccgacgtctgaggacaatctcagggagatggacgatgagctggcaaggctcacgttgatagaggcgtcgctgatgcagcagcagaaggctgaccagaaggcgtatagcaagcttgagggaagcatagagtatgcgatagagaacatcaaccgcacatacggcgatagcagctatgtacgtgaggagatatctgcagccgatgcagatacagccatagccaatggcgatgcggtgcttgcggatatgaaccgcatattcaaagaagctgagaaggcgtacagcgattactataagcagtatggtttcatggtggatctgtacaaggatgtaaagagaatagtcgatacaaatgacatagatgtgtccggtggaaatgtactggatgaagacatggataccctcagacagttatttgagacaagtctcatgaagtacgacaggagcatgaaagcccttgaccgcgcgaagaatgaaatcatgagattcaagggacagacggcggatacactagtggagatgggtgtattcgagatggccaatacgatcagacaggatgtgcaggttccggatacctacagtcaggcaaaggaacttctggcaaatcttcttcagattattgagttcatcaagctggagaaggagcgcgttgagaagggtatcgaggatatggttgccatcaaggagaacttcgagaatcagtgtgtacagagatgtatggatgtgaagactgagcttgagaagcttccaaagctgtcacgtatcacggtgggcgatgatgtgatcaagatggtcgatctcaccataccttacgtgaaggatgaatttgtaaagcagaggatgtctgattatatagatgacatagtgaagggtgcggatgcctacgaggatgaacgaaagaggatcaagtacatccgtgactgtctgggactcaagaagctgttcggtgtcatggtcacagatatgaatgccatcagactcaatctctacaagagggagaggataaaggagcagagccggtatctcaggtatgaggaggctgttggaagtacgggacagtcccagggtatctacattcagtttctggttgctgtcatcaactacattgcaggaatgtacagcctggcaccggaggagtcggtacagtctaaaacaatatttattgacaacccgtttggtgcggcgaaggatatatacatatgggagcctatatttgccatgctggcagctaatcatgtgcagctcatcgtacctgcccgtggcgcgacaccggccatcacaggacgctttgatgtgaactatatcctgggacagcagatggtgggcggaaagcagcagacggtagtggtggactacaccagtaagacggatcaggaagaactggaatatcaggaactttcctatgagcaggcaaccttcgacttcatctag

SEQ ID NO: 51879 - DNA, 1500 bp, Tepidanaerobacter acetatoxydans Re1
atggatagggtagaaaagggattaaaagatcgattaaaaaagacccaagccattaggatgcttggaaccggtatggatgtaggagatttaaacgattatgctcatgagatttgtctatttctccttttgaaagtctttcgccgggaaataacagagaatccaaacagaaccagacaggatttaatctatatgaccgaagaaatattaagagagatggattttgtggcctcaaaagaggtggtggaacggctggtagacggagttttatggtataaggatccgaataggcaggatcctttttcctgttatatctttgatgaagaaaccagaacccatgagctatataaatttcgctacctaaaacccgacagggagcatagtcaatgggaaaagggcggttctaccgtatatatgctgactgaagaagcccaggaaattatatttataaccagggaaatattggaggaatttgggtttgacattgagcagttctatactctgcaattaataaaatccgggaattttaataaagctcaaaacagtgtcagtaatttaattgccagggtaagaactcttatacggcgggaaaaggattaccgacaggatgtgcttagaaatcctcaaataatatttatggatagtaaaaacaggcgacgaaagagtgaagatgaaataaagaggcagtttgaagatgagaagaaggtatttgaagatatgttttcatggaagaatcggctcaactcttttcctgctgaggccagagcagaggcagagcaggtatttgaaagcctggaagtagctagagcgcttcacgatgtacttgcaaaacttgtagtggaaaatatggcatttgaagtagaaatccgggttaagtatccggatagtttttggaagacttctaatttaacttttaaaaaagatatctggcaaaatataattgataaaaaagggttggccaattttgatgtattagaaagtcttttgaatccactgttttctcccgaggtggatttcatatatccattagattgggcctgggaagagcaaaaaatcaaaaaaacagagggcgatgaagagatatatgaggattttggcgaagaagaaacctggcagccaaaatccgcagattgggagataattgtagagctgtgggaagacatattcgatgaacttatgaaaaataatgaattttccataacagagttacaggatatagatagttttaaaaaacaaaaatggcttatgcaaaagaaaaatattgagctttttatgatgtttgtagtgacagaagtagagctaaagcttgaagaacaagaaacaaatgatgacaggctggagctgtttcggcgattatgtgataaaaatccgaaatataaaaagctgataggccggaggatatcaagcgtcaatgaagaggataaaaaacctctgagatgggaagaactttatgtttcaccctataagattaaacttttgcccagtaaatcaaacttagaataa

SEQ ID NO: 51880 - DNA, 777 bp, Tepidanaerobacter acetatoxydans Re1
ttgattactcatgagcatttacaaaaaggttctgaggtgtttttttcattgcttgaaaatagaatattgccactgactgatgcccgggtatattcctatatggaggaacctgaaataagggaagttgtaaaagctatggctcaaggagccgggctaaggattttagacaccagggagaacttgcatattgtaagccaagcccgtgattcgatttttgccacttcgtatacacatatgaaaagcaaatacaaactcgacagaaaaaaacacttctatcttgccaatataattatttgtatttaccttgcggaaatagataaggaaaatgatatacgggtgaggtgggaagaggaaggagtgacttattataaactggaggaacaggtgacaaaggtgcttgactcctggaaaacccggttggatgaagaagacggttttgccgaggaatggggaatcgccgttgaggagatttacgatatttggaataatgatttttccatgtacaaggaatcaaaaaccggtgatgtggatgtgcagaggaataaaaacactcgtcttggtttcatatatgaagccatgcgtccgttagccgatcagaaactaatcattaataatgtcaatgaattaaagataatacctaaaattgagttgtatgagagactaaattatttatatcatcaacgggatcgatataaagagataatggacttgattcaaagaaccgaggagggaatcaccgatgccgagaataaccggaatcaggataacgggctgtaa

SEQ ID NO: 51881 - DNA, 4488 bp, Tepidanaerobacter acetatoxydans Re1
atgccgagaataaccggaatcaggataacgggctgtaaatatgatggttttagaaaatatcatgagaattcagtatatgatttgacaagggacggtgagccggatcacactctatttactctaaaaaatcagggaggaaagggcgtatttatgcaacttctatctcaaatcgttttgcctgagactcgatggggcaaacagggaggcaacaagattaccggcatgttttatgatcagaaaaaccggttccgcccctacaccttccatgtaatgatagagtggaaactggataccataccggaaaaatggctgattaccggtatatgtgtcactgccgtaagacaaaatttgaacgatgatgatgaggccgaagaacgggcaggtctcaactattttttatatacatacgaacatgataaaaatgacatctttaccttggataacattcccgcttatgattcaagaaccggtaaagttactgaatataatgagtttgaacaatttataaacaagtatcaaagatattttataaaatactccaaaagctccgttaggagattagattcggattactataattatcttaaaagtcaaggaatacatcgttcagagtgggaagtattaaagctaatcaatagacaggaagggggctcggggaattatttttctcgtgctgctgacaataaaacggtatttgacaaatttataatccctgccataactgagaatatgagaaatttttccgaaggggaccaagacagtttaaaaggaatattcaaaagtaatttaagtatcactaaaaatttgcctgtacttatagagcgggagcaagattacagaaaactgctaacctatatagaaccattgatacaactgacagaaatagggttgcggcgacaaaggattttaaacaattccattcaagaaggaaataacctgtatgccggacttaacaatcgactgactactattgaaaacgatattttaaaatggaaagatgaaagggagaaaacccaggctcagataagggagttagaatatgaaaaggataacctggaatatgcccgagaataccggagagttgaacaattaaacagccagaaactggcactggatgcctcaattaatgagataaaagataaaatcgaagaacttaaaattgacataaagcgctacggaatcagcgagttgctgctaaaaatgagtaaattggaagatgaaaaacaatcccatataaataaaagagagcagctcataaaagatttaaatctcaaagataccgaagaaaagatacaaaccctagaaattaatatccgaagtaaatgggaaaataccataaaccgctggtctaaaataagcagggatcatttatcttatgaggcctatttggacggcaaaataaatgaacttgcaagagataaaaagagagaggacacagcggctaatgatgaaaaacttaaaataattcaattccaaagcgacagaaatgctctggaaaataaacgagaggagctttctcggatatttgatccagtgagaatgattttaccggagatgctgagagaggagctaaaagggcaagacaaggctgaaaagactgaaatagaaaaactagagaaagacatggataatattaaccaaaagatatatgattgtcgaattcatcaaaacggcaaagaaaaagacataaaatatatgcaatctgaaattgacaaaatagaggcggaaattgctaagctaaaaggccaagaagattccttaaaacttaggattgcaaatgagctgaatttggatgcacttaatgaaacataccgagatagttggttaaaagacaggttatatgatttagaaaaactaattcaggaaaaagaaataaagcttgaccaacttaagcagagtctatgggaaaacaatatcgacaaaagtttaaaccaagaagattattgggtgccgaacaatgatattctctcgataaaaaatagaatcaaaggcttgggaatcaatgcccaattgggtacggagtttttaagctcccttggagatgatgataaacaccgtcttattgaggacttcccctccattatccatggtattgtaatagcaaatttacaggattgggagcttttaaaggaaaatctcaaagaaaatatatttttacgttcatctgttcctatatatattcgttcagcaatgcaaggcaaaggtaaatacgcttttgaaatcattgccggcgatgaattggaactggttttaaatccatcagcatatgtcaagtggaaaaataatatcttagaccgagatggaaaattaaaagatgcattacaggtcgtaagccaaaatatccataaactacaggatttgatgaaagatataaagtttcagcaagataaagaaagctcagaagcactatatataaagcttaaggagaaggaagaagaacttgaaaaactaaaatttgatgatatcaaacttaaagaaactatcagcacactgcaggaagacctgaaaaaaatcggctgcagattagataactgcaagaaacaaaatcaagataccgcaaaaaaaattgatattctctccgaattcatagggcgcttgcagcagataagggtcagggaaaaggaaattactgaagtagaagaaaaactaaaagccataaatcttcggtgtgaacgtttagaagaacagattaacgagtatcgaaggctgaaagataaagatgttcaaaatcatgtaacatggaaaatacaagttgaaagtcaattaaaagaaataaaagctattatcagcgatgcaaagtttgtggaaaccggatttaaaactaaaattgtggaaagcacttcagaacctgtatattcactaattgacgaagattttacattggatatttccaggtgggagagcctttcaaaagacatggagattcgaaataatgatattagcttaattaacaaagatatcgaacttgttcaacaaaaactggccgatgtagaaaatgatctgaagcagattgataaaaactggcaggaatatgaacccattgagggcacagcggacagtctgtccttaaagaaggattttatagaagttgaacttgagaaagccggcgaaacacttgctcaattgtcgaagacgcttgtaaaggttgaaaccaaaatagaagaggctcagaaacaattagcaaaaattcaaaggcaaataaaagaggaatatggcaaacctacccaaatatgggccgatgctgaccttgatgaaaaagaatatcttataaacaagggtttaaaagataataagagttttctccttgagaccgaagatataatagctgcaagagaacaagacagaaataatattaaagatgttatttccgacataaagatatatagtgagctggattttaaaaaaggcaaaattagtgaagagttaatgataaaaattcgtgaaaattcccgtcgggaactggatttgtgggaggataaattcaaaagatcaaaagaccagttgctgcaaaatcatcagcaggcaggtcaaaactttcaagagtttatagatatagtaaagaaagagataaaggacgatatacttaagaacttgatactcagcagccttcaagatacacaaattgaaatgtatgacagcaacttagtttctttttacaccatgaaggaccattttcaaaaggaaataaacagcatatcttcagacaaatctaaggctgaagaaattcggaacacttgggcagaacgggcctcaagacatgccttggcaatggtggaatctttaaaggaaatggtggcgggcatgaactatgtcaatgaaaacggctatgtctttcctttactgaaacttaaggaagaggaagagctccccaagaatgaagaagatgtcttttacacattaagagattacttcgttgaatcaatagccgaggttatgaaagaatatgaagatatagacgatatagaagatgaaataattgaaaagatgatgggtgatcaggctatattttctcgctctgttcgaggcagatatcctacacttatggtctataaaatgactgagaaaaatgaattccgatatgccaaaccccatgactactactacaccacatgggaagccataaacaaaggggaaggcgatcagcccgaaggcagcggagggcaaaccttatcaattagcacatttgtaataatgatgctgatgaattacaaaaaacgccattttgggaataacaatccctggacagtgctcatactggacaatccctttggtagtgcatcagggaatcatgtcttagatcccatctttgagattgccgacaaattaaacttccaaattatagcctttgctgccccggagataataaaagccgaaataagtgagcgttttcctgtgttttgggcattggacataggcgatgaagattctggaaagtcaggaacagtcaccgggcgggtggttcacggcggacgagtaaataagatataa

SEQ ID NO: 51882 - DNA, 1068 bp, Tepidanaerobacter acetatoxydans Re1
atgtacaatcttataaaagtctttttgaatgactacaaacaaaaaaatcggaaaagtttttatttaaatgatcttgaaaagtttttgttggaaaaatcaggaggattctctgcctaccataaaaagggcggctatcatggcctatatgagggtttagaaagactcctgcaagaaggatatataaaaccaatgaaaaccgtgggatacaatggcaaatatccgccattgaaacttcgatggtacgttacagaagatgtgattactccaagatggaagagtgaagacatcctaagactgtccgatttattggaccttagtacatatattaaatatccgaggctgcaaactgacagagaatggcaatttattttacgaatatatgagtttttgcaaaacagagactggcgagagtgggcaagttgtgaggaaagatgtttggagctttttgataatgagaagtttttagacccaaaagaagaaccggataacggagtaatcaaaagattaaagctgtcttatgaagaccttaaaatgaaaaaatacggccagatgtttgtatattggaacaggggcgtaaggcagattaaaaccgcaattattttggaaaatcattccacattctttacttttaaaagggctgcggcaaagggatatgacctgttcggcattattcccgacgctataatttacggtcaaggcaaggatataataagcagctttgctttcatccgtgagattgccgatatcggcgacttaaaggtcttttattttggggatattgacccggaaggttatatgatttacaaatccttaaaagaaacatatccttccgtaaatatttcacttcaattagatgcctataaaaatttgttagattttggaaaatcttatccaattaaaaaagcccagaatatgaatattgaaaacttaaattttgttataagtgagtttactgaaaataattatcatgaaacggtgaaacatctaaaaaggctgtggtatgcaaatcggagaattccacaggagtttattacttatgaatatctaaggcaaccaactaatacataa

SEQ ID NO: 51883 - DNA, 1467 bp, Enterobacter aerogenes KCTC 2190
atgtcactagggtttttggagcaggctcgtaatgaatctatggcacgccgcgagctgacgattcaatctcacgcgttgcttgtagttcggacgctggattcaatatacagcgccctacagcgcaatccgtttgatggcttcaagcttgatgcactggcggcaattatgtatctctttgacgccatgctttattatgctgaccgcgagcgccagcctggtatgacgcgtaaagaagccgagctatgtctggttgggcatctcaatgaagcctatccggggcaagaagcgtccgactacgcgcaagttgccagcaagatttttgcggcgatcaaagaccctttccgtctcagttattacgacttctcgcaacgaacgcattccgaagagcagatagtccgtctggtacgctatgatcagctatccggctcagatgatattctctggtcgctgactgatgaaggaatgcttttctataccctccgtttggatgaaacgccgatagaacgcgctgcgattctggcctggcgcacgcttaaaaccatccgtcgcggtgagatcgacaaggcagtacaccagatccaatcaacgcagcggcaactggagcaatatctcattgggatgcggatgaaagtacgtgctgcccagtctggtgatttgagcgcatcttatgcacacgatatccgtcccgtactcaatgattcctttgataaaacccgagaggttttggaacatatccagaactcaatgtcggccattaccgaaatgctggttgaaggaagttcgaaattaaatcccgacaaattaaataagctacgtaaggcacaagagatttttgctgaggtctgcgcttttacgcagcgctatcaagactgcttacttgatgttaacaaagattttgagcgagctcgtctgaaactcattattcccagagataatacccttttccgggaaacgctggaaaaaggtgtactcaagcccttgctgtctcattcccctgacactgtcgaaaaggaaatcgatcgtctcaccgcacgcctgttggctccccgaagacaggatgatgatcggcacattctgtttgatcctgaagcgctgctgaacctctatctcgatagatttgaacaggcgcttccacatgagatacaggaccccaccgagcagcctgtagctattgaaaccaacctgcgaaatatccctgaatccgtcattaaaaaatgcagcgattgggttagtgaccgattgaagaattgggggcatgtgagctttagagatgttttcgacgcctatgagtgcgaagaattatctgaacaagaacaacaggtttgtttacttcatattggcagcctggcagctaacagcgatcccgcaatagaagtagagatagacgacgctatcgaaacaacgctctggcgggctgacaatatcaaactgttaaaggtcgctcccttacacccctttgaggagtag

SEQ ID NO: 51884 - DNA, 4437 bp, Enterobacter aerogenes KCTC 2190
atgtggctgattaaacgggtttatatggatggcgcaggccatgaagaagctttctacaaggacctcacactggactatattggcctgtctcaagcggtcggtagccctgttgttgaaggcctgcgctcgcccgtcagaaatgcgaaggtggtgaccagtacttatcagcagcttgtaaatgggggcggtaagtcaacctacatcgcgctgctgttatcgatttttgagccgtccgttagtgacttcacccaatatctggcaaatcatcgccagagtgaataccactaccgcaattacttctataaagaactctctgttgttttggttgagatggtcaatgaatcaggacaaacgttattactgggacatgctcatcagcgtaatggagatgatgttgaccgcacactgtttatttgtgatgcgcccgactccctgatgggcgcgccgtttgatgaagtcccttcttattcccgcgcggaacgcaattctgagctgcgcccctatgctaatagcctgcgcagttttgatagctggcttagtctcaaggccagtagtgaaggcggcatgcattggcgtaaaaccaccagacagaacgagtggcgcgcatttttactggaacaacaaattaacgttgatcttatcaaaacaatggtgaccttcaactccgaagaaggtggcctgacccgttttatcgaatacaaaactgaacatgatttccttggcgcgtttttcgcctgcaccatgtctaaagatgcggctgagcggctgcgggaactagtagcgcatgaagttgaacgtcagggagagttagaggggatccgtcgtaacgagtccttcctgaaggatgtgctggctaactggctggcgtttcttgagccggctaaacagctggaaagcatccaggcgcagcagcaactgctggatgatggcttccgggaagcaatgcgcgatctcgcagcctttgtcggggatgctcaggttgaacagacgcagcttgaagataacatggagagtttgcaaacgcatattggtcaggcgatgtctctgcgtgagcagttaggtaagcgcagagctctgcttgaatatgatttcgtgcagtatcagttcgacaagcaaaaagcgatagtcgatgcgcttcaagacgaagccgataccaatcagcgccagattgagattactcaagctgctatagactacaaagcctatgctaaggccctgaatgagtaccgccaggcagatgaagatctgaaggtattccaaagtgaaacggaaaggccgctacaggtgattttcgagcgtactgctggcgaagccttgggcacattagagtgggcaatcgacagacatcgccagcaggaggctacgcttgaggaagaattagggcagatggatagggaaagcaatacccttaaacaatcatacgacgaactacaaaagatgctgggtggcctggaggcggatcgtgagagatataaaagagacaaacggcagggcgaatcgcaacggggccaactatgtgaagctgggttgatccagaaggatgaaacaccagtagcagcccaataccgactggaattaaccttacgcaatgcacagcagagtgaagagctggctcatacaattcttcatcagaaagagcaggcgctggaagcacagctgaatgttgtgcgggaggcatcaattgagaaaagtgaggcccagcaaaaactcattctggctgaacaaaaacaccagtcagctgtggatagtgctttagttttagcaaaaacctatcaaaaactgccaacgtcaatgcaacatgatctagatattgaagacacgagttggcacagcgagctgtgtggattgcagctcgacaaggtattgaatgcgaactctcacacgctgaatggaatgaaagagcgtttactgcaagcccggcacgaactggacgagttaaggatgacgggacatgaactggtcgcaaagcaggtcaatgaggcacttgaagcgttttatgcggcgggtattgcacgggataagctctggacatttccacactatttggcctctgtttacaacgatgatgcacaaaagattgctgcggtgatcgatcaaaaccctggccgctacctgagcctggtcgcactcgacaatgtaacgtttgaacaggtccataaaattagtgagatcttgccctggaagaaggcacctattgctatttacctgctggatgaagcacaagatctccgccgagaaacgtctgaattagtacaggtcgtcctctcaaaccacgataagcatggatatagccaggctgcttacgaagcccggctgcaagacctggagaatatcgtagcgtcgcaggaagtcagtgtgaaggctgcaaagagcgccttcaaagtactggaatatttcagtaatgaatggcgtctgcattatgaacagtatggtaagcattgggcgggactgcttgaccaacaggagcaggctctcttaatactggaaaatgctgatgcagtacttaagcaagctgagcatgatgagcaaacactgcgtgacgagaagagagatgccctggtgaggttaaacaacgcccgacagcagaaaattcgggcagaaaaagcacatgataaactaagcctttttgtagaaacagaatgggcgaagcgtgaaacggcgataatgaaaatggagcagttagctgcacagattcaacgaagcaaggacactatttgcacccagaaagagagactggaacggctgaacgaaatcgagaagaacaagctctccgagaaaacccttttaaatatccagatgggcaactggagtaatctgtgtaacgagccgttctattcagagattacggcgactgaaggtatggtaggacgaagccccgaagatgcccatgagatggcagctcaggcgcacaaaaaattgctcgaagcagccagcggtgatcaagtgaccgctctcaagcaacaactgaaagatgctgaacaggcacaacgttctgcctctgagcgtttgatcgctcaccccacctacaatacatatccggacgaggtaaaagcggcggccatcaatgagctaacggtcattaataaccgcatcgtacgcctcaacgaacagcagaagcaattcacgcaaaatctaattaattctcaggtaactctgcaaaatttttcccaaagctgcgaggaggctagtaaagcaattgacgaggattttgtctgggaagagaagcccattgagatagagacaatccaaacgtctctggctgaaatcgtcaacagcctccatgaaattgaataccagctaaaacttcacctggagcaaaagaagctgcagttgcaaaagattgaaaatgtgaaggaacggctacagaacgccaaaacagctcaagcgatgatccagcacattacgccgacctctgcggcgggtctacctggcaggatccagagcatcactgaatatgctgacaatctggcgacacaatgccaaatgtatgccggtctaaatgaaacgctaaaacagcaaaatatacgcgtctctacggtctggggaaaattccgcaaacggatcgaagaagagttggccaaggatccagacgcccaagccagtcaggaatacttacggcagttggactcaatcgcaacttatcatgaagtgctgggcgatttggacagggtcggtacagggatcacgcaggtattcgaagctgtgcaggatagcctggaacaattccagcgttcgattgatctgactgtcacccatctgactgctcatctggaaggggcgattaaacttctcaagcgcgcgatgtcggtcaaaattcctgaggattgccccgtactgcctggccggcccattatcaaaatgacggaccggctgaatgatgttgccgctgatctcagggggtttgccagcagccgcttgcagcagtggatagctaagggacagatacctcgagcgcccaatcgggatgccttgacagctgatttggttcagtcggtatttggcgaaggggagctggaggtgcgtttgctgaagacgaatgccagccgtccacaatggactcctgtcacccgacttgaaggttcaggtggacagcgccttacatctgcctttttactgtttgtaacggttggtaaagtacgagaatacgatacgggtatttcaagtgcaggattcttgttagccgataacccgctgggtaaatcgaatgccgatgatctaatgcgaattcaaacccaaatggccaaagcctataaaatccagctcatctacctgactggtatttcggatgaaaatgcccaatcaatgtttgataatcatctcttcctgaataaagttcaaaaactgaggcggcgcgatttggtcaccgttgataaagaacgccatgccctgtgggcggcttctctggctgctaagccacagttcgatcccgtcatttaa

SEQ ID NO: 51885 - DNA, 1044 bp, Enterobacter aerogenes KCTC 2190
atgatctggctatcccgactggagtcgacagccactaaacatcgtcttgccgttggtaaggccgcccgtacagtgaaagctaatgcggtgctggatgaggtattacgcgcacacaatcaagaggccttgagccaggaggcgcctgatttgctgagtcaggctgttacgctattgcttgagagggactggcgggctcagcctaagcacaaagcgagttggcagcgctactggcggggtatgagcctgccaagtacttttgtttacgaaggtgccatcgttcctacgaagacaacatcagaaatagcctggcatccttggttggctcgacgtattacaggacaactgacccagccaatcaaggcacgcttacaacagctgaatacatatctttttcgccaaaccgagggcgacaagtcactattcccgggcttgcttgggcatcgtgagcggtctctgcttatatttggtgacgaaaaagcgctggactccttgccacctgatggctggaagcatgtcgctctgactttggctgatatgggcgcgtttcgacgtgcaccgcctttaccgtatgaatcatcatgttgccatgatcttccggctatcattgttgaaaactccgatgtgtattatcgactatgtcaacttaatcgagttcagactcgctggtcactggtcatttacggcgcaggtaacaaagtgtccggccaggcggaatgcgtgtcacaactccttgaggtcgaacaggtaaaacagctactttattttggcgatctggatgtagcgggcttaaaaatcgcccatcagttgcggtgtaagctgcttagtgattacggtatcagcttacatttggatgaatggctttataatgaactgattttaaatggtctaatgacgccagaagggaacgccaacaacgaacggtttgattttgaattgcagtgtaggtggatgccacagtttgttttacgagaaatgaagactcttctggcgaaccatcggcgtctacctcaggaaggtgtggcttctttaggtttagtcatatag

SEQ ID NO: 51886 - DNA, 1494 bp, Caldalkalibacillus thermarum TA2.A1
atggacggcagattagccagtataacggcaggataccgggaacgcatcagccgcatcgccctgttcgatccgttgttcgaattaacccgcaagacaggaacagatgcaaacggtaaatctatcgattattttggtctgggcttgctgaccctgctttttttctttgaaaatatgctgatgcgcaaccgccgtgtgggagtgaaagctttatccgaatatttgtatgccacaacacacgaccagtacgacctcgaccttcctgcctatgaaaaaatcgcccgggagattatcaccactttcaggccccctcacggcaaaaagcgggcgcgttcgttttttaactgggaaacaaagcaagaggagcacattcagtatgccattttaaaagcggaccaatttgatcctataaccaacagtcagtattacaccctggatgaacaagggctggaactcgtcttcgccaccaaagagtactacagtgaatttcagttgtcgattcaccagctggtgctgcgcaaacagctggaaaaaggagaatttgccaacgccttgcggcaaatcgacgagatgcgcgttgaagtgcagaacctgcaccagcgcatggtcaaaatgaggcatgagattcagcgcaatattgtttccgaagagacctatacccgctacaaaaagatactggaggatgtgtatcttcgtctggaacgggaacatgatgaatttaatgagttgcggtcatttgtagaagccacccgccaaaggctccattatgaggcggcagcggacacagaacagcgttcctatcaatatattgttcaaatcgcgcgggagttggatgaagtgcatcatgagcaccgccaattgctgcaagaaagtgtggaactgaaaacaacagccctgcaggcggcccaggagtcgctctattatgtgggcattgattcattcaacttcagccaggaaattgtctccagagctgtttcgtctcccttgcccgtgaaggctttgaagggcctggccgcccccttcctgtttgtccaccatgaaagaacctggtccccttggacagtgttcgctgaacaacgccttgatgatgagcaggacgaagagatggaaacgggattcattgatgtgcaggctggtgaagaagaagagaaacaccacgtttaccagcgggagaacttttccaaagtgatggagattgtcttaacggccctggacgggcaggaagagatcaccttaaaagaggtggtggaccacctgcgtcaaacggatcaggaggatgtacttcagcatcgttccttctatgatttttggctctatctgcaccagtattcaccggtctctgccaaacaagcggatgacacaggcagcggtttgatggacaaagccttatcattgatacctggcaaaaaaattatggtgcgggaagcagcggaagtgttgcccgttgtgtcccgctataccatccaaaatatgcactttaagctggaggatgtctaa

SEQ ID NO: 51887 - DNA, 795 bp, Caldalkalibacillus thermarum TA2.A1
atggtggtctatgagcacgcccaagtgatgaaagcatttgagatatatgccttgcttgcccaaaacgggtttggcggagcggaagaagtgcgggaatatctggccgatgatcacgtgcgcagccttgtggaccaatttgccagaaaagtggattgtgttgtgattaccgcaggagacaaactgtttctcattccggagacgaaactgtctccgtttcatgtcaaaaacgaaaccttgaagcgcacttttctcggtgcaaaagccaccaacaccgatctgtacatgatgtattttgccattattgtctttttcggtgagttttacgacagttataccaccatggaagcgaccagagattttttgcatatggctgactgggtgagcgcgatagacaaacgtatccaggccctgaaagaacatgacggagccacactgagggaaaaagagcaggaatacgacacaaattggcaggctgtcatcgacaagtgggaagcgatggacgatattaaggaaacgtccaaaaaacaatccggcaatacgatcagccgcttcagttttgtggacagtgtgcgccgttttttggaagccaaggaactggccgtcaatatcgggaacaacgaattgcaactgacagaaaaagcaaaaaccattgtccagcgttactatatggatctggaatataaccgggatattttggcgtttatgtatcagcatgaccagccgagtgaagaaacagcacacacgacgcccagcacacagggcaacgggggtgaaacaaatgccggcgatctctaa

SEQ ID NO: 51888 - DNA, 4431 bp, Caldalkalibacillus thermarum TA2.A1
atgccggcgatctctaaaatccgctttacaaacgttgtctatgaagacggaaacaaaaggtacaatgatgacttgtttctctttgatggccataacggagcggtcctcttggaaaacggcggcggaaagacggtgtttattcaaacggcgatccaggccattttgccgcacgcatcattagctgaacgcaaaattaaagacacgttaagtctggaaagtcaccatgcccacatcgccatcgaatggatcctcaatgaccggccccgccgttatgcgttaaccgctgtcactttatttctgactccgcacggtgtggattcctatcgctatgcctatgaatatgcggaaggagatgcccatgccattgaacacattccctttgtcagagaagggctcgacggcaaaaaacgaccggccagccgccaggaaatgcaagagtattaccagcggatgagcgcccaatccgtcaatgcccgcacctttgccaccattcaagagtatcacgcctatcttgaggaacaatttaaaatcatccccgctgaatggcagcgtattgtcaccatcaatggggcggaaggggatgtggaagcctttttcgagaactgcaaaacaaccagccagctgtttgaacaattgctgattcccactgtggaagaggccttggccggacaaggcagcaaagattttgccgaaacatttgagcggcaacgggagcattttaaaacctacaaacggctgcgggaacaaatcgaagagaatgaacgcctggaacgggaaataagccgcctggccggggtgtatgcccaactcttcggtcaccagcagtcatttttgcacacccaacagcgggccaaagcgtatcatcaattgattggcggagaaaaagcgcgcgcagagcaggaactggaacacaatcagcgccgggaaaaagaatggcaacaacaaaagctggctctggaaaaaagggaggcctcctaccggatcgcccaattagaggaaaagctgaaggagctggaacagacctgcctgttggcagagagggaattggagcaagcggaaacggagttgcggctcaagacaaaacgctaccattccttacaagctgcccggctcaggcaattgattcagcaggaagaggcccaactggcccattgtgaacgtgaattgagccggttggatgccgatgaagagacagcccagttacaagaacagctggccaaaaacagcgctgctttaaaaggatactttgtcaaggaagaaaagcggcgaaagagagtttaccaacagatcctcggacaactggaccagcaacagcatgaaatagaagctcaaaaatctgccctggaaaccgttacaaatcagcgtgaacaaaggttgacagaaaaggctaaagtagaagggcgcatcgaacaaacccgggaagagataagccggattgcccattctgttctggaccgtcctgattccgagacggtcgaagaggaatggtccaagtgggagacggcttacaaccagcttgatcaagcgatcatcagcgacaaggagaaattgaagcagttagagcagcaacagaaggataaacgaaatgctctgcattcggtagacagccagatcagtgtcagacgggccagcctggccaaactgacggagcaaaaagagacgattgaggctgaacatgacaccttgctgtacaaggtgcaagaaatgaagccggaatggcaccattatgagtctctctatctcagacaggcttccattgtgaagcagcttgacgaaaagctggtctatctgcagcaggaactggaagagttactgcgcctggaacgtctggcccttcggtttgttgatgattacaaggagcgatcccattttaccgctgatccgctgttagccgaactggtggacaagtgggcggaccaatttacagtgcttgaaaccggcactgtctatctgcaacgggcggctggcacgatgaacatcacagaagaagcgctgttggcaaggcacccgctgtggccgctgaccgtgatcgtgtcggatgccgagtatgaaaaagcgaagcaccgttttgaacagcaggcggaaaaaatgacgcacccggtctatgtggtgaccgttgaggaagcccggagcatgcttcaggaggtgccggagccagaacaccctgttctgccccgcacctggttacaaaacatcaaccagcagcaatttgtggcctggaaggaacaactggaaacatccgcccggcagcaagtgactgaacggaaacagaaacaacaggagatcgcggcatgggaacagctgcgccatgcgctaaagcgtttttatgaacgctatccccacgagcagtatcaccagttgttgcaagagattgacagcacccaggaagaagtccggcatctggaacagcaacgcagccagctggaatgggatctggaacaattggaggcggagctgcaggcaacacacaaacagatgggtgaagcacagcaacaattgcagcacttggaacagaaactgagtacagctcaacattatttccacaagaaaaaagaagtggcccggctggaagccgaagccggtaccctggaacaagagatcaagatactggacagtgaacgaatcaggctgaagcaaactgttgaacagagtgaacggaaggcccaggaattgcaccaggcggccgcccatgcccaacgggatatcgccgacttgagaaagcagcctttctataccgatgtggatgatacacaaccactctataccacagaaagttacgaagcattgaaactggagcgtgaatcgctcttgggacggctgaatcaaaaacaagaaaaccgcagtttgctggactataaaatgaaaacggctgctgaaaaaatcaggactctccaaaaagaattaaacgatttatacacagaaacagaggagatggacaaagggctcacttttcccccaaatggtttagctgagatggaccggttgaggcagacaatcaaaacgttggaaaaagagcgggatcaagcccagaaaaaatgggaagccagtcaggcagcgaaaattaagcaagcagaacaagtgcgcatcagaaaagatgatttccggaagacatatccggatgatgaaatcacggttttttcggcaagtctggctcaagtggctcaacagttgaaagatgaacaagaacagctggccaaggagaaaaacttcctggtccaacagcgggacacgttgacacgcaggttgaaccagatcaacgatagttatatgctgctggacaaaaaacatgaagcgtttcattatttggctgacgacattcagccggccatcctgaccgaagaggagcagcgcgctttgatctaccggcataaccatatggtgaaggagatgattgaacagctggaagttttgaagaaaacagtggaacaacacctagagtccgttcgggaagcccggcagcggtttatgtatttttgtcatgaccagctgagggatattaaactgaaagaaatggccttaaacgggattcagcataaagagacttacgaggaaattgccgaatgggtccaactgatgaagaagcgcatccggcacgctatccgtatggccgaagatgacatgcgcggccatgatcagcaagtgcagcagtttatcactcacttgcatacctatttgcaaaccatcgcggcggaattgaggtatatccccaaaaaaacgcgcgtcagagtggatgagcagtggaaagagatctatctgttcaaaatccccgaatggaatgagcaggaggggaaagaggaactgcgcaaacacatcgattggattgtcaatcagctggacagcgaccagttcaaagacgaggcggggaaagaagatctggccaaggtgaaaaaacagatcgctaaatggctgcatcccaaacagttattgcgcattgtcatgaaacaaaacgaaatgaaggtgagctgccgcaaagtgtccaatgatggcaaagtgagcaacgcccccacctcatgggagaagtccaacaaatggtcaggcggtgagaaatggagcaaaaatatgaccctctttcttggccttctaaactacctggctgaaaagcggcagcacttaacgccaggcagcaaacggcaccggacggttattgtggacaatccgtttggcaaagcatcaagcgatcatgtcctaaacccggtctttttcattgccgaacagctcggcttccagatgattgccctcaccgctcacgctgaagggaaatttttgcaggactactttccggtcatatacagtttgaagttgcgtccgtcagctgctggagacaggcaggtgatgaccaaagaaaaagagatccgtcatgcctttttccgagaccatgatccccaggccttattaaggctgggtgaagtggaacagctgaccatgttttag

SEQ ID NO: 51889 - DNA, 1032 bp, Caldalkalibacillus thermarum TA2.A1
gtgaaagagatagagaaactacttttagcgtacatcaaaagctataaaaaagttatgattcctttgtcagaattggaagcacgggttccgggtgatgtttcctatcgccagtttgctgaggcagtccattctcttgagcaagagggtatcctggccagggtccaatcccacggagaaaatggcaaaacaccgtcactggcatatacctaccgtatcaagaaaaaagcgctctggcaaacccttcatgatgagatccagcgtttccaactgacagtccacccggtgcttaaattgggcgcctatttgtccctgcctgaagaagtatggcaacaggaccgtccctacattgaaaaaattgatgcttatctcaagacatacgggctgccgaatgaagatgttcctgcacctgaacgggcctatgaactcgtcggtgatgaaaaatggatcgtggaagggaacggcaaagaagtgctggaacggattcaactgtgggagcggttgaagattattcctgtcgccgatccgctgatgctggccgtcaatcccaacgcatttcaacatgaaccgcattttcacctcattgttgaaaacaagaccacttatcaggcgctgcaacctgtattgagtgacacattttttacttcgctcatctacggtgcgggcaacaagatcatctccagcatcatccaccttgaagcacagctccatttggaaggacaagcccaccggctgtactatttcggagatgtggacctggaagggatcagcatctggtaccgtctccatcaaaaaataagggctgagccggccctcccgttttaccgtgccttgttacagaaaccctttttcccaggcaaagagacccaacgccgacagaacgaagctctgacggcttttatggcttatttttccgaagccgaacaacaccatctgcgggagatgttagcccagggaggttactatccccaagaagcattaacaacgttccaagtacgtcacatctggaggaatgcgtcatggacggcagattag

SEQ ID NO: 51890 - DNA, 1392 bp, Sporosarcina newyorkensis 2681
atggaggaagtggataagcagataatatctattttcaatacggatgaacagcagcctgaaatggcacgagctatgcgagatattatttcattagccggtgtgatgaaagatctgtcttctgaagctgtcttccattcaccattggagatgcttcgctttttacggattattgaactgatacacgaagaggcatacggtcttactgaaccgattgatagtgccgagacgctgtactaccgatatcagtcccgttttcgtgatgaagagccgccgtctaaatcgcgggttgatcaaattgttacgatacttgcaagcaataattggatcagtaaacaaacccagcaaattaaaatgatgagcgttgggaaacggatgatgcactctttgactcggcttgcaaatgattcccttgcgtattatttagaggatgacattggtcgttcactgtttcaggcgaggagagacgcggaaatcagtgaagcatatgacgataaaggaatttcaggcggcaatgtcatcgccagtatgatccgcaatgtcagagaggccaatgaaacgttgacagagcgggaattggaactgcttgcggatcgcaacgccttgccgcaattacaagtaattcatacgctgatggaagatttggaacgtaagctgcatgaacgctttaatcagttcgaaacaattgaagacagtcttgtattaagccatttaatgcaaaatggagctggagtacttgctgaaggtacaagcttgtcacttggaatggtcaataagtatcttcagtttatgaatgtacagcaaacgccgctcaaaactgccatttctcctgaaaaagttcggaggttcattacgaaaatgtttcatccgcctgtggaatcggaaattccgaatgcacaccagctctttagctttatggaacagggacagtacgagggggaggagttagatggcatctggattcccgtaaaatatgctagtcccttgtcacctatggatattgaaagcggaatagactttctggaaaactatgagcctgtcgtagcggatattgaagaggaacgcgacatagagttcaggcgagaaacattggaagtacaatcgatagacgatttagtggacgaggcgatctggctgttaacgaaagcgagtatcgacacagataagattgaacaatatcttgccgagaaaaaagaggcaggaatagaagaaacaatgattgagacgagttcagcggactggggagatgccattcgccaacttcttggaattgctgctatggaagcgaataaaaaggtgcagatcaaattgcagcaacacgtaaaagaattagataaagaatgggagtggattcgagatgacgaccgaaaattcaacattcgaaaaagagaatag

SEQ ID NO: 51891 - DNA, 690 bp, Sporosarcina newyorkensis 2681
atgacgaccgaaaattcaacattcgaaaaagagaatagcgaggactactcattaaacagtttacagtcattgcgcagtattttaactactcgagaagaacaaacgtttatgtccattctcttttcttcgagtgcgaccatccgggcgaataattttggtctatctcgaaaagaagtggaaaagttattgggcgtttccaaagaagacgcttattttcattcttttttatcacgtgtaaaccaagccgttggtcgatattatcgtttgatttatgatgaagaacgggatcaggtagtcgctatgttgcgggttcctgcccgttctgcccgtcatacattgtccgaggaagcactcgcagtactgttgttcatgttttatcaacaggaagtattgaagcatgagtttacattattaacccagttactggaagcgttcggccatgagataaagaaaggaagccgccgcattcagttagcaatcgatacattacgaaaaataggcgcactcgaaatcgagacagaatcggggaaagaggatgcgtattgtttaacggcgattggagttcatatgttttcggattcatttctgcataggatggtagaattcagtcattccaatcaattgtcaaaagaagacgtcatgaaattctttaatcgttataatttgtacgagaaggaggggttcctgtga

SEQ ID NO: 51892 - DNA, 2871 bp, Sporosarcina newyorkensis 2681
gtgatcccttggcgattacggtattcgggtattcgagattacgatgcggaagagatgattttagaaaatgcgaacgaacatattctcatcacaggacccaatggtgcgggaaagtcgaccatctcattttgcatgggtgcggttctgcgttccagtaaggtcgaaatcgaaggtttgaagtcgcaaaatatttcggaagacgagacatggagagcggcgatccattttttattcaagaacgaagggttatctcgtattgatggccctcttttcattgaattccgtctaatatgcgagcaaccgccgaagcagccaatcaaactgcgctacgaagttcatgacggcgatgaaatggaacagctggaattgcggcaaacctatcgctcaggtgacgccaataaaaataatctcagtgcatataaaagagagctgcaattcaaatataaaattcatcccgatctatactatttaatttggtaccagcaagaagttaaccaattttcggtcatggctcctgaagaacggttccgtatctttagtgaaatgcacggtattgatcggattcaaaaagattgggagacgagtctggaaattgtaaaagaggcacgggaagcttatgtcatcgcaacgaatcaacaaaagcaacatgagtttactttatcagtcgccagaaacaataaagatcgcttcaagaacaatcaaaaacgaattgttgagaatggaatgctgtttgcatcaaccacttatgcacttcaattaggtgctgagaatgaacgcaaagaggtcgaaaaatatatcgaagagcgcaaactggagttagaggaagtagatgatcaggcacaggaattcgttgaaaaactagaagaaaagaattcaaatactcaacagttacaggagaaacaacaagaagtgggggagctgctggaagaatccaaagtacaatccaatgagcaagaagaaaaaatagaagaagtgagggaggaagtcgacaccttacaaagtgaattaagtactctgcaagaagcgtattcgaaattaccttatccagaagtagaaacaaggaatcgactcgctgcggcgaacgaccaagttgagacgttaacgagaaaagaggaacagctcaagacgctgactgacaaagcagggcattcaatagaagagtaccggcaaagacaatcaaaattacaagcaactattgaacagtgggaagaaaatagtcagattcacacagaaataatgaatcgctatttgtcgagctatcaattagaaaaagatcttgctgacttaaaccattccttacaagaaagaaaacagctgctagaacagaaacaggctgaacatcgcatattcaaagacgaattggcaatgttggaaaagaatcaaattgaatctgagcggcagcaagaagccattcgccatatgaaagaacaaaatatcaaagcgttcactttacgtcatttcattaagttgatggaccaaacaccaattgaaaatgagcgtcttttcgatacaattaaatacaccattttttacgatgcggcaagctgtcagccgatcaatgatctttatcatgtctcattgaaaaaactcattccgaatcgggttattatagatttacctaatcttggtttgcaaatgcaagaagggctttctcaaaaagaacaaaatcatgcaacacgtgttctttggtggattgaacagttttttacttcggaacagccaacgattcaaaaaaattggttggtcgatacgcgtggaacaaggggtccgcaagaacggaatacgtatatcttaagtaaacgagctttggaagaaagaaaaaagtttcttatacggaaaattgaagaaatgcaaaaggaaattgatacactctctctgcagtcaaatgaagacaatgaaacttttcgtgtatggaatgcggatgttcaaaaagtaagggaagcagaagcctttctttcgttaaaggcagaccagcaataccgtatcgaacagcttgtgcagttgaaaacagagcaaattcatttagttgtacagaaaaaagaatatgaaacagaaacgaaagagatttggaaggagaagattaaacaagagggcgtggtcagtgtattgctagaatacttggcagtctatgaacaattcggccagcactctgaaaaaattgaacgtttacagaaacaacaacagttgttaaagcatttaaaacaagagctaattgtattacgaaataaagttgaagcatatgaagatgaattggatcgtcttcaagatagtttaagacaactgcaaagagagattatcgacttgaaagatcaagcagaagcaaatcaacgaacaaaaaagcagattgccaatcaactatctgaaaaagaagatgaacgaatcgcattgtccaaagacgagacgaagcaaaaagaacaattgaatgatctcagattactcgtgccggaattagtggatcaagctttaatggaagaacagctgcaagaatccaaatatactctcacagtcaaacaaaaccaggcgatggttggttttgaaaatgcacgtaatgaacagggaatcgatcagaacgcgatagaaaattttctgacgttggaacaagaggtgctacgcaaggaagaggagttgcattcagcgaaaaatctccttgaagaaaacgaagaacgtgctattcaaaatgaacatcgattggaaactgcaatagatatgcaagtgacgaagattaacttgctcttccagcaatatatgggggaatttcaattcgaaggtcaaattaaatttgaaaaattcatggataaaaagacaggccgatcttcaaattatttatttatgtgcgtaaagaaggccatcggggaaagtttgaagatgtga

SEQ ID NO: 51893 - DNA, 1212 bp, Sporosarcina newyorkensis 2681
atgcaaacggtgagagtgtttttggaaacccatatttgcaaagcaggagagtcgattcaacaggttggcgagaatgaatgggaaattcaaaaatggactgctcgtacatacaaaacattgggcaacgtattggcgtctgatgaatatgatattcatccaccggaagacattgtgaaaatgaatctgaagccaaattcccgcagagactcgttacctctttcagctgagttgaaacaagaagcccttcttaaagggtggttagttcaggaaatacggtttaaatcagatggcagaactcctttaagttcaacctaccgtatggggcctgggttagcggaatacgaacggctaaaaaggcaaggagtgatggaagccgatgaattattacgtcagacattacttggggagctcgaaatctctaaatcggtccttcatgagagcttcattcaacaagcgcaaaaattcattgtagaaccaaaagatgaggaatcttggggtaaagaaagagtgcggaagtttacggagttccttattgcttatctacagttaaaaagacagcaatctgatatggagttcaaagaaatcggtgccgtctattacaaaagaattggcggttcaaaagtgtttgacgcctatcgcgagccttttataggtcggattgaaaaatggatcgatgcgccgataagtgaaatcggcattgtcagtacaggttctattgttccaatcttttttgcaggaaatctaacaggcaaattctcgcaatattcaatcggtactgttcatgccacaacggaaatagccgtgacagatgaaagttatgtaacgactgcaacagttttatggttggtagaaaaccgtgcggtactgactagaatggcaaaagaagttgatttcctaaaggatacctcttcgctgatcatcggagtagatggacaagtacggggtgcgcatcgaaaattaattcagcagctctgtcggagttcttctattcagcagattgtaatatgggtagattatgataccgcgggcaggattattgctaaagatattgcaaatttaacagaaggactatctgtgcgttttatcggcaatgacggaaatgttttcacatcctttcaaaagtatacggagtggacagaaacgattagcgaagcggaacaagaaatgacactaagggggccagcggaatggaggaagtggataagcagataa

SEQ ID NO: 51894 - DNA, 1518 bp, Sporolactobacillus inulinus CASD
ttggaagaactagatctgcgcgagatcgtcagcggctataaggagcggatacgtcggcttgctttgtttgatccgctttatgagctggagcgcaagcgtgaacaggaccacgagaaaaaagacatcgacatgaaaggccttgggcttcttgcgctgctgtttttctttgagcagaagctgatgcgccagtataaggcgggagcgaaacaactggctgcttttttagaaaaaacggctgaaatgcagtaccggctggatcatgaagattacgagcgcctggcccgatcgattattcagaccttccgcccaaccaccgggaaaaaacggcgctatagcttttttaattgggaaaccggcgcggacgatggaattgattactcgattttgaaggcgagcagtttcgatctgaaaacgaatcagcagtactacactttggatgaggacgggcttgaactcgtttttgcgacgaaagaattttacagtgagtttcagttgtcgatcaatcagctcatgctgcgcaagcagttggacaagggcgaattcaagggcgccctcaggcagatcaatgaaatgcgcattgatgtggaaagccttgtcgagcgcatgacgcggctcaaacacgaaatccagcgcagtatcgtgtctgaagagacctttgagcgctataagcagctgcttgaggatatttacgggcggctgaaccgggagaatgatgaattcaaagagctgcgtgcttttgtgaaagagactcgccagcgcctgtacgcaaaggatatgcataagaaagaatcgcgtacctatgatctcgttctgcgcattgctcatgaactggagtcggtccattacgaccatacacggcttttgcaacaaaccggcgacttgaagaataccacgctgctcacggcgcaagaatccctgtactacacaggcatacaggccttcaatttcgatcaagatgtgtctgcgaaaatcattgccacgcctttgccgcttgaagcgatgagcggcgtgctccagccgtttctaaaggtagaggagaacaagcaatggtcgccactgaccattctcgccgatcagaaaatcaatgaagatcgtgaatcggcggatgatcaaggttttattaatgtttcttcagcggatgaatccttgccctatcgacgtattctgacgcaaaaatatcgagaattaatggctctgtttctgcgcgcttccgagcaaagcggcgttcggaaactgtctcaattcatcaattttctcgaagaaaacgagcactcggattgggttgagcagcgttatttttaccagttttggcttattctgcaccagcgttcaccgatcaggaatggggaaatagaggatgacgatggagcaaaagcggtgcttgatgaggcattggcgctgctcggaaatcgggtacttcatgtgcgtgaaggaagaggcatcattcaaacagccaagcgcttctcgattcaggagctgctgatccatgtggaggagggcaacaatgaactatcctga

SEQ ID NO: 51895 - DNA, 744 bp, Sporolactobacillus inulinus CASD
atgaactatcctgaacaaaaagtgattcaagcgtttcgcctttatacgattcttgctcgagacggcgctgcagcggaagacgccgtgcaaaattaccgtgcagatgatgcgatccgcggcttgctggacacctttgcaagagaagtggattgcgtcgtcatcagcacgagtgaacaactgtttctcgtgcctgaaaccaagctgtcaccttttcacaccagcaatgactggattaaacgccactacctgcgcaccggagcaaccaatggcgacctctatctgctctactttgccacaatgattctgtttggcagtttttatgatacttaccagagtcaggaaccgacgcggctgtttctgcgcctcgatgagtgggtacgttttatccaggaacgtatcgatcagttgaaaacgcatgatgaagaggaactaaaacagttggagcaagagttttcctataactggcggttgattattgaaaaatgggatgacatggatgacattaaagagaccgccaagaagcaaagcggcaacacgatcagccgcatgagttttattaatacggtcaaacggttcctgaccgatcaggatctggtgcaagacattggcaatgaagagatcaggctgacggagaaagcgaaaacgatcattcagcgttattttatggaagttgaatataataagggaatttttgaattcatatacggttttgaaggagatgaaccgcatgccgacgatcagtaa

SEQ ID NO: 51896 - DNA, 4413 bp, Sporolactobacillus inulinus CASD
atgccgacgatcagtaaaatccgcttgacaaatgtgatctacgaagaaggcaacaaacgctataatgacgaactgtttctctttgacggacataatggtgcgattctgattgaaaacggcggcgggaagacggtgtttattcaaaccgcgcttcaggcgattctgccgcataccgaccttgccgaccgcaaaataaaaaacacgttgatgctaggcggcgcaccggcacatatcgcaatcgaatggatcatcaatgagcggccgagacgttatgtggtgactgcggtctcactttttacaacgaagaatgcgctcgattcgctacgctatgtttatgaataccacgaaaatgatccaaacggtattgaggggattccgtttgtccgcgacatcagaggcggcaagcgtcctgcagatcgcggtgaaatgcaagattattacagcggcatgcacgagaagacgctcagtgcgcagacctttaagacgatcaaggactataagtcttttcttgaggagcaatacaacatcatttccagcgaatgggagagcgttgtcaaaattaacagctctgagggcggcgttgaagccttttttgatgaatgcaagaacacgagtcagctgtttgaccgtctgctgatcccgacggtggaggattcgatggttggccatgaccgccaccttttcgcggatttgtttgaaaaacagcttgagagtctgaaaaattatcagaagctgaaagagacgatcgaagaaaacgagcaaatcagcagcgcacttgaggagtatagcaaaacttatgaggcgcttcatgaacgtgaactgacctacacgaaaacgaagcagcgggcaaaaggggtctggaaggaactgaccgatcagcagcacaagcagcaagcggagcaagaggcgaatggcgcgaagcttctcgaatggaaaaaggacagctttacgcacgcggtgaaagcggaatcctacaaaatttttacagaacaaacggcccttgaacaattggaacaagcctataaaaaagcacttgctgcacaaacggaaacggaagagcagttgcaaaaagatcggcacgcctatgcctcgttgcaatgggcgaaagcgacggctcagcataaggagcagatagagctgctccaggagtgcgagcggcagctggaggcgatggatcagcgtgcagatgcgcgcgagctgcgcaatcattttgaacgggctaagcggcagctgctcggctgtctgctgcacgaaatcgaaggcttagaaacaacggagcagcagctgaaaacggacctgtttccggtcatagagcaaatcgatgaacaagagcagatgcaaaaatcatgtagcgagaatgagaaaaagctccgtgatgcatgtgcgaatattgagggccggttgcagtcacaaaaggaagcattggcacaacttattcgtgagctcccgatcaatccggagcaggaaacggttaaagaccagcttgtaaaatggacggaacgcgatcaattcttagacgagtcaatcattgctctgatgcagaaggagaaggggctgcgcgcaagccaaacggaacttcagaaacaaaaatcagcgcttcaggatgagaagaatgggacgatgcgtgaagcggatcagctgcaaaatgcactcgcgcagatggagaaggcagagcgcggaatcatcaaacagctgtcggaactgcgcgcgcaatggggcggactcgaaaccgtctttcttgaccaggattcgattatggagcggctccgtgagacaatggatcgcctcgctgctgagcgtgaggaacttttatataaagaacgggtcgctcgccgatttgtcgatgatcacggtgatcaggagcagttttttggtgatgcttatttggacaagcgtctgccgacatggaaaaatcaattcgcttttctggcgactggtgtggaatacttgcaaatggtggatgattcggagcaaagtcggatgctggggtatccactttggccgctcacacttgtaaccacggctacggaaaaggcgaaactggtgaaaaaattggatcaagtcgcatcgcgtctgcaatatccggtcactgtactttcaactgaggaagcactgtcggcggatgtgcaaaatgcggttcagtgggtggcgccggagcaatggcgggacaatacaaatcccgattcatttgccgaatggaaaaagcggcttggcggtgaagccgctcaggcgaccgagcagcgtgtggcgagtgaacgcgaatccgcacgctgccagcagacgctccatgcgttccgcagctttttaaacgaatacccttatcagacggtcgaagagaagcgggcgaaaaagaacgagctgcaaaataatatcgagacgctcattatgtcgattcgcaagtcggaacaagaagaagacgatttggaagccgagctgatccgcagcaaggcgaaaatcgatcagttccgtgatgaacgaagcggattggcactgtatatggaaaaagcgcgccgcgcgcttgtcatcgagaaaaccattgaagcagagcaagggcttttaaaacaagcgaaagaaaatgtgcacgccgcagagcaaaggctcgcagcagtcttggatgcgatcaatgcgctgaacgagaaaagaagaagcattgatgctcggctcagcaatgtttccgccgaattgcgtatcttgaaacggaatgatgactatctcgctttgcgcgccttgaccccggagaagacagacaaaagcaaagcggtcatcaaggaacagatcaagaatttagaaatgcgcttgaatcaaatcaacaaaacgcgcggcgaatgggaagaaaaacgtaagggtgcagcaagcgaaatcaagcaccttgacgaagccatgagccgtctgcgcctcgagtacgacgccattgatgaaacgcaagtattcccgggtgacggtgatcagcagctgatcctgcttcagagccgaatcaaacaacttgccaaggaagaaaaacgccgcgccgatgccgcacaggcggcgcgatcagaaaaggacaaacaggacggaaaattgtccagccgcaaggaacagttccagcagcattttccaaacgaggccgttgtttctttccatgcctacgcggggaatgcggcccaggatctctatgacgaaaaaaaacgtctgaacgaacgtaaaagctatcttgatcaggaatccagtcgcattgagaaagagctgaccgccatcaatcaggcaagaacgcagcttgataaatttgaaattgcgcatcacttcacggcaccggacattgaagcgattgcgttaaccagcgaagaaatcaacgattttacctataatcgtaaaaagtctgtgtcagggattactcgtggattagaagaaaatcaagccgatgtgacggccggtaaagctgaggttggacgtgcacagcagacctttaagactttttgcaggacgcagatttccgatgttaagctcagacaaatggcaatcagcggcatcgaaacaaaacagagctatgaagagatcgtcgcattcaagaaaaatatgtcactgcggatcgagcggatttcccactatgcccgtgagcacatccgtcaaagcgacaaggatcttcagttgttcatcgatcaaattcaaacgcatttgcgtacgctggcggaagaactgcggcagattccgaagaaaaccaaagtcaaagttaaagacgattggaaacagatttattcctttaccataccggagtggaaagaagaggacggtaaagcgcgcatccgcaatcacattgaatggattctcaaaaagctgaaagacccgagcttcttaaatgaagagggtcggcaggatagtggaaaaatacgtaaagcgctggatacttggctgcaatcgaaacaattgcttcgcgagatcatcggcagcgatgtcttaaaggtgacgctacgcaaagtggcaagcgacagcacggtgtcgacgcgttattatacatgggagacgagtaatatttggtccggaggcgaacgctggagcaagaacatgacgctcttccttggcatcctcaattatgtcgcggagaagaagaagcatcttaaatccaatggacagctgcaccgggcggttattctcgacaatccgttcggtcaggcatccagtgatcatgtcctgagcccggtgttttttgtcgcccagcagctcggtttccaaatgattgccctcacggcactggcagaagggaaatttttgcaagactatttccctgtcatttacagctgccgcttgagaggagcatccgattctggcaagcaagtcatgaccaaggaaaaacaaatcagcaaagcgtactttgaagaccacgccccgcaaagccttgagcgcctcggtgaaacggagcagatggggttgtttgattga

SEQ ID NO: 51897 - DNA, 1017 bp, Sporolactobacillus inulinus CASD
atggatgaagtaacaaagcgtattgcaacctttgcaaagaaaacgatcaatttggatgagcttcaacagctgctcaatccctttttcagctcctatacggatttcgctgaagctgtgcgcgaatttgagcgtcatcaggtgctggtgatgatccgtgcttcggggcgaacaatccgtacacccgcgcttgccaatcgctaccgaattaataaaagcgcgatgagcggcgactaccataaagagctccagcactaccggagcaagctgcaccgagcgatcagtctggatagctattatcgcagcgatccggaattgtgggcgagcgatctgcctgacctcatcaaagtggaccactaccttaagaaccatggatttccgcaagaagcggttccggcaccggagcgcagctttgaactcgttgccgatgaaaaatggattgatgaaaaaggcggaagggaactgcttgagaagaccggcttgtatgcgcgccttaatatccttcccgtctccgatccactgatgcttgcgatcaatcctcgattcattcatgaatccgaacaaacacatctgattgttgaaaataaaacgacctatcaaggcttgctgccggtattaaaacagacacgttttgccacactgatttatggctgcggtaaagcggtgattaaaagtatcgagcagttttcgatgcagtatccggttcgggcagcgcaccgctttctgtatttcggcgatctggatcgagaaggactatcaatctggtattcactcaatcaaaagcaagcagcagagccggcacttcctttttatgaggcatgtctgaagaaaaaggcggcagcggggaaagcgtaccaacaggcgcgcagcacggcgatcgatgcttttctcacccattttccgaaaccggaagcgcagcaaatacagagcgcacttcaaaatggaaactattatccgcaggaaatcttgaagactaatgaattgcagcagatagggagggaagccgattggaagaactag

SEQ ID NO: 51898 - DNA, 1470 bp, Brenneria sp. EniD312
atgtcgctagagtttttggagcaggctcgtaatgaatctatggcacgccgcgagctgactattcagtctcatgcattgctggtcgtgcggactctggattcaatctatcgcatcctacagcgcaatccgtgggaaggcgtcgagcttgatgcgctggcggctatcatgcatctctttgacgccatgctttattatgctgaccgcgagcgccaacccggtatgacgcggaaagaagcggagttatgcctggttgggcacctcaatgaagcatatccgggacaagaagcctcggtctacgcgcaggttgccagcaagatttttgcagcgattaaagaccctttccgtctccgttattacgacttcacgcaacgaacgcattccgaagaacagatagtccgtctggtccgctacgaccagctatccggctcagatgaaattctctggtcactgaccgatgaaggaatgctgttctataccctccgtttggatgaaacgccgattgaacgcgcggctattctggcctggcgcacgttaaaaaccatccgtcgcggtgagatcgacaaggcagtgcatcagattcagtcaactcagaggcaactggagcaatatctgattgggatgcggatgaaagtacgcgccgctcagtctggtgatttgagtgcatcctatgcgcgggatattcgtccggtacttaatgactcctttgataagactggggaagtgctggagcatattcggaccacgatgtcggcgattacggaaatgctcgttgatggacgctcagaattacaccccgataaattaaataagctgcgtaatgcgcaagagatttttgccgatgtctgcatttttactcagcgctatcaagactgcttacatgatgtgaacaaagattttgagcgagctcgcctgaaactcattattcccagagataacaccctttttcgtgaaacgctggaaaaaggtgcactcaaacccttgctgttacattcccccgacactgtcgaaaaggaaatagatgatctcatcacacgcgcgctggctccccgaagtcaggatgatgatcgacacatcctgtttgaccttgaggcgctgttgaacctctatcttgatagatttgaacaagcgctgccccatgagatacaggaccctaccgaccagcccgtagctattgaaaccaacctgtgtgggatccctgagtctgtcattaagaaatgcagcgattgggtgagtgaccggttgaagaatcgggggcatgtgagctttagagatgttttcgacgcctatgagtgcgacgaattgtccgaacaagaacaacaggtttgtttacttcatattggcagtgtggcggctaacagtgatcccacaatagaggtggagataagcggcgacgctatcgaaacagcgcgatggtgggctagcaatttaaaactgttaacgatcgctcccgtacaccccgttgaggagtag

SEQ ID NO: 51899 - DNA, 4437 bp, Brenneria sp. EniD312
atgtggctgattaaacgggtttatatagatggcgcaggccatgaagaagccttctacaaagacctcacgctggactatattggcctgtctcaagcggtcgatagtcctgctattgaacggcagcgctcgcccgtcaggaatgcgaaggtggtgaccagtacctatcagcagcttgttaatgggggcggtaagtcaacctacatcgcactgctgttatcgatttttgagccctccgttagtgatttcacccaatacctggctaaccgtcggcaaagtgaataccactaccgcaattacttctataaagagctctctgttatcctggtagagatggtcaatgaatcaggccaaacgttattactggggcatgctcatcagcgcaatggggatgatgttgaccgcacgctgtttatttgtgatgagcctgactccctgttgggggcgccgtttgacgaagtcccttcttattcccgcgcggaacgcgattctgagctacgttcctacgctaatagcctgcacagcttcgaaagctggcttaatctcaaagcgggcagcgagggggggatgcactggcgcaaaacctccaggcagagcgaatggcgcgcatttttgctggaacaacaaatcaacgttgatctcatcaaaacaatggtgaccttcaactccgaagaaggtggcctgacccgttttattgaatacaaaactgagcatgatttccttggtgcgttctttgcctgcaccatgtctaaagatgcaactgagcggctgcgggaactggtagcgcatgaagttgaacgtcagggagagctagaagggatccgtcgtaacgagtcatttctaaaggacgtgctggctaactggcagacgtttcttgaacccgccaaacaactggaaagcactcagacgcagcagcaactgttggatgacggcttccgcgaatcaatgcgcgatctcacagcttttattggggaagctcagattgaacagatacagctagaagatgacacgggaaacttgcaaaaacacattgaccagaaggggtttttgcttgaactgttgggcaagcgcagagcgctgcttgaatatgatctcgcacagcatcagctcaacaaacaaaaaactagggtcgacgcgcttaaagatgaagccgatgccaatcaacgtcaaattgagattactcgtaccgctatagactacaaagcttatgcgaaggctctggatgcataccgtcaggcagacgaagatctgaaggtattccaaagtgaaacggaaaggccactgcaggtgatttttgaacgtactgctggcgaggccttgggcgtattagggtgggcaatcaacaggcatcgccagcaggaggcgaagcttgcggaagagcaggggcagataagcaaggaaagtaatgcccttagacagtcatacgacaaactacaaaagacgctgggcggcctggaggcggatcgtgacagatataaaagagacaaacgccagggcgaatcgcaacgggaaaaactatgtgaagttgggttgatccaaaagggagaaacgcctggtgctgctcaataccgactggaattaaccttacatgatgcgcagcagagtgaagagctggctaatactgcccattatcagaaagagcaggcgctggaagcgcagcagaatgtagtgacaaatgcgttagttgagcaaagtaaggcccagcagacgtgcactcaagcagatctaaagcaccagtcggcaatggatagcgcgcagggtttagtaaaaacctatcaaacactaccagcgtcaacgcaacatgatcttgacgttgaggacataaattggcacagcgagcggtgcggattacagctcgagaaggtattaaatgcgaatgctcaaacgctgaatggaatgaaacagcgcttactgcaagcacagcacgaactggaagagttaaaactgacggggcatgaactggtcactaagcagaacaatcaggcgcttgaagcgttctatgcgtcgggcattgcacgggataagctctgggcatttccccactatctggcctctgttttccacgatgaggcggagagtatcgctgcagtgatcgatcatgatccaggccgttacctgagcctagtcgcactcgacgatgcaacttttgagttagtccacaaaatcagtgagaaactgtcctggaagaaagcgcctattgctgtttatctgctggatgaagcacaggatctccgcagagaaacgcctgaattggtgcaggtcgtcctctcaaaccccgataaacacggttatagcaaggccgcttacgaagcccggttgcaagagttggagaacgctgtagcgtcgcaggagacctgtgtgaaggctgcggagggcgcctttaatatactggaatctttcaggggggactggcgtttgcattacgatcagtatggtaaacattgggcaaaactggttgaccaccgcgagcaggcccgcttaatgttggaaaatgctgatgtagcacttaagcaggcggagcattatgcgcaaacactgcgcgacgagaaagcggatgctctggcgcggttaaatagtgcccaacagcaaaaaattcaggccgaaaaagcacatgataaactgagccgttttgttgaaatggaatgggcgaagcgtgaaacggcgataatgaaactggaacagctagccgagcagattcagcgaagcgaggagactcttgttaacctgagggaggcgcaagagcggcagaaagagctcgcggataacaagcgcgccgaacaaacctatatcagtatccagattagcgaatggaacaaactatgcaacgagccgttctattcagagattacggcgactgaaggtatggaaggacgaagccccaaagatgcccatgagaaggctgctcaggcgttcaaacaattactcgaagcagccaacggtgatcaggtaaccgccctcaagcaacaacggaaagatgctgaacaggcacaatgttacgcctctgagcgtttgacagctcaacccatctacagtgcatatccggatgaggtaaaagcggcggctatcaatgagctagcggtaattaacaacagcatcgcacgccttaacgaacagcagaaacaattcacgcagaatctaattaactcgcaggtaactctgcaaaatttgtcccaaaattgcgcgaatgcccgcaacgcgcttgatgaggactttgtgtgggaagagaaacccgtcgagatagaggcaatccaaacgtctttggctgaaatcgccaacagcctccatgaaactgaataccagctcaaactccaactggagcaaaaaacgctgctgttgaaaaagattgaaaatgtgaaagaacgactacagaacgccaaaacagctcaggcgacgatccagtccatcactccgagttctgcggcgggtctgcctggcaggattctgagtatcactgagtatgctgacgcgctgagtaggcaatgccaaatgtacgcaagcctaaaagaaacgcttaaacagcaaaatatacgtgtcgctacggtctggggacacttccgcaaaagaatcgaagaagagttggtcaaggatccagatatccgagccagtcaggaatacttacgacagttggactcaatcgcaacttatcatgaagttctgggcgatttggacagggtcggtacagggatcacgcaggtattcgaagcggtgcaggacagcttggaacaattccagcgttcgattgaactgactgtcacccatctgactgcacatctggagggggcgattaaactcctcaagcgcgcgatgtcggtcaaaattcctgatgactgccctgtactgcctggtcgccccattatcaaaatgactgaccggttccgtgatgtcaccgctgatctcagggggtttgccagtagccgcttacagcagtggatagcccgagggcaggtaccccgtgcgccaaaccgggacgccttgacagcagatttggttcagtcggtatttggtgaaggggagctggaagttcgtctgctgaagacgaatgccagtcgtccacaatggactcctgtcacccggctcgaaggctcaggtgggcagcgcctcacatctgcctttttgctgtttgtgacggtcggcaaagtgcgtgaatacgatacgggtatttcaagtgcaggattcttactggccgacaacccgttgggtaaatcgaatgctgatgacttgatgcgaattcaaacccaaatggccagggcttataaaatccagctcatctacttgactggcatctcggatgaaaacgcccagtcgatgtttgataaccatctcttcctgaacaaagttcagaaactgaggcggcgcgatctggtaaccgttgataaagaacgccacgccctgtggtcggcttccctggttgctaagccaaagttcgagtcagtcttttaa

SEQ ID NO: 51900 - DNA, 1044 bp, Brenneria sp. EniD312
atgatctggctatcccggctggagtcgacagcaaataagcaccgtcttgccgccggtaaggccgtccgaacagttaaagccaatgcggttctggatgaggtattaggagcacatagccaagaggctttgcgccaggatgttccaggtttactgagtcaggccgttacgcaactgcttgaaggggactggcgggctcagcctaagcataaagctagctggcatcgctactggcggggtatgaacctaccaaatatttttgtttacgaaggtgccatcgtccctacgaaaactgcatcagaaatagcctggcatccttggttggcgcaacgtattacagggcaactgacactgccaatcaaggcacgtttacagcagttgaatacatatctctttcaccaaactaagggcgacaagccactctttccgggcttgctcggacaccgtgagcggtctctgctaatatttggtgatgaaaaagcactggattccatgccgcctgacggctggaagcatgtcacactgactttggctgatatgggcgcgtttcgacgtgctccgcctttaccgtatgagtcatcaggttgccgcgatcttccggctattattgttgaaaactctgatgtgtattatcgactttgccaacttaatcgagttcagactcactggtcactggttatttatggcgcgggtaacaaagtgtcaggccaagcagagtgcgtgtcacaacttctcaaggtcgaacaggtaaaacaactgctctattttggcgatttggatgtggcgggcttaaaaatcgcccatcagctgcactgtaagctacttagcgattacgatatcagcctgcaattggatgggtggctctatgatgagctgatcttaaattgctgggtgacgcctgaaggaaatgccaacagcgaacggtttgattttgagtcgctgtgtggttggatgccgcgctttgttttacgagaaatgaagatgctgctcgcgacccatcagcgtctgcctcaagagggggtggcatctttgggtttggtcatatag

SEQ ID NO: 51901 - DNA, 1566 bp, Desulfosporosinus meridiei DSM 13257
atgtttgatctgatggagcatctcaaagatctggatacccgaatcgataatattaagagctataacgccttttttgcaattgcaaattcgatcagcaaggacaaatgtccttatgatccttatgtaatggttttcgggttactcacttttttattctatgaaggaaaactggctctgaaaaaaattgatgttagcagtattattgatttttacaggaaacttatcgctgaaaccatggatgctgagctaagccttgacgatgcccgggacttgacctattacctcttagaaaaaatgcaaaacaaaggctcgggatttgatctgaagttttatagccttaaatataaaagtgaacgagaaaagaaaactaagttaatcgatatgaaactggatgaaaaagcggataaaatttattactatatcaccaatgagggattagatttctatttaaagaccaaagagtttattgatgaaagccaggtaaccaccagtctattgatcttccgagcgcaaatcagaagcggctcgttcggtaatgcgcttgagacggtcagagaacttaaaatccgcgtccatcgccgccttgaccaaaagaatgaactgttggatctgcttttatatggccaaggggaagagagcgagaagtacaggaagtatcataacgaagtcagtcttttgtttgatgaggaagcggcgctttttaatgatgtcagtgagctgttaacgaaagttcgggaagagtatctggataaaataaacaaaaaaatgctgaccagaaaagatgaggattccctgacaacactgacgaaaattgaccaggaaatgaaagaaaccgtatttcttcataaaacattgcttaacgaagctgcaagccttccacgcgaaaaggaaagaatccgtttaatgcgtctgaactccgccttttcagtccgctttggctttgagcaagaactggaaaagctgatctcccaaaacactaatcctgaagggctgaagttcttttttgaaccgctgcttatgcccaatgtaaaaaaaacatttaatatcctcaaagtttttgcctctcagaaagttacagccgccacagaggacgctgatgatgaaatcgaagaccttgaagaaaaaccctatacagaaaaatttgatgatgtggtcaatgcgagagtaggaagcaactttacgttctatgtgatgtcgcttctgaaccttcttgcagaaacctctcacttcgatttaaacgactgggcgttaaacctgcatgaaattcagggaccggaagctgtgaaaaacgcggactttatatcttttatcattcagcttaaccagttcgaaaaacaaggaaaagaacgcgtcattaatttaaatgctgtcaggcttaagtctaaaagcgaaaccattgaggagaagtttgacaacgcttacctagaatccctgctgagtcaacttgccccccgaagcttggcagagatccggatcctgcccgagcctgagaatgatattgagttgggatatggcatcaaggtcacgaatctgctgtttagaggtgtaagcaatgattacgaataa

SEQ ID NO: 51902 - DNA, 747 bp, Desulfosporosinus meridiei DSM 13257
atgattacgaataaagcgacgctcgaaaaggccctggaactgctcaaaaccttgctgaccaagcaggaaatcagcagggaagacgacagggatttgtatgaggattatctttataacagcgaagttgaagaaattctgaatttagtggccgaaaaactggagctagatatctatagctacaacgaaaaaatattcctgacacccgggataaacaataaattatttggctatacccatgaagacttaagaaaagcgcttccttatgtgacgcggaattcggaactttttatggcctatttcattattctggtcgtcattaccttattttacaaacaatccggcgcggacaccaacagaggatacgtcaatatgaccgaaattgtggaatccacaacccaaaaattagacgccctggttgaagtggaaaatttagaggctgtcagctcggagtattcttttaactttgccgatattgccaaactttgggagaacaagtcttttgccaaacagaccaggttcggggaaatcagcaatctcgcttccaccactaaaatgggatttgtccatggagtctgtaattttctccagggtcataagctcatcaaagtagttgatgagcagggcctgatcgtgccaaccaaccgctttaaggggatcatctataacttctttgaagataaagagaacaaatccaaattattaaccttcgttgaaaacctgggactggtcaatagggaaggggaataa

SEQ ID NO: 51903 - DNA, 4377 bp, Desulfosporosinus meridiei DSM 13257
atgacacagattaacagaatgagggtcgtcaatgttgcgttcaacgggaacaggtctcattttaaagacttcaggttaagttatttcggaaagtcagggacctatgatttatataacggcggcggaaaatcggtattgctgctgatgcttctgcaaccgacccgcccaggctcaaccctcgacaaagaacagcccttgcgcaatatatttatcaataccggttccaaccacacttctcactccctgattgaatgggtccttgatgaaggaagcgcttataaatatcttctgaccggtttttgcatccgggcgaccaaagacactagcggtaattctgcagatcatgaagatcccagcagtgatatcgttggtgtggattattttaattactatcacctttacaataatccgaatgaatttgatattaataacattgaacttgtcagggaagcagagaataaaaccacctatatcggctttgattctctcagagatctactggaagaaaaacagaaaaccaaaaacatcgacatttaccccatgagaaaaacaaaggactacaaaagattcctgcgccactatggcatttatgaagccgagtggaaaatgatcatggacctgaatcaggatgaaaattttgtagcccgatatttccgttccaacaatacctcgagaaaactgatcgaaaacctgctcattatgtttatcgaaaatatggaacacaatacccttcaaaatgttagggattctcaaacctccggcatgctgctggccaaagggctgatagaaatccgggaaaatttagaacgactgcataaagacaaactgcaaatcaacgactttaaaaagattcggggttattatgaacaagtaaaagatctgactaagaccttaagccaggactttgcggattatgaagcgctgcaaaaacagtttgtgatggtagccaataagatcaacagtgttattgatgaactggaattggaggcctcccttattggcctggatatttccgaaactgaccaaaaactacaagcgctttattataaaaaagactgcttggaagtgcaggccaaaggattggcaaaagaaaaggtggattttgagatcagtttgcttcttgacgttatagaagatttcaagagaaagatcgaagatgcggaacagaaaataaacgagtcaatggctcagaatagttattgtgattacaaagatgtggaaagtgacattgcagtcgcggaaactgatctggaaaacttaacgaaatctggggaggaaatcgatcaggagtggaatagtgccggctataactataaaagagaagttgaaaaacaaatccaggcctttagcctgaacctagaggacgaaaaccatcaattgagttctctgctaaaaaaagaaaagggcttacgggatgagaaagggggtcttgcagaatcacgagccaaaataagcagtgatatcgagaataaggagtcgcagttggaagacataaataaagagctggccaaaataacggcctttcttaacgaaagcggccggataagtcaattattgcagccttcggaaggaatccgcaaactatctggggaaatcacggactgccagtttgcactaacaacagctgcggacaatatcagtgattttaacctggagctggaaaaaatcaaagaccttttgacagaatcaaagcaccaagtcgcaatgattgatcttgaaatagtcccttttcagaagaaatttgacgagattatccaaaaaacctcagcgtatcaaggaatagcgctgacgcatagttttaaaggagagcctccggatcttcagcctcttcttgaaagaaacaaggcagaattggaaagtcgaaaatatgatttgaaagcgcaaatagaaataacggctcaaaaacagcacttgttagcggagaaaggttactatgttcccaaccaggaagtgattcgtttacaggagtatgtaaaggctaaattgggagatgcctttctgggagccgaatggctgagtgatgtggaagataaagaagaacttttgcagcaaaatccgctgcttccttattcggtattagtcacgaataaggtatttgaaaagcttaagacaaacctcgcaacctatggtgagagattcggagattatgctatccctatccaaaaccttgatgctgtaagaaaaggacaggtctcaccaaatggaaacatgatttttagttccgggcggaccgaactctacacggataaaagcaaatttacagcttatacccattctttagcccaggaacaggctaaattggaacaagaattaaaaacaatcgtcggtgatatttccattcttaaggctagcctgaagtttttagaaacctatattcctctgttgaatcaaaaagaggaacttgaaactatattaacagcaaaagaagaggaaaaggagcgggttgaggcttcgatcaaagagaactcatggcggatgaaagaccaagaaaggctgcttggaagagaacagagaaccgaaaagaagttggaagccgatctggaccatcttttgaaagtgatccggcgattggaaacttatcaagaaaaagatgaacaggcttccttactccagaaggatattaaatctttacgagaccggttgtcagacattaatcaggatatagaatggaaagatcatgagataaatgaaattgccgccaaaatagaaacgagcaggcaggcactgcaggatatacatcttcagtggactttgtcgagtttggagcagaaatctttggcgcattttgagtctggaattttcctggattacggatatgagcaggccaaaagcagatttgaaagcctaaatgccagaaaaagcggaatggttcagcagagggaaactatcgaaaaaaaattaaagatttgccggggcagaaaagaaaactttgaagatacgcttcgaaattttggctttgaagccggctattttcgtgggcttgaagatgccggccatcctgttaagcggatcagtaacgaatctatggctttgctcaaaaaacaaaaagatgatcttaacagggagttaaagaaacaggataaatctcaaaaggaactggaaaagaaaagcattgcgcttgagacctcaatcaatgaaaaaatggagagaatttatgcatcctaccgccgagcgtttgaaccggatgagtctctgggcctagaagaagagattgatctaaaaatcaaagaaactcaaaatgccattgatgggaatgaaattcgaaaaaaagagtgtgtaacaaagcaaaacttggctatagaaaaaaagaatcgccatcagcaagaattcttcaaattctctgtaccaattagggaatttggaatcgtaaccgatgaaatagcctctgagattttggattttgaagaactgaacggtcagtatattggcaataaagatcgcattaaacgccatggcgatctgctcattaccaagattaagatatttattgaagatgccaaaaatatgtcagtccaatatgccgagcccctccaaaagttcaggtttcccggaaaactgtcggagtcagagaaacaacttgaggaaatcgattattgtgttgggattatcagtgataaaatcagcgaaattgatgaagagataagcaccttgaaggggtataaggaaaaccatgttaatctgtgtttgcaaagagcagaggaaattatccttgagttaaagaaaatcaataccctgcccgctattcaaatcaatggccagcttgagaacatggtgaaaattgagtttaaagatttttccgaagaggacaagcgggggagaatgggtgaatatatcacaacccttgcgcagcaggagtttgagatcaaagctttaagccagaaattagcggctaaatatcttgtcgatcggattacggatctggaccgggcgaaggttaaactttttaaagtggaagcggactcagaagaatcccggtatctcgagtggaagaatgccgtaggttcaaccggtcaaaaatcctccttatatattgtctttttgatttctttgatttcatttatccggcttattggaaaccaggccgattttgggaaatcgagcaaagttctctttctggataatccttttgcaacgtttgcctcaccttatctttgggatcccatctttaaaatacttaaagaaaacaatgttcagttaattgctttcgcgcatcagatcaacagccgaattgtctccggttttgacattaactatatcctgggagaagaaatagcggccaacaggaagaaaataatcgttaaagaagttaaaaccgaggttgacatgcaacaaatggactttgaaagactaaactatgtacaagaaaccttttattaa

SEQ ID NO: 51904 - DNA, 1074 bp, Desulfosporosinus meridiei DSM 13257
gtgcagatttatccaatactattaggttacgtgaaaagcgaacagcgcagcggaaaagcggtaatgaaacttgaagatatgatcagtttcattaaacagaatcatccggagtttaaaataaaaatagatcaaccggatgggtacagggaattgtatgatgccattaaccggttaattaatgaagatatcctcaaaaagatgagcccccgtaaaactacggtcgagcagcctcctttggcactgaaatacagaatttgcaaagaggatgatgaagattcaactgggttaaaaaaggaaattctcaagttaaatcgtgctttcagtttagagtattatctctctaaccccaaacagtatcttcaagataaacagtatattcaaatccttggggattatcttcatcaagaagagaaacctctattaagcattaatgaactatcttatcagctttttaatgacgaaaagttctttaaaggaacagatgaatcgcatggggaagcaatattaagaaacttaggtcttacttacgccgatttgaattgttactatgcctatgagccctttatttatcatcttttttcacaaaccaaccagacaagaaaaaccggactgattatcgaaaataaagacacatactggtcattcgtccagttgttgtctaaccacgcggtatccttagatattgattttttgatttacggtgagggtaaaaaaattatcagcagcttgcgctatctggaatttttaaagattgatttagattacctttggtattttggcgacattgaccgagagggggtccatatctactttaatttaagggaagcttatccacggcttaatatcaaaccctttatttcaggctacgagaagctggtcaatcatacttttgatagaatattgaataggacgcctaaagcacaggcttacagaaaagaggatgccaaagacttttgtgaccatttttcgtctctttacagggacagaattcggaatgttttggataaaggtctctatatcccccaggaagggttatctctcgccggtttgattcaggagtatgcctatgtttga

SEQ ID NO: 51905 - DNA, 1401 bp, Paenibacillus terrae HPL-003
atggaaaacatggatcaacggttagtatcaatatttgacgagaatgctgacacacctcttgtccgggaatcgctccgggatgtgattaagctgtcgggtgtgttgaatgaactgcgggaatattttgaggaaccgctaaaagtactgcatatgctccaactgcttaatctgattcacgaggaagccttgggcctggagcagccgcttgaaaatgccagcgctctttactaccgttaccgcaatcgttatgggacagaaccgcctgtatctgtagacaggttgttgaatgtactggaaaaatataattggattatgcgggggaagcgccggattttaatgatggatgttggaaagcggttgatggatgtacttatcaggcttgccaacgattcccttgcttattacatgagagatgaaattgccagatcgttatttcaggctgcgcgtgatgcggatctgagcgaagcttatgatgataagggaatatcgggcggaaatcgattagccagtatggttcggaatgtggaagaagccgttgacaagcttcaggagcgtcagcttgaatttttgtcagacagacatgctctcccacaggtgcaaattattgtggaattaatgggacaattggacaagcgccttaatgaacgaatggataaaatgaagacgtttgaagaaggacttaaatgggatcgtttattcaaaaaaggaacattcgttatgctacaaggtacgcaaattagcttgtctacactgcaaaaaatattaaagtttgcccatattcgagaaacagaaatcggtgtacaaattgattcgatggcttttaagcagtatgtgatagactcctttcataaaaaaccggattctgcacaaccgaacggcacagaaatattgagctttatggaacaggatcgggatgaaggggaacgcctggacggattatggattcctgtaaaatttgcttcccctataccagaacggcagattacatctgcaattgaatatctggaaaattataagccttctatagacccgatagagtcggacataatagaggagtttacggatgcaaaagaatggacagagcatgaactgaatgatcatatggagaatgcggcttggcagatgaccaagacaatgatccgcacagaggatgtggagcgcgttctctccttgcacaagcaaatagggattgagcccctaatattagaggctggatcagaacagtgggctgatgcaatcaatgcactgctggcgatatcggctgtcgtgtccaatcggcaagctgaaatttttagagaatcttctgaggcagaagagccggatttggaagagtcggctagagaaaaggagtgggaatggcttgatgaatcagaccgacgatatgttgttcgaacaacctga

SEQ ID NO: 51906 - DNA, 714 bp, Paenibacillus terrae HPL-003
atgaatcagaccgacgatatgttgttcgaacaacctgaaacgaatgatgataactatgttgataattatcaatctttatccgcaatggcgtccttgacggctgtgttaaaaccggaagaggaacacgcatttatgcaaattatgttttcctcttcggctacggtgcgcaaagacaactttggtctttcaaggcgggaagttatgcgtctgcttaagctgaagccagaagaaatagaggccttctatcaatttattgtgcgtgttaatcaatcggttgcccggtattttcaacttgtgtacgatgagcggaaagatcagaccatagtgctcatgcgcgttcctgcacagcaagcaaaggaaatgttatctgctgaaagcctgtcactgctcatgtttattttttatcatcaggatgttctgcaaaatgaattcaccttattcaaacaactggtcgaaacgttcggtcatgagacgttagatattcgtagaaaaatgaaatcgaatcttgaaccattactcaaaattggagctatcacactttttaacagtgatacggatgaggaagcctatgagcttacagccatcggaagccggatgtttggcaatgcttacttaaagcgcttcacagagtttagtcaatctcaacagttgcatatggatgaagtgctaaaattttttaaaagatataattttggaggcggagaagcacgatga

SEQ ID NO: 51907 - DNA, 3213 bp, Paenibacillus terrae HPL-003
atgattccttgggaaatgagtatttccggcatacgcgattacccgccaacacgtttggatctgagcggggacatggagcatattcttatcacaggacccaatgggtcaggtaagtcgacgttgacattttgtatgggtgccgtacttaactccgttaaagtagagttggagggtcttcgttccaaaaatatagagcaacatcaggtttggaatgctcaaattcagcttgtgtttgctaatgtaagtccaaatccgattgatgcagctccatatatccagttcacagtacaagtggaacaaaagccattcgagccgcttaaacgacaatattggattcgtgaaggtgaacagataggagtgtgggacaaggagactcgttttacctctggagatagtgtgaacaattttaaagagtatcgttttcaattgcagcataaatatgtagttgaccccgatgcattttatctgatctggtaccagcaggacgtaaatcaatttgcaacgatgagaccagaggaacggtttcgcatctttagtgaaatgacgcaaattgacaagatgcagcgtacctgggagggtgccaaggaacaactgctggatggaatgaagacccgcgaggaagcggaacgtaatcagattcaacataattttgagttggagagatggcaaaaggagcgggataagttgttgaaccgcaaccggagcaggcttgataacttacggatttttgtgcaaacatctactaagctccaagacatgtatcaacacgagcagaagttactagagggccaaattgagcagttggagcttgaggaggcagaacatcaggagaaaaaggtaatcttgcttacggatatggagcgattgcaagaaacacaaacggatcgtcaattgcaaaaggaagaacttgaattaagattgcaaactgtagaattgcagctcataaaaataaagagtgacatagcagagcgagagcaagaacataaggagcttaccgtttttttgaaagacttggctgaagagataaggggtattaagtattcggcggaagaagtaaatatactgttagctgaagttcaaaagggaatgaaagaaacagaagaaaagcggagcgtagcaaatgtagaggaccttgagctacaggcgagtatagacaagttgttaagggagatgggaagattatctgctctcactcaacaggatcgggaggaagaaaaaagatcacgtgaagtacttcgggaatttggtgaaagctctcatgtgcaaaggcaaattgaagcgttggacgcaagacatttacttttacaagatgaatccaggcagttatctggaaagctagaaaatctgaagcaagaggagtcttctttaaacacagacaaattcatgtcgaagcgccaagaagagtccgttcgtatgttcaaacatcttggaatccaggtatacacgatgcaacaactactggaaatgaatgagcaggcaccattggaacaagaatttgcactggaggcggttaagtacagtatttttgtagatagtaaatcttttatcccacctaatgatttgattcatgtcgaactaccttcggttgttcctgaacgctcccttaagcgcctggagaagttgcatattcaggttaaggaaggtctgaacgatgagatgtatgcggctgcgcaacgagtgatgtggtggttgtatgagctggagcaaggagctcactggacccgaatagaaaatggaatactacgcgagccatatgtacggagaggtccgcaggaagaaaagcagtcactgcttcatacgagaggcattctcatccgcaaaggtaaggtgcaagaggaaatcagaacaatacagcagaactatgacagctgcattatcgcttgggataaggttaaggaacggctaggggtgtttcgttctgttcatctgcaagtacagcaggctgaaacctttttagcagacagcgctgatcgtgagctgcgaataaagcagttgcaacaatctgatgaggagagtaaggttgcgctggagcgtcggactacagtggaggcggagattaagagactgaatgagatctatgccaaacagtaccaggaatctgtgagatttcaagaatacgcagacgtgtatgaacgatatgagcatgaacgggaacagattgaacgtctccaacagttagataaagaattagaagaactgcggggtcaggaagaagagttaatattggcagataaggatttggacaaacgtctgcacgatcttgatacccagattgagagcactaagcgcagattacgggataagaagagccaaatgctagatatagaaggaaccattgtacagattaatcggcaaaaggaaaaaagtattgaacaacgtgatgttttccagagacagcaggccgaaatcaatctggatttaggaaagtggcatgaaaagctggattttttatgggatgaaatagagcaagaaaaaatagaaacggaagatatgaaattgagaacagagcccgcattgcaagccgagcttgagcaagctcgtacccgcctccagcttgcctgtaatgagagggttaatgaattttccattgaaaattatgaaagtacccgtgaagcatttgaaagaggtgctcaggatctgcaaaatgcaaggttgcttatggagcaactggaagagcagcttaaggagttggaggataagctatttaatactgttaaaaacgaggtccatcgtgtcaatcagaaatttattaattatatggatttattcggttttgatggagaagttacatggcaccatcaggagggcaaacatggggagcttaagtattttctgaatgtacgagcccggaaacagggacatcgtggccctttggaggaggttagccttaagggacgaggaaacaaagtaggtaaaggtgtgtctggcggagaagaatcacttagttcactgttgtttgctctggctttgttaaaaactatagaaaccaatccaggctatattattttagatgaatttgatagtgctctggatgagagccgcaaggaaaaagtgtttgaattgtatgagcaggagctggcacgcaaaatgattatcctttcaccaaaatcgcaaaatgctgattacttgcagcattttgataagtcattcgttgtataccatgactcctccattcccaagagcgaggtaattcgtattaagaaaagtatgtaa

SEQ ID NO: 51908 - DNA, 1407 bp, Paenibacillus terrae HPL-003
gtgaacaaagcgggaatccagcgtttggaagttttatcattcatacaagagaactatgttaaaaaaggggaagagctacaaaatgatgtttttacagggagctcctttgatatagatgtgatgaaatactccgccagaatatataaaaaaatagggaacttaagaggctcttgtccacaggggagttttatactatcggaagaagatgattctcccatgttgctaacgatttttcacagtgctcttgtgaagaagacagagcaacagctttatagccttggaacggatatcactcaggagcgacttagcgattggctccaaaagggaatgatttatcggaagactgaatatttgaatgatggcaagacaatgaagaggattgtctatgtgatgggatatttactttacagcatgcagagagaaaagtatggggctgaactggaggaaatgttggagcgattgaaaggcgggattagtcaaactgaaacgctgctgaatcaattagccgatgttcgaagtgaagacaattatcagggtgtaacgctgaacaggctatataaaaatatagaaaaaatacgcgctgcccttacagtcggatacagagaacaagcattccagccagttagcgctgcattaggaatgcgatggagagaaagccgcgttagcaaatatattcattttgtgctggctgttgccactgtgcgaattgagcatgagcaatttgactggaagcagattggagctgcttattatggtcaaattggaggctctaaagcttttgatatggagaaaaaagacttcctgggcaagttggaggaagacttgggcatgccgttgcattttatcggtttggttagtctgggagcggtcacgccaattctatttgctggtgaactggccggaagttcagggctttactacccggctggttttatgcacgccacaacagatctgacggtgtttgaaatggagtttagcactccatgccgggtcatctggcttgttgaaaacagagcgttactcactcggatgtgcgtagattctttttttctccgctccagtggaagcctcgttatcggattggatggtcagatcagaagtggtcatcgcaagttgattcaggacgttatgggcaattcaccatctattactcaggtacttgtctggtgtgatacagatcattctggtggagtgatagctgctcatgtaagggaactgttacggccttttcagcaagtgaaagtaaaatggctactttctgagcctatgaacaggcaagtaggcacttatagcacgtgggagcaatatgaacaggctttacaacaggttctgctggagggcagactcatggaacaggaggaattccttggaggagcagagctatggaaaacatggatcaacggttag

SEQ ID NO: 51909 - DNA, 1575 bp, Clostridium clariflavum DSM 19732
ttggaagaaaaattaatatatgaaggggctatcttagactgtcttaaagattttcgaggaagaatgcaaagtttggcgccttttattcacctttcacgcaaactgtccggatttcaaaaatataatgaagttgacatggtttccatcggattttctgtgttattgtttatattggaaaatatgctgattggtagagaagagtgcagtattgatgatattgcaggatttcttcaaactattttaaaacgttcctatgatataaatatgacacaggaagaatcacgagaaatggctttctatataagggactccatctcaggaagcggtggcgaagttttagagtttaaattcaaaaaccttgaaaataacaaggatgaatctattcctataaagctaatagatacttcctattatgagataaaaaagtctgcccgctacaagctaaccgatcagggcatggagcttttgtttaagacaagggagatttattcggaatttagaataaatataactcagatgtacctaaaacagcagattgaaaaaggtgttttttccggagcattgcaaacagtaaatgaacttaatcttcaggtaagacagcttcgtgagagacttgaaaaccttttgctaaatataagacaaaacgttttgagcattaacttcgaagaactgaagattcttttcggcagaataaaggagcagttcgaatcggagaggcgtgagtttcaaaatataaagagaatactgaaagaacagagagataacattgaaaaaattagctataatgacttggaagagaaagagcttaagagtcttgagcagataaaaacactaacgaaaaagcttaatataacaacttctgaacatgatcggctttttaatgataagttggatattttaggtgaatacttaaaaactttggaactgaggcttcgccaaggagtcagtgagtatattgactttgaaaagagcatttttgatgttttaattttaaaaaataaaagttatgaaaccctgcaggatattttggcaccgctttttgtaaatactgcgcgcaataagttttttaatcccttcaaagcattcgaacctcaaagggtaaagagtgagactgaagaagaaagggaaacaatagatattgagatgcaagtggaaatgaaagaaaagaaagagcgtgaggatagggagaaaagggacttaaaggttatggcataccttgaggctatattgcttgaagcattccatgaaggagagtcttgtttgagttgtgccataaaaaggttggacgagcaattatataaatctacttcctatgattttgacttttatagtctgatagtgattttgcatcagcacaagctgattgattttaaggatttggaagatgttttaagcaagatggttagagacactgcaagctacaacataaatatatattacctgtttgatagaatatttgctgcaaaaccggaattgaaggctttaaaatcgctgattttgctgtcaacggaaaaaaagattgtctttgaaaacggaaatgaaatcaccgattttgcaattaagggggtaaagtga

SEQ ID NO: 51910 - DNA, 714 bp, Clostridium clariflavum DSM 19732
atggaaaatctgtcagccgactcagtaagaaaggcttttgctttatacatgaatttgattgaaaagtcaaaagttacaaagaagaataacccggaagattttgagggctttgatgaccctgaaatatcatatattataagaatttttgaggaagagtcagggataatgatattacggtcaggagatacagtttattttacgccaagaaccgataatcgtttttttggatttaccaatgaaaatctcagggagaaaatgggcttggcaaacaataccgaattatatatttgttatgtagtgatactatcaataataataaagttctataacggagaaaattacaacaacaaaattcgaacccttcttaaggtggaggaactggaagaatttattacaaaaaagcttgaagcttacaattcaatggaaaacagtgaagaaactgatgaagcattaaattttaatttttcaagtgtagcaaaactctggcttgatattccggcatatgatgaaaaaataaagagttttagccagtcaaaaggtacaagaataagttttatatataggacattaaagtttttacaggaacaggggcttgtaaatgtggataatgacagtgagatatacacgacagaaaagtttgatacgcttataattggttattaccccgaaagcacaagaaagaaggagattctttccttccttgaaagaatataa

SEQ ID NO: 51911 - DNA, 4434 bp, Clostridium clariflavum DSM 19732
atgcctaggataaacagattcagaattgtaaatttcaaatatgatgatgataaaaaatacattgcaaacgaactttatgaatttgacggtaagaatgccctcataaaccttgaaaatggcggcggaaagagtgttatacttcaacttgcacttcagtcggtgcttccaaataccaatatgggtagcaggaatttttccgattatttcaaggtcaattcttctcctactcatattatgattgaatgggctttggacggtgtaagatccgactatcttcttacgggaatttgtgtctcaaaaagtgcggatggattaaggttttttacttacacccataactatacattgcctcatgattttgacataaaaggtatggaggtgctaactgcggataagcaagttataggtttttcagaattttataactacttaaaaaggctttcttctgaaatgcgtctgaatataaacgtgtattcgaaagaccgtcagaaggagtaccgagataagctgtatacatttaatttgtttaaggaagaatttgatgccattaagattataaaccagtcggaaggtggaattgacaagttttttgagaatgccagaaagtcaagaagtgtaatagagaagttgataattcccaatataccgatgggagagggtgaaacctcgagaatacttgaagatacttttaaaaagcatcttgaaaatttaaaaaatatacctctatatcagcataatataaagatgtatgaagctttttgcgataaggctgcaaatcttctttcgaagcttgaaagctatggagctgctgttgaagaaattgataaagtaagcagaaatattttggctctgagtaaccttatttgccttgcaaccgataaactgaataaagaagtggaagagctagagacgaaggatagagattattttgaaaaaatcaaggaactgtcatataaaaaggatagcttggaatatcaaaataaagtcatagaacttcaatcattaaataaagagcttgaagatatacttggcagtattgagaaaattgaaagtaaaattgaagaaaaggataaaaaaataaaatatatggaatctgcttctctttttgaagaagtgttgaatgccagaaaagaaatcaatacatataaggcacagcttgaaacagcttcaaagaaagaggaggagatagagagagagtaccagagctgtctgttttttgcaaaacgtattctggttgaggaaaatgaaaaagttctgaagcttattgaagagttgaaacagcaattggaaaaattaaggaaagaacaggaagcaattgagaaggagttaaaggaaaaagacagtgaaagggacagtataagggacagattgtcctctataaagacaagactagatgacaataaggacagacaatcaaaacttacgagctatttcgtaaaggatatgacgttattggtagactcaaatgccggacttaaaaaccttatagatgaaagggacaagctttcggataagaaaagagacttgacagaagagattgagaaggcaaataaatcttgtgatgatatttctatcagtgaaacgagaattaaagaagctgtcgctgcactagagcagaaccgtaagaccaaaaatgaagaaatagaagtttttgaggaacgtttttcaaaaataaacagagaaataagtatgtatgaaatcgatggtgatgtctacagcaaaagtgcattggagtccttgaaagctcataaggcaaaggtggataattctttgagcgaggttcttggaaaatatcacgaacttcaaaagagaaaattgctttatgaaggcattgaatattatattcccgatatggagcttaaaaaggtgtatgagtttttgaaaagcaacggtataaggtgtatacccggatcgttgtggctgaagaaccagcgtgaggatttgagagaagaatttttgcacagaaatccgcttttatgtcattcaattgtactggagaaggctgaatttgagaaaataatatcagattcgggcaaattctcactgaaaaatcagatacttgaactggttgaaagttctcctgttacctttatagttgattctgaggacggaatttttacaccgacaggagaagataagcattcttccggtattgatagattaggtagtatggaagcttatgttgtatttgccaataataatacttttgcattgaattccgatgcttttgctgattatttgaacactttggctcaaaatattttaagatttgaggaaaattgtaaagcaataaaaattgatcaggaaagaataacggggcttatcgaaaggtgttctgaatttgtgaaattgtacccacagggatatctgaaggaaatgcaaagtcaacttgatgagcttgataaaaagatatatgaaaatgaagcttctttaaaagagcttcaagaaaataaggagctgcttaaaaagacaataaaagaaaatgaaaatgccataagtaatatagagaggcttatagatgagaaaaacaccgatatagccaatcttactgaatatattgaactttctgggaagataaaggaactggaaaaggggtaccgagaagaggagttaatactggttagagttgaagaagagaagagaaatctcaatgaagagcttaattctacgtcaaagaagatcgaagataccaaaagaaatcttgaggcatatgtaagagaaaatcaaagtaacaaggaaaaactggaccaaatatcagtaaagcttaatatagataagcctgctatggatataaaaggcagcctggaagaaattctctcaagagctcaaggccttgagagaaaaattgccaatagtgagactgagcgtattcaacaattcatagagagtcgaatgaaggatgtaaagcgaagaataaaagagattcacaataaaggattttgtgaggctgattttgaaggcagggtaatatctttttccgatgaagaacttgaagaggaaaagagaaaacttgatttactgaaagctgaaaataagaggataagggaaaatgagagaacaatttccgaccaaataaagacattagaaggagagataaaggagcacaagaagaatattgagaaaaatttcaaattagaaccctttgagtttgaaacgtttgaaagtgttgatgcagaaacttttgattctcagatagaagcttttaacagaaaaaggcaaaagaactcaaaaaagcttgaagaaattaaaaaaagaagagaaagacttttgcagtccggagggagaattgaagactacattaatataaataaaataacaattcgaagcgaatcaagggagtacatggacagtctcgtacataacggtgaaagtatttctatgtgggatatgcttcagcttccggtggaaagaatagatgttattatcaacgagaaccgcgatatttacaaaaacttactcgaagaattgaagcagatagaatcgacagtagagaagagctacgatgagctatacaaagatgctgattgggcagaaaatgtgacaatcagaatgattattgaaaagataatgaataatgataaatataattatacgtatgttaagggtttgttcaaagatataattgacagcgttgaaaacatgaagaagggtgcacagctgcaattggaggaatcactaagggacaagaatgagatagtggaacgctgttacagcaaggcagaggcagtttatgaagaactaaagagagttgatacctactcgaaaataaatatcgatggagtaaacaggaagactatagtgattgaaatgccccaactgcatcctgaagaaggaaaagctttgatgacaaaatatatagagcattccatcgaagagattgaaaagatgaaagcagatggaaaatatgaccctgccaagattgacggggagatatcaaaaattatgtctcctgtaagtctgttggatgcgataacaaacctcaatgaatattcaataaaggtatttaaacctgaggctacaggagcatctaggtatattccttgggaagtggttataaattggtctggaggagaaaaacttgccggattttttgccatgttcatttcaattatttcttaccttagagttaaaaagacgggatggccggattccagtaaagttatatggatagacaatccctttggacaggctaatgctggatatcttttatcctatatatttgaattggccaagggcacaaatacccagatgatatgtctgacagggcacatgcaggtggatatttatatgcagtttgatgtagtctacagtctcatacatagacagcttacagggatgaatatgagcgtaatacagtctaaactggttaagtcccaggaagggttggaatcggcattttataaagttaagtcggaacagatgactttgttttag

SEQ ID NO: 51912 - DNA, 1047 bp, Clostridium clariflavum DSM 19732
atggaaaatatcatttataagataattgaaagtcaatctaaaaaggtttttgaaacagctgatatactttcaaatatagaaagaaaacttggaagtgaaaattttgaactaaagggcggttacagaacgtttgcccatgttattgagcagttttgtgaagaaggcatgataacacctgttaaggcatcgggaactaatggtagaaatccttctctatacaataaatatagaattttgattaaagacaaaaaacagttggatgatgaacttttgcatgaacttcagtctttgcaccctaaacttgataaaagctattactataaaaatcctgaagcatacagagaagacagagattatgtacttatgttgtcaaagtatcttcttgaagactttgaaaataaatctctaaaatttcgctgtactatgaatgaaagatcttttgaaattttcaataacgagaagtttttggaatcaagaggcaaggttttgcttaaacgccttggactttcttttacggatttaaattgttacaagacacttgaggcttttttctacatattgtttcagcctaaggataagcttaatatcctcattatagaaaacaaggacactttttattccgctctgaagtaccttgaaagaaggcctgataaggatttgtgcggtgtaaatatagatatgctcatttatggagaggggaagaaaatagtaaacagctttagctttattaatgaagtggcgacaggaacttccattgatagggtgtattatttcggtgaccttgattttgaaggtataggaatattcaactctatggcgtcaaagtacggtacgcatttgattgtgcctcatgtaaacttatataggcaaatgcttgcagaagcaaaaaatccgcctaagataagaacaaagcaatcggacatatgccttgatttgtttcttatgtattttgatgaggaaagcaagaaaaaaatatcggaaatattgtataatggcagatatattccacaggaggcggtgaattttggaagaaaaattaatatatga

SEQ ID NO: 51913 - DNA, 1608 bp, Desulfitobacterium hafniense DP7
atgagcgtagaccttgattttttggaaggctttgaaaaaagaatggggatcgttgccgcagtggattccatcgtcaaccgtactaatcgcaggatggatctggagcggttattcagcgcaggtcagctggataatctgattttttccgtgctggtttttattatggaacggaccttggcggaagatgaggaatgcacgctggagagcattactctgttcctgcgccggattctgcccgcttatggggtggaattgcccggcgatggaatccggcaggtggcggagtatatcattaaagatatactgcagaacggcggagaagcccgctattaccccattatgtcctatgggcaggggatgagcgagaccagaatccgtctggtggaggacaaactccaggatggcgataaaggctacattattacctaccagcttaccgatcaagggtatgatctgctcttccggaccaaagaagtggagcaggaaatcagttttaccatcgaagagctgaagctccgggaattgatcaaacgcaaaaattataaaaaggccatctcccaaagcagcagcctgatccagatggtcaggcagaagaagaacgatctccggcagtttatggagaagatccggggcaatatctatgaggtggatatccgggagtacgagaaactgaccgccagtacctatgccctgctggaagaagagtatgggatgatgaaagagattctgggcatgatcaccctttctgaggaacgcttaagagaagaggaacaggccagaggagatctggacgaagagatgagaaaagcccggcgggaaattgccctgatccgccgcaatatccacaccacgattaatgaacagcgggagctgattgtggaccggcaccagctggccgccctctataaggataccctggaggattcctttatgatggcccgccgcaaaaagttcaactttgaacaggaaatcctgcagagactggaacagtgtgatgaacggcatatccccttgctctggcagctgttcaaccctttatttaagcccaacccggagcggaccttaaatatcttcagcttattcgaggctcagagccgtttaaggcaggaggaaccggggggagacgagatcgagattgaggaactgagggaagatcgggagcgcctcaaggtggaagaaatcaatggcttgaataccgcattgatccggttcatcctggaatttgcagcccggcatgaggaggggttccgtctcagccaactcctcggcgaacttaaacatcaggtagagctctaccggcggctggtggaaggggatctcctttttcataccttgcttaagctctacgattttggtccgctgcagattcgggaatggaaagaagaagcccatgaagtcgtggccaaccccaccggggaactggatttggatttctgcctgatgggtatcgcctacactgatccggatctgttcggggtggcaagcctgcagctgctcaaaccggacgaggcaatcattaaggaagagattctcctgagtcagggtgaagagcacttcagcaaatcaattcaaatcagcgatttcttgtttgtggtggaggtaacatga

SEQ ID NO: 51914 - DNA, 708 bp, Desulfitobacterium hafniense DP7
atgagcagtcttaacacagcccttaaactattgaaaaagttattggaaaaaggtcaggtggaccgggagacggacagcgaccttttcctggaattccgcaacccggaggtgcggcaggctctggcggagatggaggaggagctggactttcagattattgaggcttccagcaccttgtacctggttccggccgggggcaatagtcttttgggattcaccagcaaggaccttcgggaatgggtgtcctccgatgcccgcttggctgatgcctatctgctgacgtatatcgcgatgtttatctttttcctcttttacggcggcaaaaatcaaaaccccaaacaacgggaatttttgcgcctcagcaaattgctggaggaactggatcagcgttttgcggccctgacccttgatggggagcaggccttggccctggaagaaaagtattccctgaattttatcgggattgccggactgtgggagagcaagcaggggtatgaggagaagagccggaagaccaaagccggaacggtgcttaatgtctggcggcttctggaacgggaaggtctgatccggattctggataacgaacgggagatccggcctacccggaagctggatgatctaatgctgaattattacttaaatgacaaccgggtcgcggagatcatcggcctatttcagggaggtgaagagtatgccgctccttaa

SEQ ID NO: 51915 - DNA, 4443 bp, Desulfitobacterium hafniense DP7
atgccgctccttaaccgcatccggattatcaacttctcctataataatgatacccggctcattatggatgaatgctttgacttccatggcggtgaaagtgctctcctgaatctggccaatggcggcggaaaaagcgttttggtccagctttttctccagcctatcgtacccgaggtgcggattcaggggcgcaaaatggctggtttcttccgcaaacagaagcagcccaccttcatcctcctggagtggaaactggacggaggcggcggttatctgcttaccggcatgggcattgtcccggcccaggccgccacaggggaagaaatcagcgggaaaatccgctatttcacctttacctgcaaatatcacggcgccaatgcctttgatatccgccatatccccctagccgagaaaaaagaaaatcttctgcacctgctttctttccgggaagcccgggagctgatgcgggacaagcaacaaaaggacccctatctcttcgggtatttccctcaggatgagggggctgattacggccgccatctggcggaattcggaatcattcaggatgaatggcgcaatgtgatcgccaagatcaatgacagtgaaggcggtatcgacgagatctttcaaaagtataaaacctccggccagcttttggatgaatggatcattaaaaacatcgaaaaatccatgtccaaagaccaggccgagctgcaccggctggaagacatgctggaaaaactggttcaggaagtggcggagaatgaaagctacctgttggaaagggaagtgttggccggttttctcaaggtctatgctgagcaaagcaagggcttagccactttgctggaagggttggagcagcaaagagaactgggagaaaagctgaccgcacttcacggatacctcaggcaccaaggggaggggctggtgcagaagcaagaggagaatgaccaggcccaagccttcacccgccgggaagagcaacggatcgagttggaggagcggtcccaggattatctgctgaaaaagaacgcccatatacggtcccaggaacttttgcagggagtgcaggaacgcctgcggtcgacggaggagcgtttggctgaggcccaggccgctgagaaaatccagcaggccgccaggctgtggggggatatccggcataaggaggggaaacgctccggaattgaggaaatcctcaccgcccgccaaaccgactttgatcaggaccggcggattggtgaactggaatatacattgaaaaccctcctggaaaaggaacaggcgaacttggcagaagaggaacggcgtttgcagggggagcagactcaagcaggggcatccttacaggaagttcaacaatccttaaaggatgccgaaagccggcaaagggccttggcccaggaaaaaggccgcctgtctgagcggaaaaaacagctggaaaatcagaacggggcggccctgaaaaaattaaatcttcagctgcgccgcaatatcctgggagaattgaatcaggccgagacggagaagattaaaagcaggctggatcaagacctggctgatctgcaaaggatcgaaaaagagttgacaacggaacatgccgccaatgttcaagctatcaccggactggagggggaaagccgtagcctgcaaacccggcagacggaagaaaacaacaccctcctgagtcttcggcgggatatcagggagtatgaggagcgggaagccgaggtcaaaagcatagttacccgctatgatctggactcggcatggttgtttcagcgggagcgcctggatcaggtcttcgggcaaaagattcaggatttagctgaccgggtggagcaggcaggaatcacttggcatgaggctcaggagaatctcctttccctcaaaagcggccgtctccacgtgccggcggaggttgcggccttattggctgaagccggtatccaatatgataccggtgaggcttatttgcgcggtttatctccggaattaagcgctaaaatgcttcggagcaatccccttttaccctatgcttttatcctttcccgccaggatttgcagcagatctccgcgacgctggagagcctgaccctgagccggatcatcccttttatcccttacgaagatcttaatctgaccatggtgagcaacggacgactggttcaaggcgaatcaggagtcactctggcctgtctttatgaaggacgggtttttgaacggagtgccatggccaaactggtgggggaactggaggagaaaagcgttcaggcttccagagaaagagagcattatagcgaggaacaccggcgagtggtatccgaccaagcggtctgtgccaagttcacctatccggcggaccaccgctataacctgggacgggcggaacaggaagcagaagtccggctgtccggcttaattgagcagctcgctcaggccagtcaaaaagtatccggcttgcaggagcggaatgaaacgattaatcgtgaactgagaagaaaccagagtgaacaggctacggcccagacaagaatagagctgttccgggaatttttgcttaaagaagcggagtatcaggaatgtggcaaagagctgaccaaggtcggggatgagctgcagaaactggaggcccaaaagaatcactgggtagaggagcaggagaggcttcggggaaaactagcggaaatcagtcgggaactttggcagaatgacgacactctgcagaagattctcaagcaatatgagctttatcgccagtccccggtggcccctctggttgccggaagcctggaagaactgaccgccaggctccaggcactcaagtcccagtatggctcggaactggaacagctggagcagcaaaagcgggagcttaccatggatatccagcagctgaaaggggaactcaggaagctgaagctccaggaggaagagtatgcttccgttccataccgtgaagagaaagccgatggactgagggcagaaatcgaggatctggcgagtgcggtcagggggctccgccctcaggaaataaaagcagcgagggaagaggcagccgcgaaaaccgccctggatatggctttgactgaagttaagcgtctgggctgggaaaaccccctgggtccggaagaaatatccggggatttccccctgcggcgcaggcaagcccaaaagcgcctgcaggaattggggcaagaaagccgtgaactgcaaagaaaaaaggctctgtatgaacggttgcaggaccaaattgatcagactctggatacccagggcttgaaagccgcccctgatttcagtccgggggaggatctggaagcccagaccaaggaccttcaacagggttaccaaaagcaggaccgacagaaccgccaggatgtccgcggtctgcgcaacagctatggtcgtcttaaggaggattaccgggagaagaatctgaacatcgacactatcttccgggctctggatcatctctgggaggatgcccagggggaagaagatgaaggagaccgggggctgctttcctttgaccgcttttacttccttttcgaaagtatgagcatccatcaggagaagcttgccgacctgctccaggtttatgagctccaattggccaatctggagcggaataaaaaggatatggtggagcagagtttcctccatggcctgcgcatctgcgaagagattcaatggatctcggatcattcccggattcgtctgcaagggcgcagccgaccggtgcaaatgctgaagatcgacctggtgaccgacagcagtgagaacgccagagagcggatgcagcactatattgaagccgggatcgaaaaagtccgtcaggaaattcggcagaataagcggccggaggagatccgcaaaagcgtgatcaagctcatgtccagccgggaactgctgaatacctatctgggcaattcccatattccgatcagcgtctataaaattgacctcaatccccagaacagcgggctgaaactctgggaagacgccgcccaccagaattccggcggggagaagttcgtggtgttcttctccgtcctctccgccttgatgagctatgcccgcaccagggctatggaaaaccttggcggcgtcgcggagaaagaaagcagcagtgttttgattatggataatccctttgggccgatttcttccgagcatctgttgaatcccctctttgagattgccaggaagcatcgtacccagctgatctgtctctccgatcttaagcaaaactccattatgaattgctttaacctgatctacatgctgaaaatccgcaccacggccatgggcaacaaagaatacctcaagttcgaagaaattatccgggactccgctgacttccaggaggacgagagattggaaaaggcggtattcagaagcgaagtccggcagatggctatatttggggaagaatag

SEQ ID NO: 51916 - DNA, 1059 bp, Desulfitobacterium hafniense DP7
atgccgaaacagacttctgccgaaagattaagccaatgggcgaaaaggagaagcggtattaccgtacttgaactccagaagcttctagaggagccggattatccttcttttcatcagttggtgaccgaactgctggccgggggcaggctcactcccattaaggcctcaggtctgaacggacgggtgccgtccttagccaataaataccggatcattcaaccccgggaggattatggggagtgtctggaaccgatccggagtctggagcctaccctgaatatcgccgcttacctgcaaaagccccactattatgtccggcatcaggagattctgcagggcttaagccgatacctttggtatcaggcccacctcttggaacagcccatgtcccgcaaagagcgttccttttccatctggggcaaagagaaactgatcgatgaacaattttcactgctctgggaagtgttccggtttaacaggctgccggaaaacttcctgaattattacgatactcccgagcccttttttgagtatgttcatgggggcgccttaccaaggactttgctggtgattgagaataaggacacctggttcactctgcggaagctcatgcgggaaaccgggaaaaaccgtctggccggtatttccgtccaggttctgatctatggtgaagggaataaggtcacaaaacccaaagccctggagaattacgctcaggaaatgttcggcagggaagttctgaccgagggagagttcctgtatttcggcgatctggatcatgaaggaatacagctttttttccgtacacaaagagaaaaccccaaacttaaactcaggccctttcaagctctttactggaaaatgctggacttggccgcagaaagagaactgcagcccagccccgatgggcgtaacatcactgtccgggttcgggaattcacacgtttgctgggcctggatccggatgaggataaggataaactggcctttttgctccggggagattatattccccaggaaatcctgaattatcaggtgctggcggcactgttggaataa

SEQ ID NO: 51917 - DNA, 1467 bp, Escherichia coli E101
atgtcgctagggtttttggagcaggctcgtaatgaatcaatggcacgtcgcgagctgtctattcagtctcacgccttgctggtcgtgcgaacgctggattcaatatatagcgcccttcagcgaaatccgttcgatggtgttgagcttgatgcgctggcggcaatcatgtatctctttgacgccatgctttattatgctgaccgcgagcgccagcctggaatgacgcgtaaggaagcggagttatgtctggttgggcacctcaatgaagcctatccgggacaagaagaacccgactatgcacaagtggccagcaagatttttgcggcgatcaaagatcctttccgcctccgttattatgatttctcgcaacgaacgcattccgaagagcagatagtccgtctggtacgctatgaccagctatccggctcagatgatattctctggtcgctgaccgatgacggaatgttgttctataccctgcgcttggatgaaacgccgatagaacgcgcagctattctggcctggcgcacgcttaaaaccatccgtcgcggtgagatcgacaaggcagtacaccagatccaatcaacacagcggcaactggagcaatatctgattggaatgcggatgaaagtgcgagccgcccagtctggtgatttgagtgcatcctatgcacatgatattcgtcccgtactcaatgattcctttgataaaacccgagaggttttggaacatatccagaactcaatgtcggccattaccgaaatgctggttgaaggaagttcaaaattaaaacccgacaaattaaataagctacgtaaggcacaggagatttttgctgaggtctgcgcttttacgcagcgctatcaagactgcttactggatgtgaataaagattttgagcgagctcgtctgaaactcattattcccagagataatacccttttccgggaaacgctggaaaaaggtgcactcatacccttgctgtcccattcccccgacattgtcgaaaaggaaatcgatggtctcattgcacgcctgttggctccccgaagacaggatgatgatcggcacattctgtttgaccctgaagcgctgctgaacctctatctcgatagatttgaacaggcgcttccatatgagatacaggacctcaccgatcagcctgtagctattgaaaccaacctgcgaaatatccctgaatccgtcattaaaaaatgcagtgattgggttagttaccgattgaagaattgggggcatgtgagctttagagatgtttttgacgcctatgagtgcgaagaattatccgaacaagaacaacaggtttgtttacttcatattggcagcctggcagctaacagcgatcccgcaatagaagtggagatagacgaagctatcgaaacaactctgtggcgggctaacaatgtcaaactgttaacggtcgctcccttagacccctttgaggagtag

SEQ ID NO: 51918 - DNA, 4437 bp, Escherichia coli E101
atgtggctgattaaacgggtttatatggatggcgcaggccatgaagaagctttctacaaggacctcacactggactatattggcctgtctcaagcggtcagtagccctgttgttgaaggcctgcgctcgcccgtcaggaatgcgacggtggtgaccagtacttatcagcagcttgtgaatgggggcggtaagtcgacctacatcgcgctgctgttatcgatttttgagccgtccgttagtgacttcacccaatatctggcaaatcatcgccagagtgaataccactaccgcaattacttctataaagaactctctgttgttttggttgagatggtcaatgaatcaggacaaacattattactggggcatgctcatcagcgtaatggagatgatgttgaccgcacactgtttatttgtgatgcgcccgactccctgatgggcgcgccgtttgatgaagtcccttcttattcccgcgcggaacgcaattctgagctgcgcccctatgccaatagcctgcgcagttttgatagctggcttaatctcaaggctggtagtgaaggcggtatgcattggcgtaaaaccaccagacagaacgagtggcgcgcatttttactggaacaacaaattaacgttgatcttatcaaaacaatggtgaccttcaactccgaagaaggtggtctgacccgttttatcgaatacaaaactgaacatgatttccttggcgcgttcttcgcctgcaccatgtctaaagatgcggctgagcggctgcgggaactggtagcgcatgaagttgaacgtcagggagagttagaggggatccgtcgtaacgagtctttcctgaaggatgtgttggccaactggctggcgtttcttgatccggctaaacagctggaaagcatccaggcgcagcagcaactgctggaggacggcttccgagaagcaatgcgcgatctcgcagcctttgtcggggatgctcaggttgaacagacgcagcttgaagataacatggatagtttgcaaacgcatattggccaggcgatgtctctgcgtgagcagttaggtaagcgcagagcactgcttgaatatgatctcgtgcagcatcagttcaacaaacaaaaagcgatagtcgatgtacttcaagacgaagccgataccaatcggcaccagattgagattactcacgctgctatagactacaaagcctatgctaaggccctgaatgaatactgccaggcagatgaagatctgaaggtattccaaagtgaaacggaaaggccgctacaggtgattttcgagcgtactgctagcgaagccttgggcacattagagtgggcaatcggcagacatcgccagcaggaggctacgcttgaggaagaattagggcagatgggcagggaaagccatgtcctcagacagtcatacgataaactacaaaagacgttgggtggtctggaaacggagcgtgacggatataaaagagacaaatttcagggtgaattgcaacggaatgaattatgtgaagcagggttgatccagaaggatgaaacaccagtagcagcccaataccgactggaattaaccttacgcgatgcgaagcagagtgaagaactggctaatacaattcttcatcagaaagagcaggcgctggaagcgcagctgcatgttgtgcgggaggcatcaattgataaaagtgaggcccggcaaaaactcattctggctgaacaaaaacaccagtcagctgtggatagtgctttagttttagcaaaaacctatcaaaaactgccaacgtcaatgcaacatgatctagatattgaagacacgagttggcacagcgagttgtgtggattgcagttcgacaaggtattgaatgcgaactctcaaacgctgaatggaatgaaagagcgtttactgcaagcccggcacgaactggacgagttgaggatgacgggacatgaactggtcgctaagcaggtcaatgaggcacttgaagcattttatgcggcgggcattgcacgagataagctatggacatttccacactatttggcctctgcttacaacgatgatgcacaaaagattgcagcggtgatcgatcaaaaccctggccgctacctgagcctggtcgcactcgacaatgtaacgtttgaacaggtccataaaattagtgagatcctaccctggaagaaggcacctattgctatttacttgctggatgaagcacaagatctccgccgagaaacgtctgaattagtacaggttgtcctctcaaaccccgataagcacggatatagccaggccgcttacgaaacccggctgcaagacctggagaataccgtagcgtcgcaggaagtcagtgtgaatgctgcggagagcgcccttaaagtactggaatctttcaggaatgactggagtcggcattacgaacagtatggtaagcattgggcgggactgcttgaccaacgggagctggctctattaatgctggaaaatgctgatgcagcacttaagcaagctgagcatgatgagcaaacactgcgtgacgagaagagagatgtccaggtgcgtttaaacaacgcccaacagcagaaaattcaggcagaaaaagcatatgataaagtgagtctttttttagaaaaagaatgggcgaagcgtgaaacggcgataatgaaactggagcagttagctgcacagattcagcgaagcaagaacactctttgcacccagagagagaggctggaacggctgagcgagctcgagaagaacaaacgctccgagaaaacccttttaaatatccagataggtagctggagtaatctgtgtaacgaaccgttctattcagagattacggcgactgaaggtatggaaggacgaagccctgaatatgcccatgagatggctgctcaggcgcacaaaaaattgctcgaagcagccaacggtgatcaagtgaccgttctcaagcaacaactgaaagatgctgaacaggcacaacgttacgcctctgagcgtttgaccgctcaacccacctacaatacatatccggatgaggtaaaagctgcggccatcaatgagctaacggtaattaataaccgcatcgtacgcctcaaagaacagcaaaagcaattcacgcaaaatctaattagctctcaggtaactctgcaaaaattttcccaaagctgtgaggaggctggtaaagcacttgacgaggattttgtctgggaagagaagcccattgagatagaggcaatccaaacgtctctggctgaaatcgtcaataacctttatgcgattgaacaccagatcaaggcccaactggaacaaaagacactgctgttgagaaagattgaaaatgtgaaagagcggctacagaacgccaaaacagctcaagcgatgatccagcccattacgccgagctctgccgcgggtctacctggtaggatcctgagcatcacagaatatgctgacgatctggctgcacaatgccaaatgtatgcaggtttaaatgaaacgctaaaacaacaaaatatacgcgtctctacggtttggggatacttccgcaaacggatcgaagaagagttggccaaggatccagacgcccgagccagtcaggaatacttacggcagttggactcaatcgcaacttatcatgaagtgctgggcgatttggagagggtcggtacagggatctcgcaggtattcgaagctgtgcaggacagcctcgagcaattccaacgttcgattgatctgactgtcacccatctgactgctcatctggaaggggcgattaagcttctcaggcgcgcgatgtcggtcaaaattcctgaggattgccccgtactgcctggtcggcccattattaaaatgaccgaccggttgaatgatgttgccgctgatctcaggggttttgccagcagccgcttgcagcagtggatagccaggggacagataccccgagcgcccaatcgggacgccttgacagctgatttggttcagtcggtatttggcgaaggggaactggaggtgcgtttgctgaagacgaatgccagccgtccacaatggactcctgtcacccgacttgaaggatcgggtggacagcgccttacatctgcctttttactgtttgtgacggttggtaaagtacgagagtacgatacgggtatttcaagtgcaggattcttgttagccgataacccgctggggaaatcgaatgccaatgatctaatgcgcattcaaacccaaatggccaaagcctataaaatccagctcatctacctgactggtatttcggatgaaaacgcccaatcaatgtttgataaccatctcttcctgaataaagttcaaaaactgaggcggcgcgatttggtaaccgttgataaagaacgccatgccctgtgggcggcttctctggctgctaagccacagttcgatccagtcatttaa

SEQ ID NO: 51919 - DNA, 1044 bp, Escherichia coli E101
atgatctggctatcccgactggagtcgacagccaataaacatcgtcttgccgctggtaaggccgcgcgtacagtgaaagctaatgcggtgctggatgaggtattacgcgcacacaaccaggaggccttgagccaggaggtacctgatttgctgagtcaggctgttacgcaactgcttgagagggactggcgggctcagcctaagcacaaagcgagttggcagcgctactggcggggtatgagcctgccaagtacttttgtttacgaaggtgccatcgttcctacgaagacaacatcagaaatagcctggcatccctggttggcccgacgtattacaggacaacttacccagccaatcaaggcacgcttacaacagctgaacacatatctttttcgccaaaccgggggcgacaagtcactattcccgggcttgcttggacatcgtgagcggtctctgcttatatttggtgacgaaaaagctctggactctttgccacctgatggctggaagcatgtcactctgactttggctgatatgggcgcgtttcgacgtgtgccgcctttaccgtatgagtcatcacgttgccatgatcttccggctatcattgttgaaaactccgatgtgtattatcggctatgccaacttaatcaaattcagactcgctggtcactggtcatttatggcgcaggtaacaaagtttccggtcaggcggagtgcgtgtcacaacttcttgaggccgaacaggtagaacaactactttattttggcgatctcgatgttgcgggcttaaaaatcgcccatcagttacgttgtaagttgcttaatgattacggtatcagcttgcatttagatgaatggctttataatgaactgatcttaaatggcctgatgacagcggaagggaacgccaacaacgaacggtttgatttcgagttacagtgtggctggatgccaaagtttgttttacgagaaatgaaaactcttctggcgatccaccggcgtctaccccaagaaggtgtggcttctttaggtttagttatatag

SEQ ID NO: 51920 - DNA, 1416 bp, Bacillus sp. 1NLA3E
atgggtccgtcattaatttcaatttttcaggcaaccgaatcggctcctgaattacttcaatcgatgaaggatatcgccactttatcaggtgttttaagtgaactaggctcgcaaagttcatttcaatctccgatagagattcttcggtttttaaaaatcatccagttaataaacgaggctgccctgggtttagacgatccgattgataacgctgagaccgtctattatcgctatcgaaaccgttaccgagatccagaaccaccttcgaaaaaaagggtggaacaagtcattaatgtgctggtgaaatataactggatctccaaacaatcgaggcagattaaaatgcgtgatacaggtaaacgaatgatggatgcgttaattcgtttagccaatgatgcaatggcttattacatgaacgatgatattggacgttccctctttcaagcgagacgagatgctgatttaagtgaagcatacgatgatcgtggaatctccggtgggaataagattgccagcatgattcgaaatgtcgaggatgctattcagttaatgaaagaacgcgaattggaaatgctcgcagatcgaaacgctctcccacagctcgaattgattcatcagctgatgcaagaattagaggaaaaaatacaggaacgcttccgacaattccaaacattggaggagagccttgttctctccaatttaatgcaaaaaggcacagcttcacttgctgaaggaacaaacttaagtttaggcatgattaataaatatttaaagtttacgcatatgcaaaaaacccccttatcttcgactattcaaccggaaaaggttcgtgaatttattgtgaaaatgtttgatccaccccttgattcggatattccgaatgtgtatcaactgtttagctttatggaacaaggacaatatgaagacgaagcaagagatggtttatggatgccggtaaaatttgctgccccaatctctccaatcgcgattgatgaagcggtaaatttcttagaaacgtatgaaccagtggttatgccgttcgatgatcccgaagaggaagtggagtatgaatctgagcatattttggagcaagagctgaacgaaattatgggggaatcacaatggctaatgaccaaatccatgattgagaccgcggcgattgaagcttttttagaagaacatgaagctgcaccgatggaacaagtcgtgatcgaagccacttccacaaaatggagtgatgctgtaaatgcggtgacggccattgccgctttagttggtaataaaaaaataaccatatctaatccgacagaaaagatagatatccctaaatatgaacgaagttgggagtggatgaattcagatgacggaaaaaacattatccgaaaacgcaatgcacgaagagaacaaagtgagtaa

SEQ ID NO: 51921 - DNA, 702 bp, Bacillus sp. 1NLA3E
atgcacgaagagaacaaagtgagtaatccaaacgatctgcaggctgaggaaaactttaatccacttaatgtgatgcaatccttaaaggggatgctaactgagtcggaggaatttgcatttatgaatattttgttctcctcctcggcatcgattcgctcagggaattttgggctttcccgcaaagaagtggagaagcttttgcaaattcagggcgatgatcaaagattcttttcttttatgacaagggtaaatcaagccgttagtcgctatatgaaggtcatttatgatgatcgccgtgaccaagtcatcgtgatgatgagggttccagctcgtgctgcacgaagtacgttatcgaaagaaagtctttcgattcttttatatatgttttatcagcaagaggtattacagcatgaatttacgttatttgatcaaatacttgaggcatttggccatgaaacaacgaaggccaaccaaagaattttaatcaatattgatccacttagaaaaattggagccattgaagactatgagacaaactctcaagaaaaagcatatcagttaacggcaattggagttcatatgttttctgattctttcctaagaagaacgacagaatttagtcaatccaatcaattaaataaagaggaagtgctgaagttttttaaacggtataacttatatcagaaaggagaagcggaatga

SEQ ID NO: 51922 - DNA, 3204 bp, Bacillus sp. 1NLA3E
atgattcctttgagactcactttctccggaattcgggattatcctcctacccttttagatttgtcaggtgccgatgagcatgtgatgattaccggacccaatggagctggcaaatccacgattaccttttgcatgggagctgttttgtattcatccaaagttgatgtggaagggttaaaatctcggaatctgccacttgaccaaacctggaaggctaagatctccttgctgtttcaaaatgaaggaataatgagaattgatgcgccgtcgtttattgagtttactttgaaaatcactcaagatccgggacagccgatgaaaaaagagttcatcatcgctacaggtgatttgatcgatgagtgggaagatacagttaggtatacatcaggagatagggtttttagtttttcgacctataaaaaagacctccaatataaatacaaggtggaccctgacctttattatctaatttggtaccagcaagaggtaaaccaatttgccgtcatgtatcccgaggagcgttttcggatttttagtgaaatgcatgggattgataaagtccagcgtgattgggaagaaagtatggaaaaagtaaaagatacagaagagtcactacggagtgcagagtcgaatgtaaaaataatgaagcaagagctatcgatgaaaaaaacgtcgttagatcgatttttagataatcaaaatcgtcttaatgacggcggcaagctctatattcaagcattattacaattagaagagcactataaaaaagaaaaagatagattaggtgaattaacctcgcaactaattgacgatatggaagaggcaaaagatgatttaacactaaaaattgctttaaaagagaggaacctggaggaattagaagaatacaaaatacaacagcaccaattgaatcatgaaattgactccaacacgattaaacgtgatgaactgagtttcaaaataatggaacttcaagcacgaattgaagaacttgaccaagaattagatgcgattacaaaaagaaaaaatcaaatttcgagaacggaagaagaagtgaaagcggctttagtgaagttagcaggagaagaagagatagccaatgcagagttggagaagaatcagcagctgttgaaggttcgagaaaatgaccgtcaggaaaaaatagagcaaatcgctcggttagatttacaagtcgaaaatgatgaacaaggccacagcctccattcagaacggttacgacaatatcaaagcagccatgcggtccaatcaacaatcgatgctctaaatgcgaaggtgtcagcaaatagagaaaacctcttcgtcaaaaatcgaaaagaaaatgaattggctgaggaattagtgctgttggaggaaaatcgggatttatcactacgccaattggaatcaatgaagtttttccgagctcaacaaatgaaggcttatgcacttcgtgaattattggaactggatgaagaggcatcgattaaagcggaacagctctttaatgcgataaaatatacgatatttttcgatggtaagtttgttttaccaccaaatgatttatatcatgttccgctaaggtcgattgttccagaacgcatgatgaccagtttgccaaatctccatttaaaagtgaaaaagggccttggagaaaatgaattagttcatggtatgaaagcactgtggtgggttgaacagtttttcattgaaggcaccgtttccattaaaaatggtattttaatggatccaatggggcttcgaggtcctcaggaaaaaaatcgttatattttaagtttcaaagctttaatggcaagaaaacttgaagttaaaaatgtactggttgcgcttcgtcaagatctatcccaaatagagcaggatattgaaatggatacgaggcaaattcaagaactaaatagtatcattcaccaggtgaaggaatcggaagcgttcatgacaattgagcatgagcgtatgttgaggaaaaagaatttagctgaagaaaaagtagaaaaagggaaaatagaggatgaaattcaacacttggaagcggaagagaaaaagctcgtccggctccaattgaaacaggaacaagatcggggaattttagaagaagaagaagccatatatgctgagcttgggaaaatgaaagataagtatgaggaacggaaccggttacaggagcaattattagaagtgaaggaacaattaaagctacaaaaaactaaagttgaaaaactagaaactgattttgacgagataaaacaaactataaataaacttgatagaaatcttgatcatttagatgatgcgattgcagcggttaatcgaaaaatattaatgatagacaagcaaaagggatcaagtatagaagaacaagatggagcaaaacaggagttagttcaaatcattaaggatttggaagagatgaaacaaatgattccaactctctacaatgaagtatctatgaatttctcaattgaacaactaccttctgtaacaaacataaagcaggcctgcgaaaacgggaaagtgagatttgatcatgctcggaacgaaaccggcatcgacccagctgctccggaaaattacgaaacggtaaaacaagagtacgagcgattggataatgattacaagcggacgaaaattttacttgatcaagataaggaacgaatggaaggcttaaaggaccaactagaaacaacgatcaatatgcgtgtccttgagctacagcaacgatttaaatcttacatgggacaatttcaattcgaaggcgatataagctgggagtcctatgaggatagaaaaaagcgtactcagtttaaattgttcattaaagcccgaaaagaaggtcaccggggaaaaatggaggatgtaagcacaaaagctcgaggtggacgagtcggtaaaggagtttccggtggtgaggagtcactgagttccttgctgtttgcgctcgccctattgcaaaacctgcaaagcactccaggatttattgttttggatgaattcgatagtgctttagatgagaatcgcaaagtaaaagtatttgaattatatgcccacgaattgagaaggaaactaatcattcttacgccaaaatcacatgaagaaacttatctgaataaattctcgagagcctttgtcgtccaacacgacccaaccgttccgaaaagtagggtagtagggattatcaaaacagtatag

SEQ ID NO: 51923 - DNA, 1320 bp, Bacillus sp. 1NLA3E
atgatgaatctggaagaacaatcctttattgaaaaatatattctaaaaagtggtgaacgacttaacccaatcccaactagtcttgcaaataactatttaacggatatacaaattgtaaaaaagacagagaggacgttcaggatcgttggcctccttaccctttcgaaatatcgtaacaaatcgggacatgcagaagacgaattgctaaaagctaacttaactccgacaaagaaaatccattggaatgatcatgatccaaacacaatcagatggtttgagcaaggctggatcatgaaggaaatccgcttcaaaaaggatgggagaacaccggactcacagcattatcgaatgggatatcgtttataccaatatctgcaagatttacaacgggcaaaagaaaatgaatgggaactagaactaaatcgaatcaaaagtaaattcattcaaataaatcaaaaaccatcctttcccatttcagagcaacgggaaaatggaataaaaacatgcatatcagttataaatgaactatttaaccaagatgcccctaagttacaaaattcacatctttttcctatccattggccaatgataaagaatataaaatttcttcattttaacgtggcatttcttcaaatctgtcttcagaaattggaatttgattggaaggaaatcggtgccaactattttaaagaaatcggtggatcaaaagagtttgataaaaataaagacgattttattgaaatcttagaagaacaatcacaatgtccggcagctttacttggattgactagccttggtaagattactccgctttatttttccgggcaattaacaggcaacttttcttcctattcttatggaccagtccatgcgttgacggacttatccatttcccaggagcaatactccacgagcgcaacaaccttgtggcttgtcgaaaatcgagcgatcttaacaagaatcgcctcacaaaagcagtttctacacaatacccattcattaatgctttgtattgatgggcatcttcggtcatcacataagcaatgcatcattcagctactaaaaaatagtacaatccagcaagccattatttggactgattatgaccctgatggcctacagatttcaaaagaaatatacgaaacaatatttgaaacgaaaaccaagttacaacctaagtggatcactgccgagcaggaggttcttgtaacctggcaagattaccaactatatatgcaagcttttctaaaaataaagaagatggagcaagaggaagtattagggggtgctgacgtttgggaaaaatgggtccgtcattaa

SEQ ID NO: 51924 - DNA, 1365 bp, Marinitoga piezophila KA3
gtgtttaaaacatttcatgaaagagtttttacaattggagaatttgcagcattatatagaaatctcacatcctttaaaaaaatttctccttcacgttccttttcaattggaatactcatgctaatatatatatttaataaaacacttgaaggtgaaaaagaggttgaagttaaatctataatagaaaatatgaaaaatatagataataaaatatctgaggatctattaaaggaaatatttgaaagactaatctttgaaaatggttttaaaggtttgtcctttcaatattatgattatgtagagggaatagagaaaaaaataaaatataactttcttgatatacttcccaaaagggatattagcggaataaaaacggtggtttctttaacaaagtcaggcaaggattttatgcttaaaacactggaagtttataaagagctacagataaccatggaattattatttcttcaagaacaatttagaaaaggaacatttataaatgcaagaaactcagctgaaaaattgaaattagtggtttcatcagagctggaaaatattgaaaaattaatatatgaaatccgcagagctccatggagagtggaatttaaaaaaatagaggaaacgtatgattttactctaaatcaattacaaaatgaaaaacaaatatttgacaggatattctttttaattgatgaatacaatcttgatactttatcagaagaaaaagcaaaaaatctgaattatataaagaaaatattattagaatcaagggaaatgcattccagattgcttacaaagtatcaacagataacaacggaaatcatgagagctggtgaaaagaacttctgggaacatataataaatgaaataaatattgaaaagaaataccttgataaattatttttatacaaagaattaaatcctttttcaatatacatattttcatcattaaaaccaaaaaaaagcatagcctttaatgtattctttaataattcatatgaacataatcaaaagagcagtataattttagatgaaaatgaagtagaaaatatagacgaacaaaaaatgatagaagaaatgcaaatttcttttctaaaaaaattattaaaagctttaaaagaggtcgaaaataaaatatatttaagtcagattatagaaaaaccaaataaaattatcctggatacagtcttatatatgcaccagctaaagacaataaatattaccagagagccgttatttaaaaaagctttaaaagatttcaacgaaatatttgaatttaaaaaaatacatattataccccttgaagaggaaataacaattgaagattttacatttacagaatacatatttaaaaaatcaaggtga

SEQ ID NO: 51925 - DNA, 747 bp, Marinitoga piezophila KA3
ttgaagattttacatttacagaatacatatttaaaaaatcaaggtgagaaaatggaatccatagagaatgcaatacagataataacaaaattaatagaaaaaacagagatttcagaagaggaaaatagagaattaattcatatatatttcaatgatgaagaagtaaaaaaaattgttgaaatatttgctgaaaaagccaacctttcattatatgaatctccatcggaaaattatatatgtattattccacgaagtgtaagaagtatttacgcctacactaaagatgatatatataagcgatacggattagaaaaaaattcatatatgttatttatgttctatacattttgtatattgcatatctttaatgacttacaggaaattagcgtgaaggttgataaagtatatgaaatagcagaagagtatataaacaaaataaaaacagacctttcaaaagaaaatatcaatcaaaaatacaattggaattttgaagggcttataaaaatatgggatgaaatgaaagaaatttcgagaagtgatttaacaaaagaaagaagcagtattcataataaaatcggtatgttgaaaaaaacaataaatatattaagtgaagaaaaaattattgaatatataggcgaaagcataaatgccataaaaatgactgaaaaaacgcatgcaattatatttgaactttcaaaaaacgatacatatcttacattaaaaaaatattttgaggaaagagactga

SEQ ID NO: 51926 - DNA, 4191 bp, Marinitoga piezophila KA3
atgcctaaaatagatagttttagaataattaatgttgattatgataataaaacaaagaaaataaatgatctatatattgaaatgtctggaaaaaataccaatattataatagctaatggttctggtaaaacctttattatttcattgttattccaaacaattattcctggacaaatctctgcagagggtagaacctttgagacaatgctaaaggatattgagggaacagcacatataacattatgtcatatactcgataacaataagaaactaattacagggtttgttgctaaaaaggcggaaaggataaattattataattacactatagaaattccatatgattatacattaaaggatatagaatatgtaaaagaaaatggtgaagttgtagaatataatgaatttcgtgaataccttgaaagaaataagaaagtatataacataagaatattcggtgaaaccttaaaaagtgaatatagaaaatatcttgaaacatatagaatatttaaaagtgaatgggaaatgatggcacgtaccaatcgtatcgaaggtggggtatcggagtttatatcctctggagcaaggaaaagtacagaaaaactactttctcaatttattataccgaatattacgtattctttgaaaagaaagaaatcaaataatgaaattgctgaagctttcaaaaaacaaattgacaatattaaaaatctaccaatatgggaaaaacagattgaagatagtaaaagggtagaaaatctatttaaagtgcaggtagaaaaactggaaaaattatatcaaacgcagattgaaattaataaaaagatatatacattatttgaaataaatagattattaaaaattcaaaaagaagaatataaagaagagtatgtgaaaaacacggctatttttgaaaatcttcaaaatgaaataaattttatttatcataaaattgaaaatataaaaaacggttatttattatatcaattaaaaaataatgagaaaaaacttaaaaaaattgaagattcaaaatacgaatatgaaaggttaattgaagaagaggaagaaaaaatatccttaaaaaaagcgttggatgagtatctcgaatattgtgaattagaaaatgagataaatgttattgatgaagaaataaaaaataagagttcaaataaagatttaaaaagagaaataaaaaaggtatcttcaaaattatatgattattatgatatgcagataaaagaattaaataaaaaattaagggatctggaatcaaatatatataaacttgaagttagacgagataaagttataaaaatcatatctgaaaaaaataatagaatcaaaacacttgttaatgatataaaataccttgaaagaaagctatccgagataaataaaataattgaaattaaaaagataaaaacacttgatattcaaatagaagagataaagaataaagtaaatgttattcaggaaaagattagtgaaataaacatcaatataaaaaccattgataatgatttaataggtaatacaagtaaaaaagaaaacttagtcgaaaaaataaaagaattaaaagatgaatatgaaaagtttaaggagttatataatgatattgatgctctaaaaaaactgtatggagtaaaaacttttaaagtgttatatatagagattttagaaaattcaaaaaagttgcttattgaaaaagaatcaatttcaaaaaaaataacagctatagatattttaatggatagaattaaaagagataattatattccaataccggaatctatagaaaaacttgataattatcttcaggagaaaaatttttatgattatacaacaggatataaattattaagagatggaatagaacacaaaaatccaatattgttaaattctattatagtggaaaaaaaggatataaaaaaattatctgaaaaacttagaaaatatagattttcaaatgacataatttttatacaaaatagggaaaatcttgcaaattatgaaataaatgatagtatttataattctggaattcagataattatgaatgattatcataaatttgtttctggtgaaatttctattgaagaattatatgagagatataaaacagataaagaaaaattagaaaaaaagctggaaagtatatccgaagaatacaatcgtataaaagaatatcaggatattgtaattaaatttgaaaatctatatggaaaaaatgatattgaaaaagataatgaatttcaagaaagaataaaggttttagaaaaagataaagataatatcctattaaagatttcaaaattaaattctgaaaaagcagaacttatcaatgaaaaatccagattagaaacggaaataaaagagatatcaaataagttaaatcagttactggaaaaacagatgaaaattagagatattcgaaacacattaaatgaccgatttggaatagatatattccagataaatgaattcaataaaaaattatatagagaaaaagaatctatagatctcaaattattggaattaaacaaagagctggaaaaacttaaagaagaaaagagatacatcagtgcagaaaaagatgaaacatttttaaaaaagtctgaatataaatcatatttaaatatatatgaaaagggaatatggaaatatgaaaacgaagatatttatgaattgtcttcacgctatgaatatcttatacagcaaattgatacaaaagaattatataaaaggaaagaaaaattacagaaaaagctcaataataaattacagaaaataaaacgctataaatatgaattggaaacacttgaaaatcttaaaaatgcagaattaaaagatgaaagttattatcgaagtaatattaggcgttatagaaatgaaataggtgaattcaatagagaaattggaaaaattgaagccgaaataaaattgttgaaaaaggatataaccaattttgaagtagaagaaattcctgaagaaaaatatattattttaaaagaaaaatttgaaaaagaattatccgacaaaaaagaaaatttatcagtaattgaaaatcaaataaacgcgcttgaaaaaaatatagagcgtctggaaatgaatataaatgatgaagaaaaattacttcaaccatatgaattccctggaaaacagataataacaaatttatcagtatttcaaaaagaacatttgcataataattttatagcagtttttcaggaattaaaagatctggaaaataccgaaaagaagaaaagggaagagatatcagatggttggcagaaaataaaattattaatttcagaagaaggatttgatttaatagtaaatatgggatttttgtatgaaagaaatgattttcaatttaactatgaaaccgctaaaaatctctatataacagtaaaagatttaatagaaaagaaaattaacacattaaaaagttataaagaaaaagccatgcgatttaaaaatgagatgataaaaaatattctgagtgaagtttcaatatacatgtcagcattaaaaaaactctcaaaatattcagaaatatatgttgaagatagaaaaattgaaacaataaaaataatatttaataaatataacgaagaagaagcatattcaaaaatttcagagtatatagatgaaataataaagcatatcacagataaaaacaacgaaaagtttaaaagcgaagaggagataacgaagtatataaatattagtttttcaatttttaatctcttaaaagtggttaataatggaccgataaagattaaaatattaaaaccggataaaacatttgaaaatccacgatggtattttcttgaaaatgtatcagcctggtctggtggagaaaagttctttgcatttttttcaatatacatatcaattgtaaaagtattaaaaaataatattggcggaaatatggttgttatatcagataatccatttggaaaggcaagttcagaacatatactttcaccattaatgatactcatgaaaaagaataatgcacaattcatcacctttacggcacataatgacatgaatatatccagatattttaattataattatagccttgtccttgtaaaaaataaggttgtttctaataacatattaaaaatagccagaaaagaacataaagaaacatttgaaaaagggtattatgtggaatggtga

SEQ ID NO: 51927 - DNA, 960 bp, Marinitoga piezophila KA3
atgtggaatggtgaaaatatgaatttaaaaaaatatcttgaatcatataaaaagaaatatatcacctatgaagaactggaaaaaatttcaaataatgaatatgaagaaatatataaaaaaataacaaatttaatgaataaaggaattctaatacctgtaaaaaataaaaaagaaaatggaagatatccctcattaccggccaaatatcgtataaatataaataataaaaaagacgaactctttttattacatcctaaaataaatatagattattatttaaaccatataaatgagtatcaaaaagatagagaaattattttgaagatagataattacttgaaaaacggtgataaaaagtatgttgctatgcgtgaaagggcctatgaaatatttgataatgaaaaggcatttgaaagggatagagaagtactaaatgtattaagaaacataaaaataaacataaaagaagatttatatacctttgattcaagagaaccattttatatatttgcatttaataacaatataaaaaaggttttaatatcagaaaatcaaacaccattttataatttttatcttttacaccaagaaggaataaatccttttgatgcagttatatttggcgaaggaaaaaagattttacgcagttttgaatttatatatgaatatgtgcctgttaataccattttttattattggggagatatagattatgatggtatatttattctaaacaaattaatagaaagatataataaacatcatattatcccctgggaaaagggatataaagctatgcttaatcaaaaatctaaaaaaagcaaggaaagaaagttcagtataaaaagtgaaaataaccttataaaagagttattaaatataataagagaagggaagaatattcctcaggaagcaattaattatcagttattaaaaaagctggtgagtgaaagtgtttaa

SEQ ID NO: 51928 - DNA, 1512 bp, Kitasatospora setae KM-6054
gtgttcgacagcaagaacccctcaccgaagaactcgtgggacgagggcttggcgcgccgcatgaaggcgcttgcctgcacggccccgttgcaggccctggacgagaacaagggcagcctgcgctgggccgatgcagagatctaccagcttgccgaagtcgcactgcacaccatcgaccaggttaccgtctcgatggacttcgactccggcgccgatcaggatcgtgtactgagtcagacctcacgcttcgtcgcgcttcaagctcctgaccggtcggacgacgaacaccacaagatcgccctacacgtcctgcaacgcctgatcaacgtcgggacagtggaccgcagcttcagtcaggtctacggcacggtggacaacaacggtgtctaccaacgcttcaccttcgagttcaacctcctggtggaacgggccggctccgacaacaggatctaccttcgcgccaccgacgaagccatcaacgtcctggtcggggcgctcgacaccgatgtgcaatccgctcaggtcgcggccgaggtcaagctcgataacttgatcaaacgcggccggctggcagaggccaagatggctgccgagcaagccaggtaccgtaccgtgcagtacggagagatgctccgccagctcctcgaggccaccacccgcaacgtcagggccgtggactgggagcacgaggttccgctgctgctcggcgaggccctcgaccacatcgagcagcgctaccacgccgagcaccacatcctgaccaacatcagcgaggcgcgcgaccggtcggacgacgagcagcacaagcagcgggccgccgagctggtggtgatcgtccgtgactgcatccggcgccacatgcagttgcagaaacggctgctcacggccggtgagctgttccgttcggaacaggacaggcagcagttcgtcgagcctccccggaccgccacgatcgacctgcacggacagttgctgactccgatgctcggcctcccgatccgggacgcggtggagctcgggaccagtttcttccgtgatgccgggggtttgaagcggacgtccgcactcggcctcccctcgttcgtcacccggctgctccggcccgcacccgagcgacagcacctcggaatcgagatccctgacccggagatccaacgcaccgaggaccacgcgccgttctcggtggacgactggaacaccaccgatgcgctcctcagcctgcaccgccggccccgtcggctgagccgactactggccgaggccgaggagatctctcccgctgccgccgccctcctgctccaccgcgcggttcacgcgttcagtccccagatcggccagcacgtcgaccgaggagaccctcatgcgctgatcgccgtccggaccggggacgagttcgacactccacggttcggcggggacgacctgctgcttcagatcgcactgttgggcctcccggacgacgcggactcgcacgacaccgacggcctcgccgacgaggagaacccctcatga

SEQ ID NO: 51929 - DNA, 4467 bp, Kitasatospora setae KM-6054
atgtatgaactctcccgcgtcctgctcaaatccgtcggaccggccggagcccgctaccaggacgtgctgctcgacctcagcggagtcggccgcccggtggcggacgaccagttggcgttcttcggaaccgggacgaccgccagacgcccctcacccgcgaccgtgctgttcctcgagaacggcggcggcaaatcggtcctgctgaagctgatcttctccgtcgtcctgcccgggcgccggaacgctctgggctcggcggccggcggcgtcctggagcgattcgtcctggaaggcgacaccgcccacgtcgtgctcgagtggacccacgtgcggagcgggcggcgactgatcactggcaaggtttccgaatggagggacctgaggcccagctccgattcccgcaacctcgtcgaacggtggtaccacttccgccccactgccgccctcggcctggagaacctgcccactgccgacgacaaccgttacctccgtttgacctcctacctggaggcgctcaagatcgccgacagtgatccaggaatggagtacgaccagttcgaccggcaccgcgagtggacggaccgcctcaccgacctcgggctcgacccggagctgttccgctaccaacgcagcatgaacgccgacgagggcgaagccgccgaggcgttctccttcaccagcagcgccgcgttcgtcacgttcctgctgaacgccgtgctgcctaccgacccgcctcgccacctcgcggagttgctcgacacctacgcgggacaggtgagccaacgcggccaactcgttctggaacgcgagttcgtcgagggatcggtcggcatcctcgctgaactggcccagacccggagcgatgccgaagaagccagacggcacaaacgcggcgcggcccgggagatggccgtactcctgaaggggctggaggcacgggccgcagccgaagccgagacagtccggaggctggacaccgagatcgggcaactcgtcgtcgacctcgcccaggagcaacgggagcactccgggctctgcgcggtgacggcggaactggaacgcctggtcgcgggtctgcggttggaagaggcggtcggcgactgcgcaaaggccgaacaggacgccgcactggccgcgcggaccgtcaaagcctgggaggtcatgcccacgctgctcgaccacctcgcctccgcacagcgcctcaaggacatgcgcgccgtggtcgaggccgccgaggaagccgcccgacctgccctgatcgcccgtgaccacgccgcatcccggctcgccgcagcactggacaccgctacgcggacgttggctcgccaggccgaaaccgctgagaagtcggcagcagagagcatcgagcaggcggggaccgctcaggaaagccacaaccaggctgtcgctcgggctgccaggcacgactcggcagtcgcggcgaccgagaagctcatccgcgaagtgcgggaggccattgacgccgccaccgcgtcggggctgctcccggtcgccactccggtctcggccgccctggagcaggcgacagcggcggcagaggccaacgccgtccggatctccgtgctggaggccgaggacgaccagctggaacaggaccaccggcaggcgctcctcgccctgcaagccggccaggcccggcacgccgaacaagtgcggcgccgtgacaacgcggaccgcgatttccgcgatgcgagcgcccgcaccgacgcgctccgcaccgacccggcgttcaccgagttgctcggataccctgcggatgcgctggacacggcggccgacaccctgatcaccgcactcgtcgaagcgcacggcagagccgcccaaacgatcgtcaagctccaggttgccgacgagcaggacgaaccccggcgcaccgcgttggagaccaacgaactgctgcccgccggaccggacaccgtgcaggcacggagtgccctggcggacgagggaatcaccgcctggacggggtggcagtacctggccgcgattcccgatgtgggccggcgccgcgccctggccgagaaactgccgcacctcgccgtcggtgtactgctcaacgatccggcgcagttgcccagggcccaggaactgctcggagcgagcgaactgcacccgatcggctatctgccggtcagcaccaccgcggccatggccgcggagttttcgccccccggcggcgtggacttcgtcgttcctccgcaccccgcgctctacgacgagcaggccgcagacgccgagcgccggcggctacagcagcagcatgcccaccgacagcagttgttggccgaacgctcgacgtaccgggactccgccgccgccctcctggtcaggctccgggagtggcgaaagaccttccccccggggcggctcaccgagttgcaggcggaactggatacggccaccgaacaggctgcctccggcgaactcgaggtgaagacgctgcagggaaccctcgaccagatcggcgagcggcgcaccgcggtgaaagccgctgtcaaaccactgcggtcggctcaacccggcttggagaagacggccgctcaactcgcggaactcgccgcccgggaaacgaaaatccccgcctggcaggaggtcgtcgtacgggagaagaccgcagccgagcaagaacgcggcatcgcccgcgcggccgaggagtccgccgtacggttccgcgcccgggccgccgacctggtgcgccaggccgacggacaccgcgcttcggtgagccggctcaccgaagagtcgacgactctcggaacggttgcccccgttcctgcggaccagcaacccaccgagccgctggaggtattgcggagcatccatgcgagcgccgccgagacgtacctgcgggcttctgtcggcgatcagttgctggtggatctccgtcgggcggagcaggagagcacggagctggaaagcaaactcaagcgccgaccggccgatgtacggaaacgcgcccatgaactactggcctcgcccgaaggcaccgaccatgcttcccgggaggccgcgtaccggctcgccgagctggccgctccggaactcgccaaacgcgccgccgagttgcaggccaaactgaccatccgccgcgaggagtacgagcgcttcccggttcccgccgaggcagtcgacctctccccgttcgagcaaccgcggcacatctcccacggcgttcggcagatcaccgaagcgaagtccgcgcgcgacgcggccgctcagaccctacgggagatggaggcccatcggatccagttggggcatgcgttggccgcggccaaggagtctcatcggtcgttcaccgtgttccacgcggagtggcccgagttcgctgccgccgagcctgccgagttgatcgacgcgcaccccttcgaaggggagttggaagtcgcgcagtcgcggcaccgtacggtccggggagtttacgacgaggccaagcggcgggcggccgtcgcacaggaggccgagcggaagcaggccgacagcctcgcccggcatgccgggcagcagcggttcctcctgctggggacagccagccaccagatcatgctgaacacggatcgcggcgaactgcccggtttcgccgcggagtgggccgccgccatgacccgccggctccgatcgctgaccgacgacctgtcgaagatcgaccggcaccgcacccagatcgtcaaccagttcgcgcagcaggtccgcgaagcactgcagatcctgaagcgcgcccagcggttctcccgtctgcccaagggattgggggactggtccggacagcagttcctgcagatcaggttcaaggaaccgaacgaagcagtgctccacgaccgcatgggcgagatcgtcgacgacctcgcccaggagacggtgaaggccctcgagtcgggccgtgagctacgccgctccggcacctccatgattctccgcggggtggcgagtgccgccgctccggaggggttcacggtatccatcctcaaaccggacgcggtgctgcgggccgagcgggttcccgtctcggagatccggtcggtgttctccggcgggcagatcctcaccaccgcgatcatcctctactgcaccatggcggcgctccgcgcgaacgaccgtggccgattggggaaccaccactccggcacgctcttcctggacaatccgatcggacgggcctccgccgcctacctgctacgcctgcagcagtcgatcgcgacttccctcggcgttcaactcgtctacaccaccgggattttcgacaccaccgtgctgaatgcttttcctctggtcatcaggatgcggaacgacgcggacctccgcgccaaacggaagtacctctccgtggaggacgtcttcggccgctacctggacgaccaactcatccgatccgacgggcacagcatcatcagcgcggcccggtacttctccaaggaaaagagcgtcggtgatggcggagcagagtga

SEQ ID NO: 51930 - DNA, 1122 bp, Kitasatospora setae KM-6054
ttgctggaggcgctgcgcacccgggccgcggaagccggatgggccggtacccggcgcacgaccctgacgaccaacgacctcctcgccgccgcccggaaactctccctcccgcccgagctccaacgcagctaccgccgggatcccctcatggagtacctggaagagctcaaggcccatgagaaggtggtctactccgcttccaggacggaccgggagaagtcatcgctgccgctccggacgcacctgatgccgttccgttccaccgtacgaatcgttccgccggagccggtgtggcacagcttcatgtcgtgggcctcccgttactgggggatgcactacaccactcctcccatccgtgccgcctattcggcgatgaacagctggttcctcggcgggcagagcgggctcgccctgcccgtccgcgagcgggcgttgaagatcttcggccgggatcccttcttccagcaggccaagcaccccggggagaaggtcttcgatgatttgaagcccaagccgatgctgtccgacccggccgaactgatgccactgatcaacgccttccacgtggaccctccgctactcacccgcgcattcgacaccgtccctctggacgaggagagcggataccaccggaccggaccgggacgcggcctcctggtgatcgagaacgccacgacctactggtcgctctcccacatgctcaagcacatcgaccacggcatcggacacgtggcctggggcatcggaaacaccttcaccgcctccgtcggcagcatcggcccgcaggacggaatatcccacgtggtgtatttcggcgacctcgatgccaccggtctgcgcattccactgggagcgctccgacggaggcttccctggctggactccatccggcccgcggtcggcctctacgacatgctgctacgccacggccatcccgggaaagccatgcccaaggaggcccggatcactcccgcggaggcccgtcggatcaccgactggctggctcctcagcaccgtgcgaaagccgaagccctactacttcgaggcgagcggctcgctcaggagtgggtcagcctcgactacctcagtactgaaacgagttggtacgcggacgtgcgttga

SEQ ID NO: 51931 - DNA, 1479 bp, Pelosinus fermentans DSM 17108
atggaagagtatttaaaagatacgacgaaaggttttggggaacgctttagacggttggctattttcacgcctttattttccctaaaaggcaagcgaaaaagtgcggtgctgccttttgacattgattggtttagtttaggattattgacgttgctctttttctttgaaagcaagctgcatcgccaagggagaaaaggccgtcaggaacttgctgattatttatatgaagcaacccaggggcagattggtgctacgcgcgctcactatgatctgatcacggagaccattatggatacctttcgggacccgatgggcaagcgtcataatgaagtttttttcaattgggagactggtactcaggaggtcgttcaattttccttattaaagacggatgcttttgatcaggacaataatcggcaatattttaccttggatgaagcagggttagagctgatctttgcgacgaaagaatattttagtgagtttcggatctccattgcccagcttttaattcgcaagcagctggaaaagggtgagttcgcaagtgccttgcatgaaatccatgaaatgcgcattgccgtgcaatctctgcgggatcatattcaacgtttgggattagaggtaactcgcaatattatttctgatgatacctatgggaaatatgcgaagaccatcgaaaacgtgtacgaaaggctgacacgggaagatgaagagtttcgtgagctgtatggttttgttaaggaaacaacggcaaaaattcaatttgagagccaggaacaagtcgatgaggaggctcgccttcagattgctcaggtgtcgattgaattgggtgaggtgcaccaactgcatcatggcttattgtataatgtgatgcagctgaagaacaaagctttggaagcggctcggcaggcgcttttctcagcggggattcaaagctttaattttgatcaggagattgtatccaggattgtgtcttcgcccctgccggaggaagcggtaaagggattggtacatccctttacccgattgcatcagcagaccagttggtctttgctggcccttttatttccccagcggctgcagcgaagcgaccaggaggaagaaacggcagcttatcctgagatggaagaggaggaatatcgtcagcacactctgcagcaggaagaaaattttagccgcattatggaggaagtgattcaggtcatggatggcaaggattctatggaattaaaagatatggtatcaggtttgccgggagagcttttgcagcatcgttctttctatgatttttggctgttgctccatcagcggagtcctgttgtaaagggcgtgggggaaggcaaacatgttttggataaagccttagccctgttaggggatgacattctggaagttggggaaaaaccagaacttttacaaatgacagagcagtatacactacagaatatgtgctttacgaggcggaggaaagatggatga

SEQ ID NO: 51932 - DNA, 963 bp, Pelosinus fermentans DSM 17108
atgacagcaggaagtcatcaacagttgcagcaggaaatggaaaagtggcaaaaactgattaccaagatggaaactcgaaatgggaaattggaatttttgacagaagcagttgtcgttacgtccttaacaggagaagaggttcaatcctttccttatgaaagtatcgggatggtggctgctttattggaggctatggaagcttcttatgaagagctggcagccagtaaacggatcgtggagcaggctaaacttcattttgaaaagttttgtcatcattctaactttcaaaatgaaaaaatgcggcaaagtattctcaatggtatccggcaaaaacaaagctatcagcaattagtgatttgggagaaggaactaagacaccacattcaaggggccaatcgagtggccgagcaaaatatgcaggcctacaatgaagatattaaacattttattaatcagcttcacttgcatctcatcagtatttgtgatgaaatggggctgattcaaaagatgacaggggtaaaagttgaggagcattataaaacgatttatgaaataaagacacctgtatgggaagaaagcgctgctaaagaaaaattgctggagcatttggaatggatgaccgagcaattggcagcagatagttacaagcaggaagatggcatggaggatagtaaaaagatacgaaaaaatattgagaactggctgagtccttcttatctctttacccggattagtcctaataagaattttacggtaggggtacgcaaagtgtccaatgatagccgcatcagcaactatcctgtggattgggctacgtcgaatagttggtcggggggagaaaagtggagcaagaatatggctctgtttttagggattcaaagttatttagtggaaaaacgccagcccagcaggcagagtaagggtcatagccgcacagtggtgctggataatccctttggataa

SEQ ID NO: 51933 - DNA, 1035 bp, Pelosinus fermentans DSM 17108
atgagagtagtaacagaggagttagtgttgcattttttacagaagtatcctcgtcgcacgatttctcttgtggagatagaaaatgtaattccaggtgggatcgaatatcgagattttgcagatagtatgaagaggttgatggcagatggagtcgtggttccgatttccagtcaagggacgaatcaagcccagccgccattgccgattcgatatcgcatccataagcagaaaatgcaggctgacttttttgaaagaatacgaaaacgtcagctttctttgcatcctggcatcaatatagaacattattttaaaggatcagaagctaagtggaatagggagcaggtatggctggatcagctggattcttatctgaaggcttttggtctgccaaagacggagacttctgtatgggagcgttcctatgagattatgggagatgagaaatggattcgggatggcggcggcggtgcttttttgcagcaggttggtgtatatgagaaactgcaaatgatggagcttgctgagcctctccggtttgcactcaatcccaggcgtattcaagatgcgcaatgttatcatttaattgtggaaaataaaacgacttatgacgctttggtggacattttgcctgagacggatcttcttacgctgatttatggtgcgggcaaaggttttttgaatagtatcacccagttggagaaacagctgcatctggaaggtgcttcgcatacgttgtattattttggtgacctggattttgaaggcatcaccatatggcacttattgaatcaacgtcgcccggcctctttggctctgcccttttaccaggctttattggacaagccgtttcatcagggaaaagaaaatcagcgtaaggatcttagagcctatgaacagtttttgcagagttttttagctgcggatcaggaaaaaatccagaatctttttgccaaacagggctattatccccaggaagccttatcgatacaggatttgcagcatatggggaggaccactcaatggaagagtatttaa

SEQ ID NO: 51934 - DNA, 1479 bp, Pelosinus fermentans B4
atggaagagtatttaaaagatacaacgaaaggttttggggaacgctttagacggttggctattttcacgcctttattttccctaaaaggcaagcgaaagagtgctgcactgccttttgacattgattggtttagtttaggattattgacattgctctttttctttgaaagcaagctgcatcggcaagggaaaaaaggccgccaggaacttgctgattatttatatgaattgacccaggtgcagattggtgcgtcgcgcgctcactatgatctgatcacggagaccattatggatacctttcgggacccgatgggtaagcgtcataatgaagtttttttcaattgggagactggtgaccaggaggttgttcaattttccttattaaagacggatgcttttgatcaggaaaataatcggcaatattttaccttggatgaagcagggttagagctcatctttgcgacaaaagaatattttagtgagtttcggatctccattgcccagctcctgattcgcaagcagctggaaaagggtgagttctcaagtgccttgcatgaaatccatgaaatgcgcattgctgtccaagccctgcgggatcatattcaacgtttggggttagaggtaacccgcaatattatttccgatgatacctatgggaaatatgcaaagaccatagaaaacgtatacgaacggctaacccgggaagatgaagagtttcgcgagctgtatagttttgttagggaaacaacggcaaaacttcaatttgagagccaggagcaagtcgatgaggaggctcgccttcagattgctcaggtatcgattgaattgggtgaggtgcaccaactgcatcatggcttattgtataatgtgatgcagctgaagaataaagctttggaagcggccaggcaggcacttttctcagcggggattcaaagctttaactttgatcaggagattgtatccaggatagtgtcttcacccctgccggaggaagcggtaaagggattggtacatccctttacccgattgcatcagcagactagttggtctttgctggctcttttatttccccagcggctgcagcgaagcgaccaggaggaagaaacggcagcttatcctgagatggaagaggaggaatatcgtcagcacactctgcagcaagaagaaaattttggccgcattatggaggaagtgattcaggtcatggatggcaaggattctatggaattaaaagatatggtatcaggtttgccgggagagcttttgcagcatcgttctttctatgatttttggctgttgctccatcagcggagtcctgttgtaaagggcgtgggggaaggcaaacatgttttggataaagcgttagccctgttaggggatgacatcctggaagttggggaaaaaccggaatttttgcagattacagagcagtatacactacagaatatgtgctttacgaggcggaggaaaaatgaatga

SEQ ID NO: 51935 - DNA, 1269 bp, Pelosinus fermentans B4
ttgtccgtcaatcaggctagggttgaggaagaattggcaatgacagcaggcagttaccaacagttgcagcaagaaatggaaaagtggcagaaactgattaccaagatggaaactcgaaatggaaaactagaatttttagcagaatccattcccattacgctcttaacgggagaagaggctcagtcctttccttatgagaacattgggatggtagctgctgtattggaagccatggaaacctcctatgaagagctggcagccagtaaacggatcgtggagcaggctaaacttcattttgaaaagttttgtcatcattctaactttcaaaatgaaaaaatgcggcaaagtattctcaatggtatccggcaaaaacaaagctatcagcaattagtgatttgggagaaggaactaagacaccacattcaaggggccaatcgagtggccgagcaaaatatgcaggcctacaatgaagatattaaacattttattaatcagcttcacttgcatctcatcagtatttgtgatgaaatggggctgattcaaaagatgacaggggtaaaagttgaggagcattataaaacgatttatgaaataaagacacctgtatgggaagaaagcgctgctaaagaaaaattgctggagcatttggaatggatgaccgagcaattggcagcagatagttacaagcaggaagatggcatggaggatagtaaaaagatacgaaaaaatattgagaactggctgagtccttcttatctctttacccggattagtcctaataagaattttacggtaggggtacgcaaagtgtccaatgatagccgcatcagcaactatcctgtggattgggctacgtcgaatagttggtcggggggagaaaagtggagcaagaatatggctctgtttttagggattcaaagttatttagtggaaaaacgccagcccagcaggcagagtaagggtcatagccgcacagtggtgctggataatccctttggacaagcttccagtgatcatgtactagagccggtgttctttattgctgaaaaattggggttccaggtcattgctcttacggctctggcagagggaaagtttctgcgggattacttccccattatttatagctgccgactgcgatcagcagtgggtggcgagacatccgtcatgaacaaagagctccacgtcaatcatgccttcttccaggataaataccctcaaactctaacacgccttgggcaagtcaaacagattgagttattgagctaa

SEQ ID NO: 51936 - DNA, 1035 bp, Pelosinus fermentans B4
atgagagcagtaacagaggagttagtgttgcaatttttacagaagtatcctcgccgcacgatttctcttgtggagatagaaaatgtaattccaggtggaatcgaatatcgagattttgcaggtagtatgaagaggttgctggcagacggggtagtggttccgattcccagtcaggggacgaatcaagcccagccgccattgccgattcgatatcgcatccataagcagaaaatgcaggctgacttttttgaaagaatacgaaaacgtcagctttctttgcatcctggcatcaatatagaacattattttaaaggatcagaagctaagtggaatagggagcaggtatggctggatcagctggattcttatctgaaggcttttggtctgccaaagacggagacttctgtatgggagcgttcctatgagattatgggagatgagaagtggattcgggatggtggcggcggtgcttttttgcagcaggtgggtgtatatgacaaactgcaaatgatggagcttgctgagcctctcaggtttgcactcaatcccaggcgtattcaagatgctcaatgttatcacttaattgtggaaaataagacgacctatgacgctttgacggacattttgcctgagacggatcttcttacgctgatttatggtgcgggcaaagggttcttgaatagtatcacccagttggagaaacagctgcatctggaaggtgcttctcatacgttgtattattttggtgacctggattttgaaggcattaccatatggcatttattgaatcaacgccgcccagcctctttggctctgcctttttaccgggctttattggacaagccgtttcatcagggcaaagaaaatcagcgtaaggatattagagcctatgaacagtttttgcagagttttttagctgcggatcaggaaaaaatccggaatctttttgccaaacagggctattatccccaggaagccttatcgatacaggaactgcagcatatggggaggaccgctcaatggaagagtatttaa

SEQ ID NO: 51937 - DNA, 1479 bp, Pelosinus fermentans A11; identical to SEQ ID NO: 51934

SEQ ID NO: 51938 - DNA, 1269 bp, Pelosinus fermentans A11; identical to SEQ ID NO: 51935

SEQ ID NO: 51939 - DNA, 1035 bp, Pelosinus fermentans A11; identical to SEQ ID NO: 51936

SEQ ID NO: 51940 - DNA, 1527 bp, Methanofollis liminatans DSM 4140
ttggactatcagagacattttaaagatatcaacgaacgcatggagcacctcgtgtgcttctaccctttttttaaggcctatgcccagaagagggactatgatgccccctccctcgccctcggcgtgctgacatttctcatcgaaaaaggccgtctccagggccgcaccgtgaggcccgacgagatccggggatacatcgaaggaatgatgaaagagatgtaccctgggcagacatttgactaccaggaggtgacacggaccgtgcttggcgatctcgagaccacacccggtggcgaactctaccactttcagtacctcgacacggtcaggaagcagcaggtcgaccgctatgtccaccttgtcgagtacaacgtgagcgagggcgcctaccagatcaccgacgccggtcttgagttcatgatcaccatcaaggagctccccgaagagtccagggtcacggtcgctctcatcctctttaaaaagcagatcgagagcgggtccttcagaaacgccctggagacggtgaggagcctcaacctcgaagtccaccggaaaaaagggaaaagacaggccctgattgacagcatgatctacggagaccccgacgtcgtggagaaattcaccgcctacaccagggacatcatctcccagcttgagcaggaagaggaactctttcgtcaggtccagaataccctccaggagatctcagaggataaaaagcggatcaccgatcattcccgttcactgggtgacgaagaggacttcatcaccatcaaagaactcgcagacgaactggaccgcggctacaggctccataacaaactcctcgaagactacaccacgatcccctcggagtatgaacggatcaagaatgtcaggttgcactcgctctttgaacgccgctaccagttccagaaaacgctcgaaaaccacatcctggccaaccttcccaatgacgtgcatgtggtggagatgctccccctcctcctccccggccccaggaaaacgttcagtatctgcaaactcttcgagccgcagaatatcatcgggaaaaaggcagaggttgcagagagtcgggtgaaagaagagtggggcgatgcaaagccacccgatgagatcgtgcacgaacggcaggtgaagaccttcaccgcctatgcgtccgttctgcttgaagccctcagcgagggagggcaccttgacctgcccgcattcttggacctggtcctggcgaggtacggggacgggggaatggaccacatcgacctgatccccttcctgatcgagttgaacaaaggcgcgcggcaggaggagaaagaagcgtacgagacggtcttcgacctccacacaccagaagaacggcagggcgcgatcgagaaggttctggtctctgttgcgactgaaaaggaggtcgggatcgacacgatcagagtcaggtccatgcccgagatccgggtgccgctcaccgatgagagagacgtgtacgtctcgtaccttgactttatgggagaacgacagaatgaagtttga

SEQ ID NO: 51941 - DNA, 750 bp, Methanofollis liminatans DSM 4140
atgaagtttgacgaagaaaacctcggagtcgccctggagatcttctattccatcctgaagaacgggtcgatcacacgcaccgacaatccccgcgaatttttacggtatgaccaggagaccgaggtgagggaggcactggaggtctgcgcaagaaagcagggattggtcctctgcaggtaccacgacgtcttctacctcagccccggcataaacaacccggtcttcggcctctcaaacaccgagatcaaaaacggtctggggtacggcttcaaaaaccccgagatgtacacggcattttttatcatgcacatcctcatcgccgagttttaccgggactcaacccgcgagccctacctggagaaggtgcacaaaacccgtctccttgaggtggtcgagcaaaagatgaaggcaatggaagcactcgaagacctggagacgaccagcgaaggccaccagttcaacttcaaagtgatcgccgaaacctggaacaaactcccttcggccgaactcagaccagacgagtgcgatgagatcaaacagcgcggtatcagttcgaagaacgccctggtcaacagcaccatcgcctttatggagaaaaaccagcttgtcagggagcacgacggggcggtctacctcaccccaaggtgcaaggcgatcatcgccgggacgtacagcaacgaggaggtccaggccgacctgagagccttcatcgaggggcttggcgatgccgcggaggaagacgatgcctaa

SEQ ID NO: 51942 - DNA, 4404 bp, Methanofollis liminatans DSM 4140
atgcctaaactccagcgtgtacgggttgtgaacgcccagttcgacgacgggaggggtatatacgaagactttacgatgcccttctatagccggaacgccacctacgaactgagaaacggcggcgggaagtctgtcctgctgatgctcatgcttcagtgcatcctccccaacacctcgcttgatccaaaccacccgttcaaggatatgttccgcggtggagaccagaaccgcaccactcacatccttgccgaatgggaactggaagagggcattgcagagaaaaaatatcttctgacaggtttttgtgcgaagagaaggtcggaccaggacgagggagaaaaaaatgacgggatcaagtacttctcctatatccacctctatgacaggcaaaacgatctcgacctcaaaaatatccccctctgctggagggagaggggtgactttgtggtcagggactatgccgacagccagagaatgctcagggaaaaggcaaaggcaggctacgacatctgggccacggacgtccgaaaggagtacctggaaaagatccagacttactgtcttctcgaacccgaatgggagttcatcaaacagatcaacagacaggaaaattttctgaagtcatatttccgggagttcaggtcctcacggacgcttgtggaaaaactcctgataaagacgatcgagaggtgcctccagcacaaacagtctctcaggaccggggaagagacaggcgggtcgaacgagaagtctcttgcggacgcactctatcagtgccaggaggaactcaaaaggttgcaggaagagcagaaatgcctgcacgactacgaacaccttctggacggaatcaccactctgcaggaggcaaaccaggagatgatcgggtcattccaggcattcgaggagtccaaacagagggctgcatcgcagtacgccgcacaccgggaagcgctcgcccgcaaggaggaagagatccgtgacctccaggagagggccgccgggaaagaggcggcactccactccatagaaaccgatatcgagatgaccggactcatcgtgcagaacgtccgcgtcaatctcctcaggcagagccttgaaaaggtcggaggggagaagacgcacctcgaagaagcggtggaggcacaggaacacgaggtgaaatgtgcatgggcggtgaacaaatatctcaggtacagagaggcgctggcagaggtcaggaaaaacgaggagtacatagagaatacaacacgcgatcacctggagatcttcacccggctccagagactgggaaagacgctcctcgcccattctctgcgggagaagcagagggtcaccgacgacctccagagaggagaggatgaagcggaagccctcaaagaggcaaacacaaaattagagcgggctctcggtggcatcacgacgcggatagaggaaaacagacttgcaattgataatttagagcgacagatcgcggagctggacgaggaggaggcagacctccaccagaaacacaaacaatgtccccgcgtcgatacagggctctcggatcagatccccacactcatcgaggcgacggagaggcgtatcacacgcgaaaatgatgcctgtgctcttctctctgcagagatcgatgaaagaaagaggcggctcgacagaaacgaggtgtcagaaaagggactgagagagcagattgatttaaggaaccgggacatcgatcgggtgaagagggaggtggaggcctatactgccgaagagcaggcggcacaccagatcgccggcctctacgggacggacgaggtcgagacctgccgtgcacatctcaacgaccgtatcggtgagctgcaggaatctctgagagacctgaaagatcgtcgcacctccctggagaaggagttggagggggtactgcactacggcgtcgccctgaacagggacactctggacgccctcgacaccctgcgcgagaaatatgcagaagtcatgagcggggccgaatacctgaaagacctccctcctgatgaaagagaggagagcctggccaacgctccctggctttcaaaagctatcctcctccttccccaggactacgagacaattgtccacagtccctccgtcctcccggccctcgtccaggacgcatcagtcgtcatcaccagttatggttatctcagggagaagagggtcctcaccctcggcgacgtatatatcccgtccaggccgccgaaacacactctccgcgtcctcgacagtgaccgagaggcggaacgcctcaggaaggagatctcaagaatcaacgatgaaagtatccggaccggggaggaactagaaggcgcccggaagaacgaagaggccctcaggtcatttgtcctgcgctttccccccggataccaggagcagaaagaagccgagatcaggggatatgcagaggcacgggatgaaaaggtcgccctgcatgccgccgtgcagaaagagatcgaggacgaccgggacgcccttcccgaaatagaggcacgcctggagaaaaaaagagaagaggtcaacctgttcgagagaaagcgtctcctgctcctaaatatccaggagatatcagggaagaagaaagaggcctccaaaggtctgcagcagaaaatccagtatgggaaggagtacgaggcggcgctggagcagaccgaggccgggatcgcccggggcacgctagacctgaagaacaaagagcagtcgaacagacagctgaatgcccatctccggacggtaacgggggcatgtgcggagtaccgggaatatgaaaaggatgaggtcgaccttctccctgacaccgacatctcacgactcacgaccgactaccacgccgcaaaggatgcagtcgacggggtcaacaaaaatattggccatgtccgggaaatgatcaccagagacagacgggaggcggaggaggcactggccgacataaagaatttacaggtctccatcgccgagatcgaagcccgaaaaccccacgaacccgtccccgaagaggccatcgaggtgctgaaagagggggtgcagaccctccgcggtccccttaagagggcaacagaacggtataatgctgtggagaaggaacaccacttcgagtcccttggcctggagaaggcggagggggccttcaacagccacgcaccagagccctatctccggaacccggcactcctcgacgcctcgccatttgaagcggacctggaggggctggaggacgtacgtgtgcgtacccgtagcgagatcgcggccctgcacggtgcacacacagaggcggatgacgaacggagagacttggatgcccagtaccggaactatgaggtgctcgacggtgtctatcattttgcggggaagacacctcttccagccagagacctggtcccctatgctgatctccggcaggaacttgcttcaaacgatgcacgggtgaaaaaaagcaggaaaaattttgagggcagaaaaaatatggtcatcgaagacctcagcagggtcaccgtcgcagtcgagttcgtaaacgagatcaggacaaaactcagggcggcggaaaacctggacgaggcatactccacccgccagagcctggacgaatctgccgggatgatcaggtcggacatcgccataaccagggagatggtggacgggctgcgcgaagccgagacaaagatcgtcgctcaggctcttggtatagcacggcaatacagggactacctgaaaaagttcccgacagcctcgaagatcgagatcgacgggcggacgtatgagatggtgcatatcaacttcgagacatgcgagtattccagcgaggtggcggaggggacgatgcaccagtacattcaggacctcacccaccagatccagactggcgagatcgggcggaaagaactggaaaaagcgctcatgcccgaccagctggtgggcagggtgctggacatggagcagatcatcgtcaaaatacgcaagatcgacatagcctctcaccccctccaggagtgggagaagatcaaggcctcagatggtcaggagaatacgatgtatatcatcttcctcgtggtcatcatgtccgcgatccgggaggtcgtcgtcgaccggtatgatatgaagaccgcaaaggtgcttattgtcgacaatcccttcggttcgacgggggcacactatctctgggagaagatcgggtcgatccttgagcgcaacaacgtccagatcatctgctcggggcataatatcggtgcagatgtgagagagttcttcccggtcaaccatattctaaccgaggagatgtcggcgtcgggcaggaccagaatcgggatcaggtttgaaggagtagggaaggaactggatcggcttgagcggcagaagcaagaagatgtcagggcctggctcggatcatga

SEQ ID NO: 51943 - DNA, 1095 bp, Methanofollis liminatans DSM 4140
atgcagaacatcatcagagcgatcctcctccggcataaaaataagaggatcgccctcagctatatgaaaagaatcctcaaagacgatgggatcaacctccttgctgataccgagtggcagaagcagttcatctgcacgatccgctacctcatccagaagggcgtgctcgtccccctcaagaatgcacgaccgctcaccgggtacggcgggcttcccgatagatataccatccggcgggacctgatcgcagaaaaagaagcacccctctcagcggagcataaaaacgaactcttctccctccctgccccgatgtccattgattactacgcacaccatgcagacacctatcgccgggaccgtgacgccatcatcaggatcagggacctgatcgacggggacgaccacgaggtgctgacagtcaacgaacgctcctacgagatcttcggcgacgagaaggcgatcgatgaaccgcagcacgcagcagtcgacggctcggcggtgctcaggaatctcggcctgatactcgcagacatcagggcaaaaaaggtgtttgaaccattcttctacattgagaagggcttcggtgcagagcaggggaaaacgaagagaaacgtcctgattgtcgagaacaaggacaccttctggaccttccagcgggcggtgattgcaggggagtttgacggcatcaacctcatcatctacggggagggaaatgcgatccagaaaaaattcgagtacatcgagaccgtgggtgggacaccggacgacctatatttctatttcggggacattgacagggagggcattgccatcttcaaccgtttgcaggcacgctaccccgactatggcatcaagccggccacctccttctacaccgccgttctgaggaaggcaggataccggaatgctcgccctctcaggacagaacaaaacagagggcagattccactttccccttttatcgacggtttcgacgaagagagcagggcggcgatcgagtggatcatcacggaagagagatatctcccgcaggaggtcctcaccgctgtcgacctcaggaggatgaaggcccttggactatcagagacattttaa

SEQ ID NO: 51944 - DNA, 1503 bp, Brevibacillus sp. CF112
gtggagcatgaacggctggaaagtgtgctggaggactacaaggagcgcatccagcgtcttgcgttgtttgatcctttgcacaagctggatgccaagcgggaaaaagatcggcaagagcggcctatcgatatgtttggactggggttgttagctctgctgttcttttttgaaaatatgttaatccgcaacaaaaagaccggggtgcaagagcttgccgcctttctcatgcagatgaaccaggaggagatcgacctagaggatgagggatttgaaaagatcgcccgaacgattattgagacgttccggcccgccagtggcaaacgcaaccaccggagcttttataactgggagacacggcagatggacaaggtggagttttcgattttgaaagcagagcggggagatatagcggccaacaagcagtattattccctcgacgaagacgggctagagctggtttttgccacaaaggagtttttccgggagtttcatttgtcgattaatcaattgctattgagaaaacagttggaaaaaggtgagttcggaggagcgctgcggcaaatcagcgagatgcggatcgatgtggaagctttgcaggaacgcatggtgcggatgaagcatgaagtgcagcgcaacattatttcggaagagacgtatgtgcgctacaagcaagtcattgaagacatccatctgcgtcttgcgagagagcatgaagagtttcacgaactgcaagggtttgtcgatgaaacgaaagagcggcttctgtatgagcgcaaaggagaaaaagaacaccgggcgtatgaatatattttacgcattgatcgggaactaggagaggtgcactttgcccatacggaactgttgaaagacagcatcgtgctgaaaacgacagctctccaggcggcacaggagacgctataccatgtggctttgcaatctttcaattttgaccaggaaatcgtcgctcgcctgatcgcttcccctctgcctctgaccgcgacgagaacattgcttgcgccgtttctttccctggagcaacatacaggctggtcgccgctggctgtgtttgaaaaacagcgggtagggggcgaactcgaggaagaaggtcagggcgattttgaagaggtaaccgatgaagcggaacaggagcagacgatcgtccagcagcaaaactttggaaaaatcatgcgctatgtcctcactgttctcgatgaacaaggagaggctacgatttcgcaggttgcccggcatatgcgggaaaacggacatgaacattggctgcagcatcgttccttttatgatttctggttgctcgtacatcagcgttccccgttgcaaaaggcgcacgaagaggaagaccatcacttgctgggggaagtgctcgccctgctgcagcctggacagcgcatcgaggtgattgagctagaggaacgcttgcagcttacgaagcgatttgaaatacaagatatgaaggtatgcagaaaggagagttcccatgtatga

SEQ ID NO: 51945 - DNA, 732 bp, Brevibacillus sp. CF112
atgtatgacaacgagcaggttctgacggcctttcgcatctattctcaacttagccgggacggacaggcagatacggaaagcatgagaatgtatgtgggcaatgacgtaatcagagggctggtggagcagttcgcacgcgaagtggattgtgccgtcattcctgcgggggacaagctgtacatggttccgctcgcggtaagctctccgttccatttgaaaaatgcttcgctgaaaaaagaatacttgcccgccaaagccaagaacattgatttgtacatgatgtacgtagctatcctcattctgtttggcgagttttacgacagctaccactcaacggaaatgacgagagattttatcaccttgggaagctggttggaaagcatcgacgcccgtatccagacgttgaaggaacatggtccggagcgcttgcaagcacttgacgccgagtatgaatataactggagtctgctggtggagaaatgggaggccattgatgacttacgtgagtcttccaggcagcaggatggacggacgaacagccgcctgggctttttgtctatcgtccaaaattttttgcgagaacaaggtctgatcgcggatctagggaaccaggagctgacgctcacggaaaaagccaagacgattattcagcgctactacatggacgtggattacaatcggggaattctggacttcatttccgggcaggagaagcagaaggagggagcgtaa

SEQ ID NO: 51946 - DNA, 4446 bp, Brevibacillus sp. CF112
atgcctgtcatttccaaaattcgctttaccaatgtgatctatgagggaggaagcaagcgctataatgatgagctgttcgtgtttgacgggcataacggcgcgattttgcttgaaaatggcggagggaaaaccgtcttcatccagacggccctgcaaaccgtgctgccgcatcaagagctggcgggacgcaaaatcagggagacgttatcgctggcaggcactcctgctcatattgctattgaatggattatcaacgactctcctcgccgttacgctttgaccgctgtcaccttgtttttgcacaacaacgacctcgattcgctgcgctatgtgtatgaatatgaagaggggaatccgcatgcgatcgatgagcttcctttttccagagaaggggcgtttgggaaaaagcgaccggcagataaaggagaaatgcaggaatactacacgcagatgagttctcggcatatgaacgcgcgtacgtttgcgacgatcagggagtatcatgcctatctggaagaacactttcagttgattcccgccgaatggcgtaaagtagcgacgataaacggtgcggaaggcggcgtggagattttttttgacgactgcaagacgacggaccaattggtgtcgcagttgttgatccctacggtggaagaggcaatcagcggcaacaatggtcaggcttttgcggaaatttttgaaaaacagcgagagcagttcaagcaaagcaagcagctccgcatgcaaatccaggagtgtcaactgctggaaaggtccgtgcagcagtataaacaagtgtttgccacgtatcaggaatcgagagagttgctggaacgggaaaaggaatggacgaaggcactgtttcagcacgcccggaacgaactcttgctggtaacagcggaagccgagaaaatcgcagggcaactttccgaattgcagagaaaaaagcatactttaaactggaaaaaggcatcccgggatattgcagcccaggaagcagtcgtgaagcaatacggtgccgaatggcgcgaggaatcgcgcaagcttgaaaaaatgacgctggaagccgaaagggcggaacgccaccagtacaccctggaatatgccaaataccagtcgcaaaagcaagtggccgaagaaaagctgacattggccgaatcccagattgcgaggctggatgaagaacaggacgtttcccagatcaaagaagcgcttgggcgcacgaacagagaaattcgcgggtactacgaccaggcggaaaaagaatggaaacagcaggagagcatgatccgcagccaactggacagtgtgctccagcaaaaaaaggccaaacgaaacgaaagcgaacaagagcgggaacgtctcgaggcaaataagaacaagcaagcggccttgcgagagcggatggaaggtgcgtccaaagagcagcagagaattgccggaaatattttgagcaatccacttcgcgaaacggtcgaagaattcattcctgtctggcaggaagagctgaggaaaaatcaggagaaccaaagcctttaccaacagcacatcaaagagtgcgaggagcagcaggccaagctggaaagcaggctggaggaaactcgcaaggagcttatggcctggcaagagcaagcgaaccaatggatattgcggtgtacggaagccgagaagcagcaaaaaagcgtcctgacaagcttgatcgagcacatccccaggctgtcctacctggattcgctctacaccagacaggagagcgtaacccaaacggtaatggacaaggtcgcgattttggagaaggaaaaagaagaggcattttcgcgggagcgacaagtgacaaggctgagcgatgaatacgctgaaagcggcgtgtatgcggccgatcccgaattggccgcgctcgtcgtcagatggagtgagtcgtttcactatttggagactggaccgcagtttctccaagaggtgctgcaacgtggagagatcgctctggaagcgctcactgcccgcttcccttattgggcagcagccttgattactaccgaacaggaaatcgaacaactggcagcgaggctgcaaaagcatgccgaccagctccgcagtcctgtcatcctcctttccttgcaggaagcgcgcaaatggctggaagcaggcgaagagtatgcattctcttaccgccaaatcgtcccgagccattggcaggacaatctggatcacgaacggtttgagaagtggaagcgggagttgcaagaaaaagcggctgcagtcattcaagcgcgcaaagacaaggaaaccgagtaccagaagctgtaccagttgaaaagcgagctgctctgtttttacgcagactatccgcaggcacggtacgcagactggacgcggcagcgggacgaatgccaggcgcaaaaagaacgatgccagaaggacatcgcgaatcatacggaacaaatcaagaagatcgaacaagaaaggaagcattatacggagaagctgtccgaagaaaaaggactggagcagactttgggctatcgtttgcaagaggcgaaccagtatatgctgcagaaaaaagtatgggaggaggcaaaaagacaagaggatgagctcgtgcgcgaggcggaactgctgaagcaaaacttgcaggccctggacagggcgttgaaaacgctggaggcgcaagagcaagaactgcaggaagagcgggaagagaagaccacggccctggcacatcttcgcggggaatggctctatgaacaggtgagagagttcccgccggccactccccggttctccttcgaaaggttgcgtgccgagcgagagcaattgacagataggttgcgggagcggcaagcgagccgggcagaattagagagggaggccgagcgtctggcgaaggagatcgaagcgaatcagcgcggaatgaatctggtgctggcgaagctggatcagccgctggaacatccggtcgtctatccggtggatggagacgtccagtacgaacgtatagtcaggaaggtcgcagaattgaaaaaaggggtcgcggcccagcgtattgtgacggaagagcggagcaatcgtttgtctgagcaaaacggccgccttgtgacattgatggagaagtacggagagcgatttggagatgagccgctggaaaggtttgaaggcgatctcaacgacgcgctgaaaaggctgaaccaggaggaagcggatacggcagcaaaacaagagtatttgctgacgcaggagcagggcttccgccaaacagtcaaagaactggaggacacgatccgggagctggaggccaagaacgaggtttaccgttttgccgaagccgccgttaccgatgtcccggtacgggaagaagagttgctcgctttcccttaccagcgcttggccgtggcgcgaaaacgaatccgggtgctctcccagaaacaggagactgaacagcaggaatggaggaaggtcatggctgaaaaggaccgattcaagcaattttgcgaaaggcagattcggaataacaaattgcggtacacagccatggccggaattcagaacaagcaggaattttccgaggtacaggaatgggcagacaccttgaccaggacgatcgccactagtatccgggtattggaggataacttgcaagggcgggacaaagaactgcaagatttcatcacgatcgtgcacacccacttgcagcgaattgccgtcgaactgaagacgatcccgaaaaaaacgagtgtccaggtagagagcggcaggaaggaagtatacagcttccacgttccggagtggaaagaggagatcggaaaacagctactccgtcagcacgttgactggatgttgaatcggctggacggggacgagtttaaggatgtggaagggaaagaagacgcaggaaaaatgaagaagtttatctacgcctccctgcagtccaaatcgcttctcggcatcgtcatgggcaatgacagcattcgtgtaaagtgtcggaaggtcagcaaagacggacaagtgagcggggcgctctcgtcctgggaagagtcaaacaagtggtctggcggagaaaagtggagcaagaacatgacgctctttttgggcatcctcaactacctggcggaaaagcgccagcgtatccagcaaacgggcaagcgttatcggacagtcatcgtggacaatccgttcgggaaagcatccagtgaacacgtgctggaccctgttttcttcattgccaacgaattaggcttccagctcattgccctgaccgctcatgcggagggaaaattcattcgcgattattttcctgttgtttacagttgccgtttgcgcgcttctgctagtggcgacgctttgattatgacgaaggagcgggagatcaaacacgcttatttccgtgattatgatccgtattcattgctgcggctgagtgagcatgaacagcttactttatttacgtga

SEQ ID NO: 51947 - DNA, 1053 bp, Brevibacillus sp. CF112
atgtacgatacatttatcaagcatctaaagtcctataaaagcacaaaaatatccctcggccagtttgaaacatgggctgatccgcagacaacgtacccgcaatttcaccgagccatgcaaacattgctcgacaaccagatcctcatccccgttcgaagttccgggacgaacgccaaaaatccgccactccctatggcttaccgcatccagaaatccgtcctttctcagccgatcaagcaagcaataaaacaagcacagttgtgctttcatccgagtatcaggctggacgtctattttcggcttgctgaatccagatggagcaaagatttgccgtacatccagcaagtgcatgactacctcacgcaacggggatttccgcagagcgaagcgacggcacctgagcgttcctttcacttggtcggggacgaaaagtggatcgatgagaaaggagggcgcaagctgctggaggcgatcggcgtgtgggagcagttgaaggttacagctatgcccgatccgcttatgtttgcggtccatctgcaacaggtaggagaacaacagggtatctatcggcacttgatcgtcgagaataaaaccacttactatgcgatattgcccatcctgtcttcgcttccctatgcgactttgatttatggagccggttggaaggttgtttccggaattgacggcctttcagagcagttgggagtggggcgggatgcgcgtcatcagtttgaatattttggcgacctcgatcatgaaggtttggcgatctggcacgcgctttctcaaaaatgcggggccgtgccggcagttgaactgtatcgggcattgttgcgacagcaagcatccaccggaaaaggagggcagcgcgtgaacggaaacgcgattgaacagttcatctcgttcttttcggaagaagaaagaacgcaggtttcggccttgttgaaaaacaaagagtatgtgccgcaagaagcgatcccggcagaagcgctgcgaaacaggctgcttgattcggcagcagagagaagggaggagaaagggagtggagcatga

SEQ ID NO: 51948 - DNA, 1395 bp, Bacillus cereus BAG5X1-1
ttggaagaaatggatcagtcagtaatttcgattttgcaaacagatccgtcgcatatgggagtacgaaatgcgatgaaagatttaaataaattatcaggtgttatttcagagcttggagagagtgagtattttaatgatccattgaaaacatacgagtttctactattattaaatattttaaatgaagaagcgctcggtttgacgtcttctattgaagatgtacgtacgctgaaatttcgttaccgtaatatgtacggtggggatccgtcgattcgtttagagcatttcattaatattttagataagtatggatggatttcaaaagggaaaagcaaaattacgatgatggacgtcgggaagcgaatgattgatgtgttaatcaggctagcaaacgattcgttagcgtattacatgcaagatgaaataacgaggtctttatatcaagcaaatcgtgatgcggatttaagtgaagcgtatgatgataaaggtgtatcgggcggaaataagttagcgagtatgattaaaaatgtagaagaagcggtagaaagactgaaagagagagaactggaatatttagcggaccgttatgcgttgccgcaagtacaaattattcatcgtttaatgaatgagttaaatgttcgctttgaagaaaggttccaaaagtttcaaacgtttgaagaaagtcttgtgctagagcctcttgtgaaaaggggtacgagcgtaatgtttgaaggatcacaagtgagtcttggaacgattaagaagattttacattttacacatattcagcagtctacagtcggagcgaatattcgtcatgaagcgcttcgtcgttttattgaaaattgttttacgaagcaaaatatggaattgccagatgcgcatgaaattttaagttttatggagcaagaccgtagagaaggcgagagacaagatgggctatggatgccagtacagtttgcggcgccgttatcaagtgctgcgatttctagtggtattcagtttttagaagagtacgagccatatacggatcatatagaagaagctgtgcaggaagaatatgaagagatagaagaaatgtcagaagcagaagtgaagaagctaatggcggatcagcaatggagtatgacgaaagagcaaattcaaacggaacgattagaagagtttcttctggagcaagaagaagttgatatggaagaattagtgctggaagccggttctaatacgtggggagatgcggtaaatgcattaatcgcactgtcagctttaaccgctaataataaggcggatattatggatgatcaaaatgtaaaagaaagaaacatagaaaaagaatgggaatggggcagtgacgatgataaacgaaaacgagttcgaagccggacaaggaattaa

SEQ ID NO: 51949 - DNA, 690 bp, Bacillus cereus BAG5X1-1
gtgacgatgataaacgaaaacgagttcgaagccggacaaggaattaatccgctcgcgaaattaggggaacttcggtacatattgtctcgtgatgaagagcatacgtttatgcaacttttattttcatcttcagcgcgtatgagagcaacaaattttggattgcgccgcaaagaagtaatgaaaatgcttgggttaaatagtgaagatatagaagggtttgagtcatttgtaaagcgcataaatggtgcgctaagtggctattttcagtgtgtatatgatgaacgacgtgatcaagttattgtgatgatgcgagtgccagcaaaacaagcgagagaagtattatcttcagagagcctcgggttacctatgtttattttttatcatcaagaagtgttgcaaaatgaatttacgctatttaatcaattacttagtgcgcttggacatgaaacgttgcaagcacgtagaaaagtacaaacgaatttagatccacttttaaaaattggggccattacgaaatatgattctccgtcccaagaagaggcatatgcgctaactgccattggaagtagaatgttttcagattcgttcttgcatagggcggccgagtttagtcagtcacaacaacttcatatggatgatgttttaaaattctttaagcgttataacgtaggaggtggagagacgatatga

SEQ ID NO: 51950 - DNA, 1377 bp, Bacillus cereus BAG5X1-1
atgattccataccgtatttctttttctggtatacgtgattataagccgagaacgatttctttaatgggaaaacgtgaccacattttaatttcaggtgcaaatggtgcagggaaatcaacgctgacattttgctggggcgctgttatggcatctacgaaagtaaatgtggaagggcttcgctcgaaaaatcttccggataatcgagtatggcgagcgaaaattgaactcgtctatgagaatgatgggtttgtagatgcagcgaaatatgtgagatttatgcttgtgcttgagcaagagccgggtcatccattgaaaaaagaatattatatcgcagaaggcgatcaagtagatgagtgggagcaagaaacgcgtttctcatcttcagataagcattttaactttagagagtataaaagaatgcttcttcaaaaatataaagttgatccagatgcgttctatttaatttggtaccaacaagatgtaaatcaatttgctgttatgaagcctgaagagagattccgtatttttagcgaaatgacagggattgatagtattcaaaagtcttgggagtctttcaaagaacaagaacgtgataaggaagcgattttgcaaacggctcgtaataaccaaattcaatataagttcgagcttgagcgctgggagaaagagaaaaatcgttatgaagatcaacaaaaccgtatgaaaaaagggattctgcaatataaaacagcgttatgtacactagaaaatcattattatacagagcgtatgaagtataaggatgaactagaagatgtgaaagagaatcttgatgagaagtatgaagaagctcagcaaggagaaaaacattttacgcaattagaaacggaattaatagcgaaacaagcgagttttcaaagtgtagaaaaagagcgtgaaattgccgaggaacgacaattacagtgcaaaaaggaaagtaaagataaagagcgagaatggaatgcggtcaaagaagagataaaagatgtaacggatcgtgtgaaaaatataggcattagtgaagatgttgtaagagcagaaaagagtagtaaagaacagcaattacaagaagctgaaaaggaaaaagtatatacagagcaacttattcgtgaaacaagtcataatgtaaatgaattaaggtcagaagttgcgaagctagaagtgcaagtagataacgatgaagcagctgtcgtttctgcaaagaattacatagagcaatataaatctagtttctatatggaagagaagcatacaaaagtagaaagtatgatgagacagacgaaagatcttgttgaaacagtgaagaaagatcttcagcaaaaatatgaagagaaaaagcaattagagctaaatcgttaa

SEQ ID NO: 51951 - DNA, 1065 bp, Bacillus cereus BAG5X1-1
atgaatggtatacaatttgttcaattatatgtaatgaaaattgctgaaaagattgatgatttatatatacgtaaagagcaaggtataacaattctccccattataaagcagaccccgcgtaagattataaaaacagcagagcttctttttagtgaagaagaagtttcagatgtttctactactattacaaaaaacttttattcacctaatgtaaggaaaagagaaagtgatgttttaaagtggttaacgatacatgaaatgatagattgtatagaacgagggattttaattaaagaagttcgttttgagaaggatgggaaaactgtgcattccattttttatcgaatggggtatggtttgtttacatatatggaaaagaaacagcagctagaaaaggtaagagaggaagaggctttacatcaatgggtgaagcgcaagaagtctatgccgaatgctacaaatgagtatacggaaagattgtggaatgttttggagcgcgttgaaaatgatatcgaaagtgctttgccagctgtagatgaaaaacgttggtcgtttcagaagacgtttctgtttttagagtttctgcttgctacatataaaattagttgtgagaagcgcagatttgattggaaagagattggcgcggcgtattatgaagtgattggtggttctaaaaagtttgatcaacataaaaaagaatttcttaataagttggaagatctgttagatgcaccaccgcattgtttagggttagttagtttagggacagtgacgcctatctttttttgcgggaatttatatgaaggtaatacgcgttatgagtgtgatacggtacgttcattaacggatttagttgtatttcgtcatgagtataaaacggatgcgaaggtgttatggctcgttgaaaatagagcagtattaacgaggatggccgcagaggatgactttattgtgagtaccggtagccttgtagtgggagtagatggtcaattacgtagtggacatagaaagttgattcaaagtgtattgaatcactcgaaatttattacgaaaattatcatttga

SEQ ID NO: 51952 - DNA, 1413 bp, Bacillus alcalophilus ATCC 27647 = CGMCC 1.3604
atggatcactcattaacgtccatatttaccgcgaatcaatcggatccagaggtctctcagtcgatgagggacattgcttcgttagcgggagtgttaaaagatttgggttctcaagatgcctttcaatcccctggggagattctacgttttttaagaatcatccaacttatcaatgaggaggcacttgggcttgatgaaccgattgaaaatgaagaaacggttttttatcggtacaaaaataagttcaatgatgaatcccccccttctaaaaagagagtggaacaggtgattcgtattttaattaacaacaattggatgtcgaagcaatcgaaacaattgaaaatgagggatttagggaagcggatgatggatatgctcatccgacttgcgaatgattcgcttgcttattataaacatgatgatattggtcgttccctatttcaggcgaggcgagatgcagagcttagtgaagcctatgatgacaaagggatatcaggagggaataaaattgctagtattattcgtaatgtcgaaaatgcgattcaattgatgaaagaacgagagctagaaatgttagccgatcggaatgctttaccacaacttgagctcattcatggcttgatggaagatttagatatcaaactcaaggagcgttttcgtcaattccaaacgatggaggaaagtctagttctctcctctcttatgcagaagggaacagcagtacttgcggaaggaactaatttaagtgtggggatgataagtaagtttctgaaatttacgcatatgcaagaaaccccgctttcttctaatattcaacctgaaaaagtaagggattttattacgaagatgtttgccccaccattagattcggacgttccgaatgcccatcaacttctcagttttatggaacaaaatcaatatgaagatgaagcgatggatggcctatggattccggtaaaatttgcctcacctttgtcaccgatagcgattgaagagggaatacattatcttgaaacgtatgaaccaattgaagcatcaatggaagaagatgaggaggagctcatctactcgaccgaacttatctctgaagaagatgttgatgaattaatgaatcaggcgaactggttaatgatgaaagaaatgatcgagactgaaaaaatcgaaaaatatatagaaaaacaagaagaagcgccaatcgagcaagtggtaattgaagcgacctccgtgaattggagtgacgctattaatgcgatgaccgcgatttcggcattagttggaaataaaaaaatatcgatcatgaatgggaaaaagggagcaaaagttcctgtgtatgatcgagaatgggagtggatgaaagatgcagacagagcaaaagtcatcagaaaacgaacaacgaataagtcagcagaatga

SEQ ID NO: 51953 - DNA, 741 bp, Bacillus alcalophilus ATCC 27647 = CGMCC 1.3604
atgcagacagagcaaaagtcatcagaaaacgaacaacgaataagtcagcagaatgatcatagttcagtaacggaagaacatgaggaaacaaatgtgaaccctcttaatgtgctgcaatctttaaagggggtcttatcagaaaaggaagagcttgttttcatgaatatcttgttttcttcttctgcttctatccgtggtgggaattttggcttgtctagaaaagaagtagagaagcaattagaaattcaaggggacgataaagaattttcttcttttatcacaagattaaatcaagcggttagcaggtattttaaagttatttatgatgaacgaagagatcaagtgattgtgttgatgcgtgtcccggcaagggctgcacgaaacacattaacaaaagaaagcttagtgattcttctctatatgttttatcaacaagaagtacttcaacatgagtttacgttatttgaccaacttctaaatgcgtttggacacgaatcaacaaaggcaaaccaacgaattttagttaatcttgatccgttgaagaaaatcggagcgattgaagactttgaaacctcttctcatgaaaaagcctatgctttaacagcgatcggtgtgcacttgttttcggattcttttttacgacgttcaaccgaatttagtcaatccaatcaattaaataaagacgaggttatgaagttttttaaacgatataatctttatcaggaaggggaatctgaatga

SEQ ID NO: 51954 - DNA, 3198 bp, Bacillus alcalophilus ATCC 27647 = CGMCC 1.3604
atgatcccgtggcgcttaactttttcaggcatccgcgattatgagccaacgcaactcgatttgtctggtaaagacgatcatgtcatgattactggaccaaatggggctggaaaatcaacgatcacattttgtatgggagctgttttgtattcgtcgaaagtagacattgaagggttgaaatctcgtaatttaccggagcagcagacatggcgggggaagatttcgctcctttttaaaaatgaaggagctatgaaaatagatgcccctacttatattcaattttcgttgcacattgttcaagagcctggacaaccaatcaaaaaagaattttttatttatgctggagaggaaatcgatcagtgggaaaccccaattaaattcacctcgggagaccgttttaataattttaccgcttataaaaaggcactagaacaaaaatacaaaattgatcctgacttattttacttaatttggtaccagcaggaagtgaatcaatttgcggtcatgaatccagaagaacgatttcggatatttagtgaaatgcacggaattgatcaagtgcagcgaaattgggaagaaagtatggagaaattaaaggatacaaaagaaacattaggatcggcagaagttaatatgaaacataaaaagcaattactctctttatcaaaaaatgcattggatcgttttttggataataaaaagcgcttagaatcaggtgctaagctttatatagagtctttattgcaactagaagttcattataaaaaggaaaaagaacagtttgaagatataatcgagcaaacaagaagtgaaatggaagaagagcaagaccagttagcagcgaaagaaaacgagcgggaacaaatcaaactcgagctaaaagaacggaagcgtgagaatgaggaacttgctcaaaggatagaggccgaagaagaaaaagaaaaccaattagctcaaacgattaaagaaaatgaagctacgataagtggtttagagaaagaattagccgttatcctggagcaaagacaatatattcggagaacagaagaggaagttcaaaatgagttagaggctttgaacagagatcaaaaagaaacaactgagttctttgatttagtcaagaataggatagacgaagtgtcaggtgaatggcaatcggtcgttgaagagataacaaggcttaaacaagaaatacaagttgataacgaagctgccgttatacatcaggagcgattggcaacgtatacgagtagttacgttgttcaaaatagtattgaacgattagaaaaggaattaaaggaaaatagaaacgaacatatcgatatagaaagaagattagctgagttatccgaggaactaaaacagttagaacagaaccgtgacttatcagaaagacaaatagattcattgaatttctttaaaatgaaaagaatccaagcgtatcctcttcgtgaactagtcgagctagatgaacaggcgaagctgaaggatgaacacttatttgatgcgatcaaatacacgatattttttgaagggaagagcattaaaccacctaatgatctctatcatgtccctttaatgaagttaattcctgaccgttccgttactcatctaccttcgcttcatttaaagatcaaaagtgggatcggcacaaaagagcatttagcgatgaaagccttatggtggattgaacaattgtttgcccaaggggaagtaaggattgaaaatggaatattagttgattcattaggttatagaggtcgacaagaaaaagaccgctttattttaagtgctaaagctttgttggcgagaaaacaagtggttattcaacagttgaaatcagctcaagaagacaaaatcaaattaagtgatcggatggaacattctacaaaaacgcttcaggaattgaatagcattattcatcgtgtgaaagaatcagaggcgtttatgacgttggaagaagagcgaagactacgtttggaaaagctagctgaaaagactgagcgaaaggaattattagagtctgagcaaaaagagttggacgttaaaaaagaaaagggaatccatcaaaaaatcgagcaagaaaattgtctgaatgagttaaaaaaggaagaacagttttatcaagagctcggacaaatgtcagataaatacgaaaagcttcatagtttaagggaaagaacggcaagtgatcgaaatgatttggacgagcaaaaacaacgtaataaagaactggagcaacaagaggaggctctcgactctaaaattagaaagttggaacgaaaagggagtggaatccaagacaaaatagattcggtgcatgatggcataagagttaaagaaaaacaactccaacgccgtcaagaagatttagaactaaacaaagaacaaatgatcaaatgtatccaagagctaaatgagatgaaaggtcttgtctctgagatttatgacgagtgcacatctgaattgacgggcgggcatttattaacgattacgaagctccttcataaccgtgaattagggaaaacaaaattcgatcgtgcccgttcggaagacggaatcgatccggcagcagaggcaaattacgaaacaattaaagaggaatacgatcggttggcaaatgaatataatcggacaaagttattgctcgaacaagatacagaacgggcacaagacttaaagaataagctagagatcacgataaacatgcgagttcttgaaattcaacaacgctttaaaatgtatatgaatgagtttcaatttgaaggcgatgttagttgggaatcctatgaagaccgcagacaacggacactctttaagctatatataaaagcaagaaaagaaggtcataaaggggctttagaggatgtaagtgtcaaagcacgtggaggaaaagttggaaaaggagtatcaggtggagaagaatcacttagctctcttctatttgccttagcccttctccaaaatttacaaacgacccctggctttattgtcctcgatgagtttgatagtgcgttagatgaaaacagaaaagtaaaggtgtttgatttatatgtgaaacaattgcaaagaaagttaattattttaacaccaaagtcacatgaatcaacatatcataatcgattttcaaaagcgtttatcgtcaaacacgatccaacgattccgaaaagtaatgtggtagggattgtgaagacttaa

SEQ ID NO: 51955 - DNA, 1428 bp, Amphibacillus xylanus NBRC 15112
gtggaagaagtggatcgacgattgatttctgtttttgagacagatgttgatcaaccggaactcttacaatcgatgcgtgatatcgtttctttttcaggggtgctcaaagaactgagtgataaagattactttcaatcaccacatcaagtgctccggtttttacgtgtgattcagctgatcaatttagaggcactcggactaaccgatgcccttgaagatgaagagcaaatattttatcgatatcggcacatttatgagtatgacgaagagatcaccttaggttttgtaaaacatctcatctatgtgttaggaaaatataactgggtgacaaaaacatcccgtaggattaaaatgcgggatcttggaaaacgaatgattgatagcttgattcgtctagcaaatgactcacttgcttattatttgaatgatgaagttgcccgttccttatttcaagcaaaaagagatgccgaacttagtgaggcctatgatgataaaggcatatctggtggcaataaacttgcgagtatgatccgaaacgttgaagaagcaactgaacttttaattgaacgagagttggaatacttagcagatcgaaatgcattgatgcaagttgaggtcattcaccaactgatgcaggaattggaagtaaagatggaagagcgcctagctatgtttgaaacgttagaccaggaacttatctttagtaccattaaacagcgtggcatcactgcgattagcgaggggacaaagatcagtctaggaacgattaataaaattctgaaatttgcccatttacgagaaaccgatgtgattcgaacgattcaacctgacctattaaggcaatttattgagcggacatttaacccaccagtcgattctgatattccaaatgctcaccagattttaagctttatggaacaagatcaatatgaagatgaagcgatggatggcatgtgggttccgatcaagtttgctagcccgatctcaccagagacagtcgatattgggattgactatttagaaaactatcaaccgacgacagaaccgattgaagttgttgtggaggagttttttcctgaacttgatgaagtgatggaggatgagcttgatgatttaatgggtgaggctaagtggcaaatgaccaaacaaatgattcatacagagcgactcgaaaattacttggatgaagtagaggaagcaagcttagatgaattaattgttgaagcggggtcatcatcatggagtgatgttttaaatggtttgattggtgcatctgcattgattggcaataagaaagcagatcttgatgaaaaggcaaataagaaaattaagcaagatcatgaaaatagagattggaggtggattgatgatgaacaaggaggctatggaattagcaagcgaagaagaggtggaagtggaaaatcttaa

SEQ ID NO: 51956 - DNA, 669 bp, Amphibacillus xylanus NBRC 15112
gtggaaaatcttaatccactcacagcgatgcaatctgtaaaaggctatttaacaaagctagaagaattgacctttatgcaaatacttttctcatcatcagcaacgattcgcagagggaactttggcttgtcccgtaaggaagttgaacgattacttgagattggtaatgatgaacatgcgtttcagtcttttttaaagcgggttaatggcgcagtgagtcgttatatgaaggttatctatgacaaacagcgaaatcaagtcgtcgctttaatgcgtgttccagccaaacaagcgcgaaatgtgttgagtaaagagagcttagccattttaatgtttattttttatcatcaagaagtgttgcaaaatgaatacacgctcttttcacaattaattcaaagttttggtcatgaatctttacaaattacccgtaaaatacaagcgaatttagatcctttaaaaaagattggtgcgattgatgattatgatgataataagggtgaagatgcttatcaattgactgcaatcggggcccatcttttttcagattcttatttacgtaggtatacggaattcagtcaatccaatcaattgcatctagaagatgtgattcgattcttcaaaagatataacttgaaaggagatatagccgatgatcccttggagacttag

SEQ ID NO: 51957 - DNA, 3189 bp, Amphibacillus xylanus NBRC 15112
atgatcccttggagacttagattcacaggcattcgtgattaccctgcaatcgatcttgatttttccgacaagtcggatcatattttaatatcggggccaaatggtgcaggaaaatcaacgattaccttttgtatgggagccgtactctattcaggtaaagttgtgattgatgggttaaaatcgaacaatttacctacggatcaaacgtggcacgctaagattgatctactatttaaaaatgatggcgctaaaaaggttgatgctcctcaatatgttcaattccgtctcgatattgagcagaaacctagcgagccaattaagcgagaattttatattgaagaaggcgatgtgattgacgagtgggaacgctcgacgaagtttacgtctggtggtaagtataattttaccgaatataaacaacaaattatccacaagtatgcggtcgatcctgatgcttattatttgatttggtatcaaaaagaagtcaatcaatttgcagagatgcaccctgaagagcgctttcgcatttttagtgaaatgaacgggattgataaaattcagaaaaattgggaagaaagtaaagcgctcgtgaaagagacagagctcacacttgaagaagcagagagtaaacaaggtttaaataaattgcaattgcaacagaaaaaaggtgaactcgatcgatacctcgatcgtaatcgacgcttgaaaagaggctatatcgaatatagagtagcactgaaatggttaaaaacatactatttggatcagatcaatagtctaaaaggacagatcgagcaattagaagagtcaagagtggaaacaaatgatcttaaaagagcattagaaagcaaatggcatgaaaaaaatgatcaagatcagttgttggaagagaaaataaatgagctcaataaacaaaatgaatcgttagatcacaagcgaaaggcactgatcaatcagttaaaagatcgtcaagcgaaacgagatacaatttctagtgagatcgatcatattagcaaagaagtcgatcggatagggcaatcaagaaaagatgtggaacaacaattaacgaatgccaaaaccacagtcaatcaactgtcaaagacgattgatgatctagagcggaagatcaaagtaattaacgcaaaagtaaacgaagacttaaatcagacgattgccactttaaatgaacaaatcaaacaagatgagctgaagtaccaccaggtgaaagacttaatcgatacgtataaaagtagcgcattagttcaagaagaaattgaaatgaatgataacaatattgatcgctatcgaaatgatttaattgatttaagaagaaaacaaatagaattaacaaaagagttagaggcacttaagaaaaatcaactcatcagttcacgacaagaacaatcgattaactactttaaaaatcagaatatcgtcgtttatccaatgcgggaattactagagcttgattcatctgcgaaagcgagcgatgaacagttatttgacacgattaaatatacgctttttgtcaataaaaagatttttaacgcaccaaatgacctttatcatgtctcattaccaaacattattccagataaatcactaacgcatctgccagaacaacgcattaaagtaaaagcaggattaactgatgatctctacgcattcgccgttaaagcattatgttggacacgaacattttttgaagaagaaaagccgaacattgaccggggaaagctgatcgatcaaaggggtgttcgtggtcctcaagaagagaaacgtttgattttaaatgagaagatggttcaggtgtaccgagaagatgttgaaaaagaactcgatcaaacaaatgacagaataaatcaatttgagaaaaaggtgaaacaactcaatcaacaaaatatgaccttatttaatcgacgtgaatcactaaaacacgcagaagcttttctaacaaaagaaaatgaacgtgaattaaggaaagaaagacagaggaaattagtggctgaacggaaggatttacttgatcaaaaagatgaccttgaagctgaattagatcaggctcgaacagatcgagccaagtggcaacaagagctgaatacttaccagatgtattatgaaacctatcttttatatgaacaagaacaagataagatcgaagaagttcaaagattagatgaagaaatcaaacaattgcaatctaatcgacaaaaattaacgaaacaattaacagagatagacgaagcacttgaagatgaaacacaaaaaagacgtcgcctcaaccgctcaattgaagatattgatgaccgaattcaatcgcaagcgcgagaaatcgatcagattgaacggcagatccaggatcgaacagaagagcggtttacaaatgaagaagttttttcaaaaacaaagcaagatttggacaggcttgagtcatcagcgagttatgaactcgaagatgaggagcctaaactcacgcgatcacaagcggaggagatgcgtgagcgtggcaaagcaacatatgaactggctttaagtatcacagatattgacgaagcagcgccggaaaactatcaaaagatgaaagaagaatacgacacatccgccaatgaagtgaaaaaatcgaaaattttattagatcaatatcgtgaacggatggaacactttaaagaagacttagaaaatacgatcagtatgagaatgctcggtgtgaatcaaaagtttgttcactacatgtccctattttcttttgaaggaaatattgagtgggattatctggtcgatcgccatggacaaacacgctatcgcttatatattaaagcaagaaaagaaggacatcgtggcaagctcgaggatgtaagtgaaaaggccagaggtgggaaagttggaaggggggtatcaggtggagaagagtcgctcagttccttgctattcgcactcgctttgctccagacaattgaatcctcaccaggctatattgtgttagacgaattcgatagtgccctagacgaaagccgaaaagataaagtgttcgaactatatgaacaagaattaaagcgaaagatgatcatccttacgcctaagtctcatgaagaagaatacttacatcgcttttcaaaagcttacgtcgtctaccatgacccaagtgtgcctaaaagtaaaatctttaaagtaaagcgtcaagttacctga

SEQ ID NO: 51958 - DNA, 1314 bp, Amphibacillus xylanus NBRC 15112
gtgataaaagtgatgtcaaaagcttggcttgattatataaatgaatatatcttgttaaaaggagagacactccatcaattggacagtgaggataaccatgatgtgatccaccttgatgtcatcaaacgtacggctcgaacgcgaagaatcgtcgctaagttaacgataggtattaaagagtcaggggtcccgccagagacattaatcagtactttccctaccccgaatgttaaacgacaattaaatgataaggaaaaggcatatgaatggatgagaaatggctgggtgataagggaatatcgattgaaaaaagatgagcgaaccattgatcgtgaacaataccggatgggttatcctttatttttatttctacaaaagctaacgacaaaaatgttagaagagcgtaatgattcgatgcggtcatggttaaataaatggcaaaaaacaaaacatcctgagcaaggacttagtctcgaacgtcttgatttattaagacgattaaataatgtactaagtaaacttgctagtgatgtcattttagcaatcgatcataacctagatcacatagaatccttaaatgttggttggcgttttaagaaacaacttacatacttacatttcttgcttgccttatatcaaatatcgagtgaccaacagcaatttgattggaaagaaatcggtgcgcgttacttccaatatatcggtggatctaaagtgtttgattcatataaaagcgatttgattcaagaagcggaagtgttattgggacgtcctcttcatttatttggtttaacaagccttggaacgattacccccatttactttgcaggagaaatgaaaagtccgcgagctaactatcgttatggaagcatccatgcaacaacggatttggctgtttttactgaccgatttgagacaacagctgacgttatttggcttgttgagaatagaggggtattgacacgcatggcttatgagattgactttataaaagcgtcgaagagttttattcttgcaatcgacggtcagttacgctcgagccatcgacaattgattcaatatttgatgaaaaatgtgaagcaagtgatcatttggacagatattgatgaggcggggttggtgattgctaaggacgcagctgaccttgttcgagcaagtaatacaaaaataaaatgggttgttccgccgttagatgttacgacaaatcagatggaattcgaggacaagtatcaaatagctatgaagataaatagggaagaacaagaacaggagatgggaggtgttgagtggtggaagaagtggatcgacgattga

SEQ ID NO: 51959 - DNA, 1506 bp, Bacillus bataviensis LMG 21833
gtgaacgaatcatgggaaggctttggcaagcgagtgcaacgattaaatccactgtttgagcttgggaggggaatggaagttggtgagctgaagccacatattcaaaccattctcatgcaagtactccttagcattttttatagagaattaaatgatgatgatagtagacgcaaatcagatatcaaatatatggtagaagactcagttaaacaaatgaaacttttagcagacgataagcaaattgaacggatgacaagcgggcttttatatcaggggaaagaggagtatagtaaaccgtttgaagccctatattacgatgaaataagacaatcctgggagactcaggtctttcgctatgtcacaatggatgaattatatacgaatttagaaatcggcggatccattgtttataaactcacagatgtgtctcaggaaatgatttttatgagcagggaaatggctgaggaattctcgattacgattgaacaactctacagtatgcagctgattaaaaacggtaattttagaaaagctacacgaaaccttgatcacctcatttcacgagtaaaccgcttaatggcaaatgaattcacctttcaaaaggaaatgatcaacaatcctaaaatcttattgattgaagaggaatggcaaagggcagacaatcgtgttgaaattgaaaagcaatttgaagaggaaaaaaatcacttccgtaccattactagtatgatagataagacgaaacgaaggaacgaagaagatgattatattcagaaagaattgattcttctccaagaaaaaattggccatacaaggcagttgcatgatcgttttgcgaagctagtcattcaaaatatttcctatgagatgaaattaaaagcggaaaacccctccttgttttgggaaaatagcttggtttcatttcgcgagcatatttatgaaaattggtttatgaaggaaggcgttcatcattttacggatatagaaagagtcctttctcctttattttcaccgaagaatgaatttattttgccgctagattggatttggggtgaacaagaattcgatgaaaaaccattaacggaagctgttattgaagaagaggctgaagaaagcattactcgtcagcacgtgacgaactggaattctgttattaaggcatggagttatgtatttcaatttttacaaacaaataaagagttttcgttaacggatttaaagtcaatgccattagaagtgcaggatttatggtttgaggaatctgaaacaattgatttgtggatgatgttcgataaaaagccgctaatggttcaagttctgcatcggaaggaagaaacattaagcgatgaaagggaaattcttctttataaactaatgaaggaatatccacaattcgaactgtttgaaggcttgaagatttttaccatgtttgatcatcgtgcggagccgcatcattggtatcaaatgaaaatgaccccttttaaaatctgtgtacaggaggagaaatga

SEQ ID NO: 51960 - DNA, 747 bp, Bacillus bataviensis LMG 21833
atgaatgccgaaaacataaaaaaagcatctgctgtctattttacactattaaaaaataaagtaatcgacgaaaatagtgaacacttccagacttattttgatccggaagtaagacagacggttcttttattagcagacgaatcaggtacatatatcattgaatcgcctaaacgcatccacttagtggtccagccaactggctccgtgttcgctaccaattttacccatttgaaagaaaagcatcggcaagtggaaacgaaaaaacacttccatctgattagtgttgtcataatgtcctttttagcagccatcgatcgcaaccaggctgcaaaaatccgtacgaagcgggaagggattagctactacgcattagagcggcaagtgaacgacctcatactaaaatgggatagcattcttaaagcaaaaccgaccttcggagacgaagaacgaattgatatgaaggatgtggtaaccacatggaaatacatggaggttgacacggacgattatgggttaaaaaaaggcaatagacgaacgagaatcggtttaattgccggtgctatgcgtttgttagacacagaggggctaatcgtcattcttgatcgcgacgatattcccaaggtgattccaaaacaagagctatttgagcgtattgaatacttgtatcacgattatgatcgttatgaagttttgaaaaaattaatgacaacagaggaggatcagcatgccgaaaatccatcgcattag

SEQ ID NO: 51961 - DNA, 4464 bp, Bacillus bataviensis LMG 21833
atgccgaaaatccatcgcattagaattgtcggcctgaagtatgatggcatgcaaaagcaatataaagataccacgtttaatttccataatgatgagacatcaacaaatggtctcattgcgatgatgaacggtggcgggaaaggtgtgttccttcagaccattttccaaatacttaaacctggaacttcgtggggaaaacagaacaatcggtattatcagcagtttttctttaataataaagagcaatttattccctataccttccatgttcttattcagtgggaattggacggtgccgatagcaggcatctgataaccggaggaatgttctcggccgaacagcggatttccatgagtgatgaaagtggtaatgaaagtaaaacactggaacaggaagctaagatcctccctaacattacattttatacaagagaatttgagcggaaagaagaggcagcacttgagcatatcccactctttgaaaatgatgaggttgctgaaacggaaagtttgaaggactatttaaaatggaatggatttgacgtttaccgagatacgaagaagcactatcgcatccttgatacatatggaattaaccgtaaggactgggatattatgaaggacattaacaaggacgaaggcggcgtggggaaatattttgaaggagctgaggatgatcattcgctgttccaaaaacgaatcattcctactgtcagtcaagtcttgcagcgaactgaacatcaaaagaatgatcttgttgaaattttcaagagccaggcaagtatcgcgaaggatctgcccgttctcttaaaaagagaacaagcccataaagagtttttagaagacattctcccatttgaagagcacctatctaaaggagtaaagcataaagaaattgctcttgcaagtatacaggcagggagacaactgcttggcgctttagagcatttgaagcaatcggaagaggaaacactgcttactatagagaaagacatggaaaaattaactataaggcaagcagatttacggtatcaaaaggataatttagagtttgcaaatgctcacagagaggtcatgaattgggataagaaattagtggcagaaagggaaaaacatacttctttacaagcgattgttaaagagaaacaggaacgaaaagaacagcttgcctttcagttattagtaaaagagtggagtgaaaacgaacaaagtattcgctctctttcacagcagattgcgacattagaacaaaatagcggcttagagcaagtgaatcaaagaatggatgaaattaaactagaagcaagaaagcaatgggagcatgcccttttatcgataaaagaaggtataaaacagtatttaggatatcaaaagtttttaaataaaaaagcaatagagctgtcgcagcaggataaaaaaatgacaaaagacattgctaagcttagttccgaaattgattttctttatacgcaaatgcatacgtttgagtctaaggaagcagcactcatccaagaatttggcgaccgcttaacctatgatttaaagggtttaaccgagagttttttaaaacaaattgaagacaaagaagctaggttagtagagttgcaagcaaaagacaaagaatccattgaaaagcaaaatcaacttgccaattcacatggtacgcacgttcaatcaattcagttttcagaagaaaaatgtgaagaattaaaggcagcaaatgatgtgcaaaagcaaaaagaagcaaaactattagataagcttcttggtttactagatgatgttacagcgccgtttactcactcttccttatcaaagtatgcgatacaaatagaagaaataatgggcaataatcgtcaacaagctgaacagattaaaaaagaactttgggaaacacaactcgaccattccttaaacaatgagcccttctggattgcaaataaagatgtgaaagaattaaaggaatggatcgatgaaaagacggggattgatgtgttttatggaactcaatttctccaatcattaagtacagaggaaatggtgaactcccttatgaccgatccgcttcttccatacggtttggttgtaaacgggcagcaatggcaaaagattaatcaacaggttcttacaggaagaatgtataaaagtcctgttccgattttcttgcgtgaggaaatgaacagccaaaaacaccagtcatcctttgtgattattaacggaaccgagaaagagcttttaagtgataaaaatcaattcaccagttggaaaataaagattgctaagcaaatagaagaaaaaaaagatactcttatagaaattgaaaaaacggaaacctccttacgtcatattctaaaagaactcgaccgttttttatcaagtgagctttctagtgatatcgaaaaagctttctctcaggaacaaaacgttcttttttctctgcaaaccaaattacaggaagtcaaaacacaaatagaaaaagagaaagaaacagagctgcagctaaaagaacagctggaaaagacgaaaagtaaagttgaaaagcttacaagcaatgtggaaacattagaagactttattcaagaaaaaacgcttcatcaagaaaacaaacgggtgaaactggagaaagagaaacaaagggaaacttttgattcagagcagcaagaaataggaatagaacaccaaagtacagttgaactgcaaaaccagtggaatcaaacgtatgtagaatggaagcttacaaccgaacaaaatataaaggagatctccttctttattaaagaagcggtttttcctactgataataaagcagaccattgtgaagagacttcacatctttcactacatttattacaagagataaacggaagtattgaagagcttaaactgcttcaaaaatcaaaggaagagcaggctagggaattactcgttattcaagcgacaaaagaatccgaacaaaagcagcaaaagaagctagagaaaaagcttgctacttatgatcaggattggaatcaagctccagaaccagatgaacccatcggtatattagaaaatatgctgcaaaccgcacagagggaagcaaagacagcggaaaaagaagaacgggaacaaggaactgctgtaacagtagcagaaaccaccttaaagcatgcgaacgaacagcgtgacaagtcgggaaaaaagatagcaaagcatgagaaactgcctgaagaatgggaagaccttgacttagaagttaaggctgtagaaattaaggatcaaatgaaaataacgaatgaggaggtaaagcaggccgagaaacggcataaagaaacagaaacgaatatagcggtcttcgaaggagatttgttaaccttatccgttattcttaaggaggaagcggcagcattcacgaatgatgatatagaaaaaattaagagtcagggaaaaacatgtatcttatcctggagtgaagaacatcaagctaatcaggaggaaggccaagaaaagcatgcgaaaatcgatcaatcattaagaaatttaaagctcacgattgaaggcaaagattgggagattcggtttaaaaatgaagtaataacaacactagaccatatggatacaaggcattatacacatattcaaagcattgttaaaaatatgaagcgtttttcacaaagtggattggaacaattagaacgcgacaaagaaagggcggaaaaggctcaaaatttctgggccagccgtgccagcatgaaagtcatgagcatttcagaggcgattcgttccatgattgcgaaaatgaaactgaaaaatgaacgaggatcctttccgctcgtccagctcaaggaagatatcttaccaaaaaaggctgaagatatcgaaccactgcttaggcagcattttgtatctgccattaacaaaattactaaacaatttgatatgattgataatcataatcaagcattagaccaagaaataaaacaactcattagtgatgagcaaattttgtttgtatcactaagaaatcgatatcctgagttgcttgtctataatatgcgaaccgataatgcctttatgtacggtaaaccgcaaaaagagcattattcaacctggcggactattaatcaaggttcaaagacaaaatcggatggaagtggtggacagaagctatcagcacgaatggtgatgatgatgatgttattatcagttaagagcgaaacagatcaaagctgggtacctttagtctgtgataacccattcggacaagctgcttcggcacatgtccttgacccgatcttcgcagttgctgaaaaactaaagttccaattcatcgtcgtcactcctcctgaactggtgaaaacggaaatcagccaaagatttgccgcctattataaattggacttcatccgtgaaaaaggtaaagaaattgtttcggacacgattgttccagcctttcggatttaccagggagaggaagtcgttcattaa

SEQ ID NO: 51962 - DNA, 1098 bp, Bacillus bataviensis LMG 21833
atgacaataagagtatgtaagcaggtgagttcaatcgacatcattgaaacacgggtgaggggttttatagctgatattcaacaccctaacaaaaaaaagaaaataaatagtaatgatttagaaattcagttgcgtaagcttttggaggattattttgaaatggacggttattcattgttttatcgtgccattgaaacattgcaggctgagggacaactgatccctgttcaaaataatcaatataatggtagaacaccagcgctgcccctatattactgggtaaatataaaagagaaggcaaacaaatgggatcgtcttgagatgatgaaattaggtaatcaatttgatttttccttttatgaacggcatcccgaatggcaaacgaaggaagaatgggagcgaatccagaatgtatatgcttttttaaagtccagtcaggaacggaaaatggtgtcagtcgaagaaagaagtctggagctatttggccatgaaaaattcttactagacactgatagctttcctgagggaaaaggatttttgtgtagaattggagtatcagaagagcagctaaaaatggtgaattacggggagccctttgtattttggataaaacaagggaaagaaataaaagatattcaaagggtattaattgtcgagaatctatctttcttccatacttccattaagttagtagaagcaaataaacttgactatgaacctgaactgattatttatggtgaagggacaaaaattgaaaggagcttttcctttttctttcgaatgtttccactgaagccctaccttttctattatgcaggtgatttggatgccgcaggatacgggattctcattcggttgatcgaaaaatacccggaatgctgtattcagcctgccttaaaaatttattgcaaaatgcttgaatgcctagaacaaaagaataaccagaaacaaggtcaactatcaactcttaaacttcgtgatgcattctttcaatggtttacggaagatgagcaagccctattaatgcaattatggcaggaaaataagcggatccctcaagaggttttaacaatagaaacatggaggagatggcagtga

SEQ ID NO: 51963 - DNA, 1518 bp, Clostridium sp. Maddingley MBC34-26
gtgaagattaatgtgagtaatgtagttgaaaattatcgcgagagaattcaaagattagcactatttgacccattatatgcacttaatgaaaaaaagttaaaagatagaagtgataataaagttgactactttagttttggattattaactctgctttttttctttgaaaatatgcttataagaaatagaaaagttggtgttaaaaatgtggcggagtacttacagatagtaaatgaagggcaatttgatttggaagatggggattttctaaaaatagctagaactattatagaaacctttagaccaccaaatggaaaaaggaattttaagactttttataactatgagacaagaaaagaagatattgtccaatattctattttgaaagctgataaagcggatttagaaacaaatacacaatattacactttggacgagcaaggtttggagttaatatttgcgactaaagagtattttaatgaatttcaattgtcaataaatcagcttatattacgtaaacagcttgaaaaaggagaatttataggcgcattaaggcaaattgatgagatgaatctagatgtaaaaaacctttatgacaggattttcagaataaagcatgaagttaatagaaacatagtctcaagtgaaacttttgaaagatataaaaatatcataggcgacattaatgatagattaactcatgagaatgaagaatttgaagagttaagaagctttgtaaacgacaccaaagaaaaaattgctaatgaaatgaataaggaagaagacaaaaaagcttttgagctaataataaaaatagataaggaattagatgaagtacattatgaacatagaaagctattaaaagagagtatcttgcttaaaacttcagcccttcaagcagcacaagaatcattatattacatagggataaattcttttaactttaatcaggaaatcgtaagcagaattttttcatcaccactcccattaaacagtaccagaagattaatagaaccatttttatatttaggaaaagaaaaaacatggtcgccaatatcagtgttttcaaagcagcggattgagaatactgaagaagaagaaacaagtgatgaatttttaaatattttaagcaaggaaaagctaaaagaggaaatagaaatacaaagtaataaatatagacaagtagctgaggtaatattaaaggctttagaatataaaaaagtaaatagtatcacaatagaagacgttattgagttcataaaagaaagtaatgaggaagaaataattaatcagcgtcctttttatgatttttggattattcttcatcaaaaatcaccaataactatgaaaagagaagataatgaagaagaagaacttatgggaaaatcgtatgatgtattttcagcaaaaggatacttgttatatgttgaagaattaagaaatgtattgaaagttacaaagaggtttactataaaaaatatggttttaaaattggaggatagagatgataacttatag

SEQ ID NO: 51964 - DNA, 735 bp, Clostridium sp. Maddingley MBC34-26
atgataacttatagaaatgaacaagtaattcaagcatttaaaatatactctatattagctaaaactggatatggagaaaaggatgaattacgtcaatacatatctgatgatatgattaggggattggtggatcagttttctagagaagtggactgtacgatttttcttgcaggagagtttatatatcttgttcctatttctaaagattctatattccatgtatctaatgaagttattaagaaagattatctgccttcaaagtcagtgaatttagacatttatcttatgtatgtttcaataatagtattgtttggagaattttatgatagttatcagacaattgagcctacaagagatttcattaatatttcagattggttagaaagtttaaatgatagaattgcaagtttgaaggagcacaatagtgataaattaaaggaattagataaagaatatgattataattggtctttaattatagaaaagtggcttgatatggatgaaattaaagaaacagctaaggcacaaaatgctaggacaattagcagaaagagttttttgaatagtgtaaagaactttttagaagatcaagagcttattagtgatattggaaatgaagaattggagcttacggaaaaagctaaaacaataattcaaaggtactatatggagtatgactataacaggggaattcttgattttatgtacaatttggacaagaaggaggttaagtaa

SEQ ID NO: 51965 - DNA, 4329 bp, Clostridium sp. Maddingley MBC34-26
ttggaaaatggtggagggaaaacagtatttattcaaacggcaatccaagcaatactaccaaatcaagagcttgcagaaagaaaaataaaaaataccttaatgcttgaaaataattctgcacatattgctatagaatggataataagcgaaagacctagaagatatgcattaactgcagtaaccttgtttatgaataaaggttcagtagatgctttaaaatatgcttatgaatatgaggaaaatgatgatgaaacaattgaaaaacttcctttcaaagtgaaaaatgcaaatgggaattatagaccggctaataaggatgaaatggaagactattattctaacatgagtaaaaatagaattaatgctaaagtattcaagataaagcgtgagtataataggtacatagaggataggtttaagattattccaagggaatgggaaagaattgcaacaataaatggtgcagaaggtggcgtagaaagtttttttgattcttgtaagacaatgggacaattaatagacaatcttttgattccaacggttgaggaagctttagcaggaggaggaacaaaggaatttgctgaaacctttgaaaaacaaagagagcattttaaagagtataatcaattgaaagctagaattgatgaaagcaggcaagttgaaaatcaagttggaacgtatatagatcactataaagagtttgatgagataaatactaaggtaatggaaacaaaggaagcgctaaaagcgttatatgaattaggcaaaaaagagcacaacttaaatgatgaaaagctttcaaaaataagtagagaaatacaagatgcaaatgatgatgaaaaaaacttaaaacaaaaggaagcttcttataatttggcacttttagagaaggatatgcagcttaagagcgggattttcaaaataaaggaagatgaatataataaaatattgaataggaaaatggaaaaagataagcgatattcaaatttgaaggttttaaagtttaagaaggagataaagcaggaggaagaattagctgagcttaataaagttcaaatagacagtttagacaaagatgaagaagtagttgatattaaagatgaattagaagaaaatgcatgtgaaataagaggttattacttagaagaagaagataaactaagcagacaagtccagtttatagaaggccgaatatataatgcaaaccttgaaataactgaaaaaaaagtactgttacaagaaaaattaaaggatgacaaaatattagaaaacagtaaaagtagcttagaaggtcaaagtaaaatcgtagaagaagatatagaaaagataaaaaaagaaattttatctgataaaagacaagaaaatattgaagataaaattattgaatggaaaaatatattatcagaattagagaaaaaaatctttaatgctcaaaagaaaaaaagtgaattaaataatgaagaaattcaagtgaaaaattcattatataataaacgtgaagaatatgatggtcttaaactacagagtattgaattagaatcaaaattaaataagctaaaagatgaagaagaagttttagtaaggagattgaaagaattcaaaaatagtttttatggtgtagaaactcttcattctaaagaagtagtaataatagatcagttagagaattttcttgaaaaggctagagaaagtaaagaaaaagctatacttgaagagagaatttcatatagatggcttgatgattataaggaaagtgaatattatactgcagatgctgttatagaaaaatggcttatttcctggagaaatcaatttgattatattgaaagtggaactatttatattcaaagagctgctaaaaataatgagttacctgaagaggtttatttagataaatttccatattgggctgtaagtttagtggtttctgagaaagaaaaagagaaattaaatgaaaaattaagtaagagcttagataaattaataaatcccgtgatagttttagatgaaaaagaagctagggaaatacttactgggcacaaggattttaatagagataatatttttgttccaaccccatggaaagataatatttcacagaacttttttgaaacccatagaaaagaaatagataaaaaagctgaagaaattaaaaaacaaagagaagaaagagaaaatgaatatataattactgatgctttattaaaagatttgaaaaaattttatcatgaaaattcatatgaaaaatttagcaatatgaaaaagttacttgaggaagtgaattcaaataagaatatagctgaaggtactataatacaatttgaaaagagattagaggatataagtatagaacttaaaaaaatagattcagaacttttaaattgcagagaaggaaaatcggatttagaaaagaagcttgagaaagctaatgaatattttattaaaaataataagaataaaaagcttataattgatattaaaaagctaaaaaacgaaattgcaattttagaaattgaaatcaaaaaaattcaaagtgatattaactataaacaagattttgtagagggattaaagatagagcgcaatgacgctgattataacaaaaggattatttcagaaaaagaattttatgaggagactaaagcaaacactcctaaaagttcaaataaatctataggagctttagctcagtttagaaaaagtttaaaagataaacttgacaataaacagaaaagtagaaagagcatagaaaatgagcttaatgaaagaattaaaagaataaaaacattaaatgaagatttagaaaattacaaaaatgaattggattttgatatagatgatagttttaatgatataataagcgaagatgagcttaaaaggcttattaaggaaagaagagaacttaaaaagatattggaaacaaagaaagacgaatatgataatgcaagagatagttataaaaacggcgaaaatacatacaaagtcaaaatgaaagattacaatgaaatttatgaaaatctaataacctttgataaagctttagaagaagtagaagaacttttaaataatgagaaaaaagttttagaagaaaagagtaagaagcttcaggcggaagaaaagaggttaaatgaagaaaaaactgaattagatgaggttataaaaaaattagaatattgtaatgcaggatatccattcttaaatgaggctattaaagagattcaattaaatgaagaaataaaaaataatttttcatataagagaaaagaaataataaataaaatttctaatcaattaataaaagtacaaaagcagtcagatgcaaaatttgaggagactaaggagcaaaaggaaaagtttttaaatttctgcgaaaataaaatattagatgttaaattaaagaagatggcagttgatggggtaaatttcagaaaaagctataaggatattattgaatggcagaatataatgagtgaacgtataaatagaactatagaattactagagcgcgatatgcgtgaacatgatgaagaaatgaagcagtttataaatcaccttcattcatatttagtgataatggctcaagaactaaaagcaattccaaagaaaactaaaattaagattgaagagaattggaaagaaatttatttatttaatgtacctgattggaacgaaaaggatggaaaattggagctttataatcatataaactggattcttaaaaaacttgaaggtgaagaatacagagatgaaaatggagttgagaatggagaaaaagttaaaaaatctattgaaaaatggcttcaatcaaagcaactgcttcctattgtaatgaatcataagaagataactgtaaagtgcagaaaagtaactaatgatggtaaaatgagcagtatgccattttcatgggaagaatctaattcgtggtctggaggagaaaaatggagtaaaaacatggctttattcctaggaatactcaactatgttgctgaaaaaagaaagcagataattccactaaagagtcactacagaacagttattgttgataatccatttggtaaagcctcaagtgatcatgtacttgatccagtattctttattgcagagcagttaggttttcaaattatagcattaacagcacatgcagaagggaagtttataagaacgtatttccctattgtatatagctgtaagcttagaagcagtgagaatggagatagccaaattctaataaacgaaagagaaattaaaaaggcctttttaaaggatgcagattcagaaaaattagaaagacttggacaagttaatcaaattatgatgtttgaattttaa

SEQ ID NO: 51966 - DNA, 999 bp, Clostridium sp. Maddingley MBC34-26
atgtatgacaaactaattgaatatttaaaatcctataaaaagaaaacaataaaattaagtgaattggaaaaattgccagatggaagtatgaattatgagaattttgtggcaagcataaagaagcttgttgaagataatatattaattgaaagaggcactaaaatcaattctttggcattaagttatggtgtaaatcattataaactccagaaagataaaatagatgcaataaataattatattttgaagttttctaaagaaattgatttaggagattattttaaattatcagaagaaacattttataaggatcttcaatttatacaagccgtggatgagtacatattgagtaatggtattcctgagagctatgttacatctcaggaaaggtcttttaatattttaggtgatgaaaagtggatagatgaaaagaatggaaaaaggttattagaaagaataaaagtatgggataaactcaaaatcgtaaatgattcagatccattaatgctagctattaatcaaactggttttggaaagcctgtacattatcatcttattgttgaaaataaagcgacttttttagctcttgtggatattttaagagaaaccgattatactacgcttatttttggctgtggatggaagatagtttccaactattatatgatagataaacagcttaatttgaaagataaaaatgaatttatgtattttggagatatagataaagaaggtatttccatatggaattcgttaaatgaaaaaatgaaggtaaatatagctgttaatttttatagagagctacttaaaaaggattatagtataggaaagaaaaatcaaaagagaaacgatgaagctataaataatttttcgaaattttttactgattcagaaaaagagattttgttaaatatgataaataatggtggttatttaccacaagagggattaaataaagaagaattaaaaaggatatggagtgaaatgtgtgaagattaa

SEQ ID NO: 51967 - DNA, 1443 bp, Thauera linaloolentis 47Lol = DSM 12138
atgagctcgtcggccccattggatgttctgctagatctgacgcctcagcagcgaaacttgctgttgatgaggccactcttacagttggaactcaccaagaacaagttctcggattcgactgccgacgggcggagcctcttcgatggtgtagacacgcactatctcagcctcgccgccttgacccacatgatggagggcacggcagtcgccgttggatacacccaggaggaggtggtccagcacttggccgcaatcgtgtctcggatgaagcctgccgcgacggcggggcaatccctgcgtattgctgagatcgttgtggacgcgctggacaacgcgtctaacaactacctggagcattcgtacgaatacttccatgccccttctggcgaaacccggaaggtgagctttcggctgacgacctacgagcccgacctcgaagacgagtaccgataccgcccgacggcagagggatacctcgtcctcatgggcatgctcgatctgaaggtcgaggaccatcagatccttgtcgagcgcatgctgcagctgctgatagaacgtggtcgattcgatcaggcctacgagttcgcaaggcgggctcggatgctctctatcgagcaccgtcagcagattcgagacttcattcatcaggcttggcgggcgcccggctcggttgcctgggcgcgcgatatcgcgccacggctgaacgaagcgcgtgtgcacatccacgcacgtcaagaagaggacaggcgcatggaggaatcggtccgcgagcaactgattcaggtgactgacagtcaagcgcgagagcaactcgtgcggttgcacgacgttctcaaaagtgcaagcggggtgcgcgcccaccttcaggtcgacgtgaccggggccggtgacaagttcatggatgcgcaggcgggtgcattccgttcgcgccgtccgtcctctttccccgacttggagactcggctgctgcctgaagcgttggcgacggctcagaccgccttggcggggagcgttgatgcactgcttctcagcttctatccagccgtggtgccgaaggcgcctgacctctcgaatctgctggcgctgctattttttcgccgtgaatacgacgaacctggcgaagacgaatctgagggcggagagctgatgccgttcaagaagtacctcgatccgtttccagaggacatggcgcagttcgttcagggctgggtgtcagcgaagttcgccatcggcggcagctggaagctggatgaactgcttgcgcatgccgaggacgaagggcttaccttgctggagcgccaatgcatcgtctacgtgctctatcgtagctacccggatagcgagaatctgttcaagagcatgcgagcacacgcggatggcgagttcgtggctgacgtggcagcaggcgataaccttcgtttcgatcccgtggagaccagatga

SEQ ID NO: 51968 - DNA, 4338 bp, Thauera linaloolentis 47Lol = DSM 12138
atgcagcgcatctcaagaatctacgtcagtcatttcggtagtccaacggcttggtacgacagccatttgtttgggctggatgacccagatacagacagccctacggacacggttttcaacctggagaacgcgggcggtaaaacctcgttactctcgtacatcttcagctgctttgagccgaagctggatcggtggctccagcacttgcagacgagaaaccatcacttccatgactactttgcgcgtgacggccgcccttcgttcatcttgattgagtggcggatgccgggccgggctgccggctcgcctgattacagtttgctgattgggcaagctgtgaccatcaaagacagtgtcgagcgaaacaacgacgtcgagcgatggttttttgcctacgaggtagcgcccggactgtcggtggaggatttccccgctcccggccttggcccgacccctgttcggaccatgcacgaattcgtgcactggcttcaggaggccgcagcaagatcgaaaggcgacttcttccgcaccaagacccaggatgactggatcaagcatctgggaaacgtgcgcgggctggatatagacctgcttcggatgcaggtcgacttcaacagcaatgaaggcggcatggaggaaggcttcctcaccttcaactcggaagctgacctgatacggcgcttcctgctgctgacgctcgaccccgagaggtcggcgacggtgcgcgcagggttggctcagaccgccgacaagttgaaggcacgaccgcggtacgagcagcaactgcagcaactcacgaagctgcacacggtcatggtgccgtttgtcgatgcagcggccgagttccaggctgcctcagagcagcatggctcaacgagaagacacgcagcgagtctggccgctgcgttgtgccgtggcgggcaagagaaggaggccgctgcagttgagaagcgcacctatgctgagcttcaagagggcgtggcaaagaccgcagagaagaacgccgagcttcatggggccgatgtggtggcgttgaaaggcttgcagctccatcgcaaggtcgttgctgcgaaagcagcggaagagctcgcggttgagaaactggccgcaggggagaagcggacccgcatgctccgtggggccaaggcgctcggtcattgggaagccaagaccgaagcagcgaaggagcttgaagggctcgtcgagtcagaagaacaaggtctccagtcggtacggcagcaagcggagatacaaggggcactactggactgcgcgctagccgctgcggaggccagcgacaggtccaagatggctcaagccgctgcgcaggagatggcggctcagcagcaggtcacggctatcggccaacaagagcagcagatcaacggcagtctcggcaagattgccaatgagcaagggcagattgaagcgttcctcgaaacgttcaagctgcagcgtcagcggctggagcagaatggcctcgtgttgccatcggatctgcgagttgaaactgccatcgagcgtgtgcagctccaaatcgaagagcttgaggcacaggaccaggtacttggagagcatatccttggcctacaggagcaagagcagcagcatcggaacggtgccgccgaccaaggcgtgaaggcggctgccgcagcctcagatcaacgggcgctggaggacttcctgtccaagggacgttcaatgcatgacgaacttgcccaaatggaggtcatgcgtgccgcggccgacgcggagcttgctgatcccgattccacaaccctgctcgacgaccttggcgcgttgctggcagaggctgaccgagaaatcagcgagcgcgatgttcggcttgcacagcttagttcggaccgtggctcaatcgtggagactggcttggcggggcgcagcgccgatgtggacgcagccgttcggcaactccatgccttgggcatccggtccgccagagccgcgaatacctatgtggccgacctggtttcggatgtcgagaaagctgcgcagttggtgctctcagatcccgcgcgattccttggtgttgccgtggctcaaggagattgggcgaagctcgaggaaaagctggatgacgtgaaggtcaagctcaggatgccagtcacggttgcccaggcgtctctggatcctcaacacgccgcggctggaaagattgtcttcgcacctgaagacgcggcgctgttcaacaaggaggcagccaaagtcgccctgggccatctggatgcgcgtatcgcctcgacaggagagcagcgcgatgcgtacctgaaacggagagcggacgggaacgctgggcgagagacgctgctgagatatcagagggagtttggggcagcccggctgaagcaggcagatgccgacctcgacgatctgaaggttcaggaaagtacggcgaaagagcggcagaaggagcttctactgctggcggagcaggccaagcaagatcgcgtgcaagcggagagccagcgcaagccgctgcccggaagaatcgaggcaagcaagactgccctgcggcggctggtggagttccagcatgactacgaggaacctagcggcgcaaaacagaggcggtccgatgagcttgcgtcacaggccgagctcgaaaaggcgcgcctcgtcgatttggcggtgcagcgcaatgaggtcgataagcgccggcttggcttcatcaacgacaaggtaaggcacgagaacaatgcccgagttcactccacgaaccgtgcgggtattgcctacatcgacaggaaatacccagcagagcaacaactggaggctcggccacgcgctctcgaagtgctgagggcgacatacgatgacgcggccgccgccttggaagctcaggagcgtgacaagctaggcgtcctggcagatcgcctgaagaccgcccgattggagcggcagtctgctgagactgcgtacaaggaggactatggcgacctctcgccagacgagctcgcgccactgcggaccttggactttgagactgaggtccgcgaacagaacatcgtcaatcagcggttaggagagttgagcaacgaggcaggcaataaccacgtgtctgccacgacagagcacaaaatcttctggaagagtcaaaagcagcatttgccgccgacgctgcaaatggaagcgctgaacgacgttgagctggctgaacagatctccgctaccgaagacgatgtggtgaaagcgaccgagatggctgatcgggcgagaggcgaagctcagcttgcgcgaaggcaggcagaggatgcacagcttgctgcgtcaaagctcagtacgctgcttgcttctctgaccgccgccgttccaaagatggatgacgactttgacctgctggatttgccggtggagccggagcaatacacgacggaactgatccgtcgacatggcgaggccaaggaacgagtggacaggcagcgcgacaaagcgctaacggctttccaggctctggtggctgcggccatggcgagggacctgattgaggtcgaggcagaactggcccgagatatctctgacagcaacttcgacctggcgtgctctgaccggctgcgtgtcctcgagctgatcctggatcggatagcggccgcgaaggataccctggacactatggagccggacctacagaactcggtcggcgagctctacaacctgacattcgaaggcatcgccttgctgacaagggcttgcaacaagacgatgccgatggccgctccttacgttggcggcaagcccatcatcaagatgaaggcaaatttcaaagggattcccgtggaggcccgtaaggaggccatccgagcctacttcaacgggctcatcaaagttgggaccgtgcctgccaagggcgcagacctggtagttcagagcctggttgccatcagtggccggtcggacctgggtgtcgacgtgctgaagatggagcagaacgaagcccaccagtaccagctcgccagcgagctcaagggttccaaggggcagggcagcgtcatcgcgatgttcctgtatctgctcatcagccagcttcgctccgacacccaagccactgccaaacgtgccggcggcggaccgctgatcctggacaacccatttgcgaaggtacagacgcgggcactcatcgacgcacagcgccttttggccaaggaaatcggcgtgcagctcatcttttttaccgccaatgcggacgccaacatcctggctggctttcgcagagtcattcgcctgcgcaaatcacacatgaactccaggtcccagaggtcgcacatcgagatgatttcggcgacattcgaggacctgactgcttctgagctgccagcgtga

SEQ ID NO: 51969 - DNA, 1002 bp, Thauera linaloolentis 47Lol = DSM 12138
gtgaacgaatccttcctgaaccagctccgcgcccatccaaggaagcgtgtcactctggccgagttacgccaggcatggttgagtgtgcatccggagcaggttcagcaccctgagcgggacgcgttgatgctggaaaccctcatcgcgtatgcagagcaggggcatcttgctctgcccgcagccaacagttttgagaggctcggccatccgcgaatgccaaagttcgtcacgctcatcgcttgcggtcaaagaactccggccattgattgggccgcattgccatggctccccgaactgggcttctggccgctcctgacaaattcggaaaagcatgcggcgttcgccatcaatgaatggatgcggcgtcccaaaggccggcgcttgttcgttcccctcagggaacgggcgttggagattttcggggacgagaaattccttgacctgcgcgtgcgcaatgatgcgctcttcgcaggaaagcttcctttgagcgccctcggagcctttttggtgtccccgccgcttccgcaccggaaggccgatgcacctggacgaccggtggtcatcgttgagaaccaccacacgtactggagcctgggcgagtggaacgtgagagcgaaaagatatgcaacggtgatttacggggcaggctatgcggtctcatcaacgagccgggcgctggacgaagtcctgcgtgaagtgcagggcacatccgttctctactttggtgacctcgaccccgagggcgttgccatcccgttgcgcattcagagcgctggggcgggtgaaatctgtccggacgttgacctctatcaactggcgctagcccatggccgcagaagagacggggttcatcgggttttcgacgacgttcccacattgcgccgctggctcccctccctcgtgtcagaggttgaggcgatgtggatcgagggccagtggatccctcaagagggtataggtaccgagttgttgcatgagcggggtgaccaactgctggcctaa

SEQ ID NO: 51970 - DNA, 1542 bp, Paenibacillus popilliae ATCC 14706
atgggaaccttgggaaccgttgacgtaactcagatcgtatccggcttcgaggaacgaatggcgaagctggctttgttcgatccgctcttcgagctgcagcgccagagaaaatccgatcgcaatggagagccgattgagatgatggagatgggattattgacgctgctgttcttcttcgagcagaagctcatgcgcaatccgaaagcaggcgtgaaagacttggcgaagtttctgcaagaggcggcagcggatgcgctcaagctggatgttgcggcattcgaggaattggccagaacgatcattcaagtgtttcggccatcctcagggaagaggcgatcctttacttactttaattgggagacgagacaacaggatacggtctatacttcgattttgaaggccagttccttcgacagtaagacaagtacgcaatattatgcgctggatgacgacggactggagcttgtatttgcaaccaaagaattctatatggagttccagctctccattcatcagcttgtgcttcgcaagcagttggagaaaggggagttccagggggcgctgcggcaaatcaatgaaatgcgcgtcgatgtggagtcgcttcaagagcgcatgatcaagcttgggcatgagatgaaacgaagtatcgtatcggaggatacattgaagagatacggcgtgctgctcgaagatatctattctcgcttgcagcgggaaaatcaagaattcgaagagcttcgcagcttcgtcaaagagacgaaggaacgaatctattcggatacgctgcagatgaaggagcatcacgcctacgaatctattttgcggatagccgcggaattggagaaggttcatacggagcataccttactgctgcagcaaagtattgaattgaaaaacggcgcgctgcatgccgccaaagagtctctttattacacgggaatggattcgttcaattttgatcaggatatcgtgaatctcctgctgggcactcccttgccgttggaagcggcaagaggcgtgctgtcgccgtttcttggcctggagcagcacgcatgctggtcgccactgaccgtatttgcggagcagaacattacggcggacggggaagaggagcaacgcgaggaagggtttctggagctggccgaaggtcaggaagcgggaacgttcattcactggcgcggccgcttgttcaagtccattatggaaaatctgctgatccggctgaaggaagggcagacgatccgtctgaacgaagtgattgaagcatgcaagcggggggaagagacagacgattggctttcgatgcgggcattttatgatttctggctgattctgcatcagcggagtccggttcaagcgggacgggaggatacggatgagtccaagccgaccgggatggaagaagcgatccgcttgttggggaagcataagcttaccgtaaaggaagcgggccaggttatcgaggtcaatgaacgcttctcgattcaggagatggatctgacgttgacgttaggaggaagagatgatgcaatatcagaatga

SEQ ID NO: 51971 - DNA, 783 bp, Paenibacillus popilliae ATCC 14706
atgatgcaatatcagaatgaggttgtcatgcgggcattccggctgtatgcggagttggcccggagcggtgtcgtggagcgggaaggactgcagcagtatttagccgatgacgaggtgagagggcttgtcgatcaatttgcaagagaggtcgattgcttgaccttgacggctggcgatcagctgttccttattccgctcgtccgcttgtctcccttccatgtgtccaatgaatatttgaagagaacgtacttgcgcggacaggccgtcaacgcggatctatatctgatgtatgtggcgatcatcgtgtttgtcggggcgttctataacagctatctcagcagggagccgacaagagactttatccgggtggaagattggctcttgcttgttcaggagcggatagacggattgaaggagcatgatcctgagcagttgagagagtacgagaagcaattctcctataattggacggccattatcgagaaatgggacgccatggatgatattaaggagacggccaagcgccagagcggaaatacgatcagccgcttcagcttcatagatacggtgaagcgattcctgctggcggagaagctggcggaggaagtcggggtgaatgaactggcgatgacggagaaggcccgaattatcgttcagcgctatttcatggagctgcagtataatcgcggcattttgcaatttctatatcagttcgaagaagagcgtcaggcccatatcggtcgggaggaggagagaagcgatgccatccatagccaaaattag

SEQ ID NO: 51972 - DNA, 4449 bp, Paenibacillus popilliae ATCC 14706
atgccatccatagccaaaattagatttacgcatgtgttgtacgaaggcgggaataagcgatataacgatgttacgttccagttccatggccataacggcgcggttgtattggaaaatggcggcggcaagacggtatttatccagaccgcgatccaggcggtgcttccccatgaggatctcgccgggcgcaaggtgaaggatacgctgcagctggacaacggtcccgcacatattgcgatcgagtggcttctgacggacaagccgtatcgcagatatttggtcacttgtgtcaccctcttccagtccggcaacggaattgattcctaccgctatgtgtatgaatatggcgagcatgatgaacatcggctggagaatatcccgttcgcgaaggttcatatggggaagtcccgtccagcggacagaggagagattcatgactatttccagacgatgacgcatcggcactcgcttcatgcgaagacgtttcctacgatgaaggagtataaggcatatttggagcagcaatatcagattattacgggcgagtgggaagccatcgcacggattaacgatacagagggcggcatcgaacgttttttcgacgagtgcaagacaacgaagcaattatttgatcgcctgcttattccggctgtggagcagtcgatcgaaggatatgaacagggcacatttgcacgtatatttgagaagcaccgggaaggattcaagaaatataagcagctaacagaacagatcgaggaaaaccggcggattcagcaagaattgaataattatgccgcgctgtttgaacatctggatcgggaggaaaggaagtatcaggaagcccggcaagaggcgaaggcgtattggcaatccgctgtcgaactgcgggaggcagtcgagaaggaacgcctgcagcttcaacttcaggccgaggaacatggggagagaagcaagcttctgcggcgcaagcagaaatcataccttatcgcgtgggagattcaggagcaggaggcgattgcggagaagctgcatctgatcgaggatgaagcagaacagatgagggagcgcttgtacggtgccgagcatcaatattattcgttgcagtatgccgagattcgcgaccgatgtctggctgccgaggcaaaggtgttccaacttagcgcacagctggaacggttaacccttaccgaggatgaacgcaagctggaagagcattgggaacgcaacagcggacagctccgctatttgtacgacgtgaaggaacagtcgcttgaggaacagcgcagcttgttcgagtgccgccatcggcagcttgaggaacaggccgaggcgatccgtggcagtctgcgccggctggatgaggagcgcttgcaagcggagagatccatcgtggagaagacagccgggattcaggcgaagcgggatcaccagaaggacatcgcgaacagcctgttatcgaatcctcaactggaacaggtggaacagttgctcccgctgtggatggaggaagaacagcagttggagcagagccggatggctcggttgcaggagatgaagcggctgaaagaggaagcagcttttaaggaacagcagcgcagagaagtgagtgaggatagccgccgcttgggcgaagagtttgcgaagctgacggcgcggcatgaacgccaccaatccgatctggaggaactgaagcaagagctgtgccgcctccgtcccgcgtgggataaatattcctccttatatgaaaaggaatcctccatccgggagcaattggcggaaggcattgagcgctgccggcagcagaagcagcggctgctgatgcaagagcggttggcttaccgctttgttgatgatcatgggcaacagccgttatttttcgccgatgccgccgtggccaaattatgcgagcaatggagccatcactattcgttgctgcaaatgggaacggattatatccgcgggctgtccgaagagagtaagagggagcaggccagccgcgcggatcagctgtgggccgtcacgctgatcacgacgatgcatgagaaggaattattgcagcagcgtctccggcaggcgaacggaagcttcgcattcccgattcgcgtcctcggcgcgcaggaggcggcggatatgcttcaaggaacgggggagccgcaatcgccttcctcatcctggatcgtgccgcagcattgggtaagcaatgaggaggcggacgcctatgaagagtggaaagccgagcttgtccggcaggcggagcaagcgaagcaggaacgggaacgatcggagcgctccttacttgaatggcagtcggcacagacgcggttccgggcctttctcgcgaaatatccgctagtggctcagcaggaagaggatcagagaagaatgaggctccaggaacggaagctggagcgaacccgtgagcttgagcggctcgagcatgagctggaggtcaatcgccggactgcagaccagcggcgcagagcgctcgaagaaatggggagcagaatccagcaattgcagtaccaactccagcagggccatcggtatacgctgcttggtaatgaagcaagcaagctggaagaggagcttgttcctgtccggaatcagctcggactattgggcaagcagcgggagcaggaggagagagcggaacggctggtgcaggaagagttgcagacggttcaggatcaacagcgggagatggctctccgccttcaagtgttgaagcaagatgagggttatcgggaggtgcgggaacatgccgcgctgtcctgccaagctacgctcgaggagctgaaggcggaacggaagcggctggagctggagcgccatcgaattatgcaggagcaaacgcagctcgaatcggcgcttgccagcgagcggaagagggtggaggaatatcatcggctgatggagcagctccgcactgagcatccgggcatcgacgcggagctgacgcttccgctggatgtcatcgagcgccaagagcagctctggttacgaattgaagaactgcgtcatcagctgaagcggatcgaggaggagtatgtccggacgcgcggggaactgcaggcgaaggagggagcatgtctcaagcttcggcagcagttcggagaggagttcccggatgccgagcccgaacggttcgccgaaccactccattcggttcagaataagctgcaggacgaggagcagcggttgacggatgaggcagagcagctcgctcgtcatcagcaggtcaaccggaagcgtctggatgagatagagcgggtgctgaacgtctggaacaagcacttgatagtgttcgctctggaggatgtgcggctgcagcccgcgatcatcggggaagcggagcgcatagagctcccttacaagctctctcactatgccgatcgctgtattgagaagctgaaggacagacaggcgtgcatggagaaggagagaaggtcggtcaaggacggacgaacccggatgaaggattattgcctgtactctgtccaggatacgaagctgcgctatatgacgatccaaggcattgaatcgaaggaacaattctccgagctcgtggaattcaagcaatcgatggagaagggcattcggacggccattcacatcatggaacagaatctgcagacgtatgatcaggaattgcagcaatttatcgtgcatattcattcccatctgaagcttatcgttcaggagctgaaggagattccgaagaagacccgggtcaaatcggcggagggatggaatgagatctatagcttcacgttggcggaatgggacgagcaggacggcaaggagcgcatccgcaagcatatggattggatcattacgaagctggatcgttatgctgatgaacaagatcaggcagattggcaagagcagcaagcactgattcgcaaagacctggagaagtggctggattcgcggcagctgcttcagatcgttatgcagggcgaagggatgaaggtggcctgccgcaaagtaacgaatgaacagcagattacgcgagccgccttctcctgggagcagtctaaccgttggtcgggcggcgaaaggtggagcaagaacatgaccttgttcctggggctgctcaattatatcgcggaacgcaagcagcacattcaggcgcagatgaagcggcatcgcacggtgattctggacaatccgtttggcaaggcttccagcgatcatgtactaagcccggtgttcttcatcgccgagcagcttggcttccagattatcgccttaaccgctcatgtggaaggcaagttcctgcaagactatttcccgattgtctatagctgccgtctgcgtcatgcggcagactccggcaagcagatcatcgaggcggcacagacgattcagaccgcttatttccgggacaacgacccaggtgcgctcgaacggatggactcgcacgtcacgcagatggaattgttctga

SEQ ID NO: 51973 - DNA, 1059 bp, Paenibacillus popilliae ATCC 14706
atgaaagacataaaggagatgcttgttgattatttacgcagcttaagaaaggcaaccgtgtacacagagcaattggagcgcgcggcagagggcatgccgatcacctatgaggagtttgcggcagctatcctggttctggagcagtctggcctgctggaagagatccgatcggggggcaggaaccccaggccgccgcatgtcgcctatcgctatcgaattcatgtctcctcgttacgctccggcttgcagcagcggctccatcagttgcgcttggagcttcatccttcgatctcgcttgatcgttatttcatgctgggggaatctgtgctcgattctgatctgccctttattatgaaaatcgatcgctatttgcagacctgtggtctgccagcggatagcgccgctgcaccggagagaagcttcgcgttagtcggcgacgagaagtggatcaaggagaaggacggccaagccctgttggaacggatgggtctgcttgacaagctgaagctcaactcatccccagatccggtgatgtttgccgtgaatccatcccgagggattcacccaggtcatgaagaatcgcacgtccatcttgtcgtggagaacaagacgaccttcctggccctgttgcctgctctgtccgagacgattttccatacgcttatttatggttgcgggaataaaatcgtcggcaatatcgacatgttcgcgcagcagtatcctgctgcttcaggagcgcaccgcttttactatttcggcgatatcgattatgcgggcattcatatttggagcagtctgtcccggaaggttccgatgattcctgcgcttcctttttatagagcctgcctggaaaagccggccgtgcccgggaagaccaatcaatggcctgccgaatcggccttgcatcaattcggcatgttcttcgcttcagccgagcgggaacgaatggcaaggaacctgacgagcgggcattattacccgcaagagacattatccgctcaacacctgcagcagatcgggaaggaggccacatgggaaccttgggaaccgttgacgtaa

SEQ ID NO: 51974 - DNA, 1065 bp, Streptomyces ipomoeae 91-03
atggccgaaatcgcgttgcacacgatcgatcaggtcaccatcgcgatggacttcgacgccggagccgaacatgccaaggtacttgaacaggtaaaacacttcgtcgcggctcaggcgcccgacagagatgacgccgagcacgccgctgtggccgactgggtactccagcgactgatcaatgtcggcaccatcgaacgtgggttctcctggcactacgggcttgtcggagacgagggaacctacgaccgcttcgagttcgacttcaaattactggtggaacagtcgacacccgacgggttttcactgcgggccaccgacgaggccatcaacgtactcgtcggcgcattggatacagacgtggaatccgcgcagatcgccgccgaggtcaaactcgacaacctcatcaggcgcggtcggctcgccgacgccaaactcgccgccgaacaggccaggtaccgcacggtccaatatggagagacactacgtcgttacctcgatgccacccgtcgcgacgttcgcaccgtggactgggaacgggtggtaccagacctgctgttggacgcgcttgagcacatcgagggccgctactcagcggaacacgccatcctgaccaatatcaccgccgcgcgggacgactctgacgatccgcgccacaagcagcggactgcggaactcgtggagatcgtccgcgactgcatccgccgtcatatgcagctccagaaagccgtacaggaagcgggcgatcagttccgttccgaacaggaccgtcagctgttctccggcgaaccgcagcgcgccgcgctccacttgcacggacaactgctggtaccgctgcttggacttcctgtgggcaaagcactcgggccggtgtacgacttcttccgtggggcggtcggcccggcaccccccgaagttctcacgctgccgtcacttgtggagcgtctcctgcagcggccctcagagcccgagagattcgccggcgaggttcgagatcctcagttcgaccccgtaccggaacaggaattgttcactcccgaacatttcaggctaagggttgtcccgtaa

SEQ ID NO: 51975 - DNA, 4500 bp, Streptomyces ipomoeae 91-03
atgtatgaactgtcccgagtgctcctgcagtccgtcgggcccaaggcggcacgctacgagaacgttctcctggacttcagcggcgtcggagatcccatcgccgaccgccccgccaccttgtttagcgtcagggacgagcaacctgtccggcgcccctccccggccacggtgctcttccttgagaacggcggcggcaagtccgtactgatcaagctgatcttctcagtcctgttgcccggacgccgtcaagtggtgggtacccgtgatcctcgcacgctgagcggattcgtactcgacaacgatgtggcccacatcgcgctggaatggacacacacccgcagcgggcgtcgactggtgaccggcaaagtcgccgagtggcgccacctcaaggcgactcaggacccgtccaacttggtggaacgctggtaccacttccgccctacacgggagaccacactcgacaccctccccgtggccgaggacggacgatatctgcggctggccgacttcatcggcgaactcgacgaggcccaacgagctgatcccgaacttgagttcaatcatttccgcgttcagtcggagtggacggaacgactcacagacctcggcttggatcccgaactcttccgctaccaacgggcaatgaacgccggggaaggcgaggcggccgacgtcttctccttcgccagcgacgccgctttcgtagagttcctgttgtcagccgtggtgcccaccggaccggcacaggatctcgccaacctgctgaactcctacggcgacaagctcggcaggcgtggtgcgctgaccttggaacgggactttgtggccggcgcgctggatttcctcgaaccgctggccggcatccacatcaccgctctcactgcccaggaggaacagcgggccgcgaggaagacgctggacacctttgtccgttcggtgaaggtacgcgcgttccgtgaggtcgaggccgcgaaggcgagcgaggaagtcaccaaacgccttggcggcgacctgcggcgggccgtgttccaccacgagaagctcgcggccgctgctcgtgaacttggccgcctcacagccttgttgaagctgaccgaagccgaggaggaacagcagaaggcccgcgccgcgtggaaccgagcgcaggagaccgaacgcgcctggaaggtcgtaccccgcctggccaagagcctggaagcgaccgccaacgcgaaccggttgcgtgagctggtccggcgtactgaggaagccgcccttccggcacttcaggcccgggacgccgcgctggaggttctcgtcggggcattgcgcaccatgtcacggcgcctcactgagcaggcggagacggcgcggcgtcaggcagagagcgaacgcacgctgtccgagcaggctcagaccgagcacaacgcggccgtcggcctagctgccgagcaccgggcgcaggccaaggcgctcgacacccgtatccaggaagtgcggaacgcccttgcggacgctgtgcgcgacggtctgctgagtgacggcgtgacggctcgtgacgccgcgcggcaagccgaggaggaggcccgtaagaacgccgaggagatatcccggcaggaatccgccgccgaggacgcggcggggcttcacgatgcttcccaccgagcttgccgagccgctgagcagactttggccgaggcccggcactctcttgatctggcccgccgcgactggacgagagccgacgagcgcacccgtgccctagaagcggatatccagccgctcgcactcctggacatcgaacgtctcgacctggaggtggacgctcccaggctggttggcaagctcgctcagcgacgtgacgccgctgatgtggcaaggaccgagatccgtatcgccatggtccgtgacgaacgtgccaggcttgcgttggagacgaacgaactgctgccgcccgccccggaggccgcggaagcgtgcgagacattgcgagaagccggtgtcgacgcctataccggctgggactacctcgccggtctgccccgggttgagcagcgccgtacgctcatcgagcgcgtgccgcatctggtcacgggtgtactcctgaatgatcccgagcagacggcacgggcaacggagatcctggtctcccggaagctgtggcccagcacgctggtggcgctgggcaccaccacggacatgcacgaacccgacgcatcactcgccgggctggatttcgtggtgcctccgcatccggcgctgtacgacgagagagcagccgcggaggagcggctcaccctcggtcgtcgccatgacgaacaccgcgcgcggatcgccgagttggacgctcggcaacgtatgtttctctcgctgctcaaccgacttgaggagtggcgggtggacttccctgaaggaaagctcgccgaactgcgcgagatcgtcaccgtccggatgcaggctcacgacgaggcccaggaggcgctgaccgagcagaccgagaagcgggaggttgcagccgcccgtctcaaggccatccgcgaagccattccgccgcttcgtacggcacagtcggcactggaaacccgtaagtccacgttgagtgggctggccatccaggaggagcggatccccgactggcagaccgctgtggaccaggctcggacggcggaggcgcgagcacgggaggccgctcaacaggcagaaacggccgccgaaagtcaccgggccgcgagcgccgagcacgtgcgcacgatggaccgcctgaccggctccgcacaccgtatgaccgccgaactgaatgagcttccgggcgccgacgccgttgcggagaacaagacagaggttccggcggaaccgctccccgtgctgcgccgttcctatgaggcagcggccatcgagtacgaacgggcatctgtcggagccgacctgctcctcgacatgcgtcaggcggagcaacgcgagaagcaagcggcgcaggagctgggtgatgattctcccgaaacacgagcagctgcccaggcgttgctgaacggtcctgacggagtggacggcgcgagccgggccgccgctcaacgccgtgctgaacaggcggtcaccgactgccagacctcactgtccgaggcggacgcgagtgtcgcggaacaccgagcggtcctcaaagactttccggaaccgctcaccgacgtggacctcgctcccttcggcccacctctgcacgtcatacacggtatgcgtctgatcgaggcggcggagcacgatcgggacgaggcagaacgtatccggcgcgaaatcgcctaccacagcgagcgtgccgagcgtaccgccgctgccctgcgctcctccgcgaagaacttcacggacctgatcaccgtcttgtcccggtcggctgagcctcgcgaagacgacataccgtacgagggcggtgtctcggccgcccgggaccggcacaccgcactgaagaccgagtacgaccggatcgggacaaaggtcgagacggcactcgccgaagaacgaacgttgaccgaccagctggtcgggttcgccgcggacgcgcggttcggggggctgccctcccccagccgcaccgtcatccagtcgtgtcctcgtgccgaactaccagcgcgggcggccgaatggagcgacagccttcgccccagactgcgtagcctcaccgtggacctggactccatcgaacggcaccgccgacagatcgtgctccagctgtgccagcaggtgcaggaggcactgcggaccttgaagcgggcacagtccctttcccggctgcccagagggctgcaggagtggtccgagcaggaattcctgcggatccgcttcaccgaggtctccgaacaggcgctggaggaccggctcggcaccctcgtggacgagaccgccgaagccgtgatccatggaaaagagatcaaacgggacggcctggccttgctgctacgcggcgtgaccgaagcagtggctcctaaagggttccgggtgcggatcctcaaaccggacgccgttctacggacggaacgggtgcccgtctcggccatgaaagacctcttctcgggcggccaggtgctgaccgctgccatcgtcctctactgcaccatggcagcgctgcgcgcgaatgagaagggcagggtgcagcaccgccggaactcgggcgtgctgttcctggacaacccgatcggtcgcgcctcggccggttatctgctgaggcttcagcagtcggtcgcccgtgcgctgggtgtccaactcatctacaccacagggctgaacgacctggcggtcctggactccttcccgctcgtcatccgtctgcggaatgacgccgacctacgcgcacaccgcatgtacctcaccgtcgtgggcgacaggaggaagcatcttctcgagcctcttgaggagggcgagaacccggtgatcacgtccatcaggtatcacgcccgtgccgacgcagagaataaccaccaccaggatcccgaggaagagagcgttgaccgatctgagtcgtcccgcgcgtga

SEQ ID NO: 51976 - DNA, 1143 bp, Streptomyces ipomoeae 91-03
ttgaccgatctgagtcgtcccgcgcgtgacctgctgagcgcgcttcacgaacacgcccgttcgcagaagaaatgggacggcacacgtaagacgcgcgtctctctgccggagttgcgccgtgtcttccgtacggtgccccatccgaaggtggaggacgagctggagtcggtggttctgagccgtcatctggacgagctgtacgagtgcggggccatcacggcgatgaagggcgacgacggggagagaattccgttgccaaagggcgtgtgggtgctgcccacccaccaggcggcgatgaaggtgcgggagcctcttccacccttgcatccgaacatgcgcaaggtggccgggtactgggacaacgccgcgcccagaacccggatcggctaccgcgcggtcaacaactggctcctctccgagcctgacatgaaacctgcgccgaaacgtgagcgtgctcttgacatcttcggcagtcgcacctattcgggatggttcgatgccgaagaaaaggcgttcgacgagttgggcggtccgttcttctcagaccgggaagctctgtacaaactattgcaaatgtattcagcgccgcctcaaatcctcactgagagactcatcgcagagagcgacggttactacgggcgcatcggcgacggtgacattctcctggtcgtagagaacgtcaccacatgctggtcgttgatagaggcgttggacgggatgaaggaccacgcagtcggctacgtggcctgtgggatgggaagttcgttcttggcctcactcgccggtgtcaagatgcttcgacgcggcaagatcgcggagatccgctacttcggcgacctcgacccgaccggattgtcgatcccggcggcggctgccaaggaggccgccaaggacaacaacctccccgcagttctgcctgcggtcgggctctatgacgcgctgcttggcatcggcaccccgttgccgcgcaaggagagacgccttacgacacagcaggcaaccggccgagtccgatggcttgatccttcgcaccaggccatggcgaccgcgctgttgtgcggcgaagatcgcctcgcccaggaatgggtcaacctgcggcatctgaagtcgaacagcgagtggctcagggacatgcacagatga

SEQ ID NO: 51977 - DNA, 1503 bp, Brevibacillus agri BAB-2500
gtggagcatgaaaggctggaaagtgtgctggaggactacaaggagcgcatccagcgtcttgcgttgtttgatcctttgcacaagctggatgccaagcgggaaaaagatcggcaagagcggcctatcgatatgtttggactggggttgttagctctgctgttcttttttgaaaatatgttaatccgcaacaaaaagaccggggtgcaagagcttgccgcctttctcatgcagatgaaccaggaggagatcgacctcgaggatgagggatttgaaaagatcgcccgaacgattattgagacgttccggcccgccagtggcaaacgcaaccaccggagcttttataactgggagacacggcagatggacaaggtggagttttcgattttgaaagcagagcggggagatatagcggccaacaagcagtattattccctcgacgaagacgggctagagctggtttttgccacaaaggagtttttccgggagtttcatttgtcgattaatcaattgctattgagaaaacagttggaaaaaggtgagttcggaggagcgctgcggcaaatcagcgagatgcggatcgatgtggaagctttgcaggaacgcatggtgcggatgaagcatgaagtgcagcgcaacattatttcggaagagacgtatgtgcgctacaagcaagtcattgaagacatccatctgcgtcttgcgagagagcatgaagagtttcacgaactgcaagggtttgtcgatgaaacgaaagagcggcttctgtatgagcgcaaaggagaaaaagaacaccgggcgtatgaatatattttacgcattgatcgggaactaggagaggtgcactttgcccatacggaactgttgaaagacagcatcgtgctgaaaacgacagctctccaggcggcacaggagacgctataccatgtggctttgcaatctttcaattttgaccaggaaatcgtcgctcgcctgatcgcttcccctctgcctctgaccgcgacgagaacattgcttgcgccgtttctttccctggagcaacatacaggctggtcgccgctggctgtgtttgaaaaacagcgggtagggggcgaactcgaggaagaaggtcagggcgattttgaagaggtaaccgatgaagcggaacaggagcagacgatcgtccagcagcaaaactttggaaaaatcatgcgctatgtcctcactgttctcgatgaacaaggagaggctacgatttcgcaggttgcccggcatatgcgggaaaacggacatgaacattggctgcagcatcgttccttttatgatttctggttgctcgtacatcagcgttccccgttgcaaaaggcgcacgaagaggaagaccatcacttgctgggggaagtgctcgccctgctgcagcctggacagcgcatcgaggtgattgagctagaggaacgcttgcagcttacgaagcgatttgaaatacaagatatgaaggtatgcagaaaggagagttcccatgtatga

SEQ ID NO: 51978 - DNA, 732 bp, Brevibacillus agri BAB-2500
atgtatgacaacgagcaggttctgacggcctttcgcatctattctcaacttagccgggacggacaggcagatacggaaagcatgagaatgtatgtgggcaatgacgtaatcagagggctggtggagcagttcgcacgcgaagtggattgtgccgtcattcctgcgggggacaagctgtacatggttccgctcgcggtaagctctccgttccatttgaaaaatgcttcgctgaaaaaagaatacttgcccgccaaagccaagaacattgatttgtacatgatgtacgtagctatcctcattctgtttggcgagttttacgacagctaccactcaacggaaatgacgagagattttatcaccttgggaagctggttggaaagcatcgacgcccgtatccagacgttgaaggaacatggtccggagcgcttgcaagcacttgacgccgagtatgaatataactggagtctgctggtggagaaatgggaggccattgatgacttacgtgagtcttccaggcagcaggatggacggacgaacagccgcctgggctttttgtctatcgtccaaaattttttgcgagaacaaggtctgatcgcggatctagggaaccaggagttgacgctcacggaaaaagccaagacgattattcagcgctactacatggacgtggattacaatcggggaattctggacttcatttccgggcaggagaagcagaaggagggagcgtaa

SEQ ID NO: 51979 - DNA, 4446 bp, Brevibacillus agri BAB-2500
atgcctgtcatttccaaaattcgttttaccaatgtgatctatgagggaggaagcaagcgctataatgatgagctgttcgtgtttgacgggcataacggcgcgattttgcttgaaaatggcggagggaaaaccgtcttcatccagacggccctgcaaaccgtgctgccgcatcaagagctggcgggacgcaaaatcagggagacgttatcgctggcaggcactcctgctcatattgctattgaatggattatcaacgactctcctcgccgttacgctttgaccgctgtcaccttgtttttgcacaacaacgacctcgattcgctgcgctatgtgtatgaatatgaagaggggaatccgcatgcgatcgatgagcttcctttttccagagaaggggcgtttgggaaaaagcgaccggcagataaaggagaaatgcaggaatactacacgcagatgagttctcggcatatgaacgcgcgtacgtttgcgacgatcagggagtatcatgcctatctggaagaacactttcagttgattcccgccgaatggcgtaaagtagcgacgataaacggtgcggaaggcggcgtggagattttttttgacgactgcaagacgacggaccaattggtgtcgcagttgttgatccctacggtggaagaggcaatcagcggcaacaatggtcaggcttttgcggaaatttttgaaaaacagcgagagcagttcaagcaaagcaagcagctccgcatgcagatccaggagtgtcaactgctggaaaggtccgtgcagcagtataaacaagtgtttgccacgtatcaggaatcgagagagttgctggaacgggaaaaggaatggacgaaggcactgtttcagcacgcccggaacgaactcttgctggtaacagcggaagccgagaaaatcgcagggcaactttccgaattgcagagaaaaaagcatactttaaactggaaaaaggcatcccgggatattgcagcccaggaagcagtcgtgaagcaatacggtgccgaatggcgcgaggaatcgcgcaagcttgaaaaaatgacgctggaagccgaaagggcggaacgccaccagtacaccctggaatatgccaaatacctgtcgcaaaagcaagtggccgaagaaaagctgacattggccgaatcccagattgcgaggctggatgaagaacaggacgtttcccagatcaaagaagcgcttgggcgcacgaacagagaaattcgcgggtactacgaccaggcggaaaaagaatggaaacagcaggagagcatgatccgcagccaactggacagtgtgctccagcaaaaaaaggccaaacgaaacgaaagcgaacaagagcgggaacgtctcgaggcaaataagaacaagcaagcggccttgcgagagcggatggaaggtgcgtccaaagagcagcagagaattgccggaaatattttgagcaatccacttcgcgaaacggtcgaagaattcattcctgtctggcaggaagagttgaggaaaaatcaggagaaccaaagcctttaccaacagcacatcaaagagtgcgaggagcagcaggcaaagctggaaagcaggctggaggaaactcgcaaggagcttatggcttggcaagagcaagcgaaccaatggatattgcggtgtacggaagccgagaagcagcaaaaaagcgtcctgacaagcttgatcgagcacatccccaggctgtcctacctggattcgctctacaccagacaggagagcgtaacccaaacggtaatggacaaggtcgcgattttggagaaggaaaaggaagaggcattttcgcgggagcgacaagtgacaaggctgagcgatgaatacgctgaaagcggcgtgtatgcggccgatcccgaattggccgcgctcgtcgtcagatggagtgagtcgtttcactatttggagactggaccgcagtttctccaagaggtgctgcaacgtggagagatcgctctggaagctctcactgcccgcttcccttattgggcagcagccttgattactaccgaacaggaaatcgaacaactggcagcgaggctgcaaaagcatgccgaccagctccgcagtcctgtcatcctcctttccttgcaggaagcgcgcaaatggctggaagcaggcgaagagtatgcattctcttaccgccaaatcgtcccgagccattggcaggacaatctggatcacgaacggtttgagaagtggaagcgggagttgcaagaaaaagcggctgcagttattcaagcgcgcaaagacaaggaaaccgagtaccagaagctgtaccagttgaaaagcgagctgctctgtttttacgcagactatccgcaggcacggtacgcagactggacgcggcagcgggacgaatgccaggcgcaaaaagaacgatgccagaaggacatcgcgaatcatacggaacaaatcaagaagatcgaacaagaaaggaagcattatacggagaagctgtccgaagaaaaaggactggagcagactttgggctatcgtttgcaagaggcgaaccagtatatgctgcagaaaaaagtatgggaggaggcaaaaagacaagaggatgagctcgtgcgcgaggcggaactgctgaagcaaaacttgcaggccctggacagggcgttgaaaacgctggaggcgcaagagcaagaactgcaggaagagcgggaagagaagaccacggccctggcacatcttcgcggggaatggctctatgaacaggtgagagagttcccgccggccactccccggttctccttcgaaaggttgcgtgccgagcgagagcaattgacagataggttgcgggagcggcaagcgagccgggcagaattagagagggaggccgagcgtctggcgaaggagatcgaagcgaatcagcgcggaatgaatctggtgctggcgaagctggatcagccgctggaacatccggtcgtctatccggtggatggagacgtccagtacgaacgtatagtcaggaaggtcgcagaattgaaaaaaggggtcgcggcccagcgtattgtgacggaagagcggagcaatcgtttgtctgagcaaaacggccgccttgtgacattgatggagaagtacggagagcgatttggagatgagccgctggaaaggtttgaaggtgatctcaacgacgcgctgaaaaggctgaaccaggaggaagcggatacggcagcaaaacaagagtatttgttgacgcaggagcagggcttccgccaaacagtcaaagaactggaggacacgatccgggagctggaggccaagaacgaggtttaccgttttgccgaagccgccgttaccgatgtcccggtacgggaagaagagttgctcgctttcccttaccagcgcttggccgtggcgcgaaagcgaatccgggtgctctcccagaaacaggagactgaacagcaggaatggaggaaggtcatggctgaaaaggaccgattcaagcaattttgcgaaaggcagattcggaataacaaattgcggtacacagccatggccggaattcagaacaagcaggaattttccgaggtgcaggaatgggcagacaccttgaccaggacgatcgccactagtatccgggtattggaggataacttgcaagggcgggacaaagaactgcaagatttcatcacgatcgtgcacacccacttgcagcgaattgccgtcgaactgaagacgatcccgaaaaaaacgagtgtccaggtagagagcggcaggaaggaagtatacagcttccacgttccggagtggaaagaggagatcggaaaacagctactccgtcagcacgttgactggatgttgaatcggctggacggggacgagtttaaggatgtggaagggaaagaagacgcaggaaaaatgaagaagtttatctacgcctccctgcagtccaaatcgcttctcggcatcgtcatgggcaatgacagcattcgtgtaaagtgtcggaaggtcagcaaagacggacaagtgagcggggcgctctcgtcctgggaagagtcaaacaagtggtctggcggagaaaagtggagcaagaacatgacgctctttttgggcatcctcaactacctggcggaaaagcgccagcgtatccagcaaacgggcaagcgttatcggacagtcatcgtggacaatccgttcgggaaagcatccagtgaacacgtgctggaccctgttttcttcattgccaacgaattaggcttccagctcattgccctgaccgctcatgcggagggaaaattcattcgcgattattttcctgttgtttacagttgccgtttgcgcgcttctgctagtggcgacgctttgattatgacgaaggagcgggagatcaaacacgcttatttccgtgattatgatccgtattcattactgcggctgagtgagcatgaacagcttactttatttacgtga

SEQ ID NO: 51980 - DNA, 1053 bp, Brevibacillus agri BAB-2500
atgtacgatacatttatcaagcatctaaagtcctataaaagcacaaaaatatccctcggccagtttgaaacatgggctgatccgcagacaacgtacccgcaatttcaccgagccatgcaaacattgctcgacaaccagatcctcatccccgttcgaagttccgggacgaacgccaaaaatccgccactccctatggcttaccgcatccagaaatccgtcctttctcagccgatcaagcaagcaataaaacaagcacagttgtgctttcatccgagtatcaggctggacgtctattttcggcttgctgaatccagatggagcaaagatttgccgtacatccagcaagtgcatgactacctcacgcaacggggatttccgcagagcgaagcgacggcacctgagcgttcctttcacttggtcggggacgaaaagtggatcgatgagaaaggagggcgcaagctgctggaggcgatcggcgtgtgggagcagttgaaggttacagctatgcccgatccgcttatgtttgcggtccatctgcaacaggtaggagaacaacagggtatctatcggcacttgatcgtcgagaataaaaccacttactatgcgatattgcccatcctgtcttcgcttccctatgcgactttgatttatggagccggttggaaggttgtttccggaattgacggcctttcagagcagttgggagtggggcgggatgcgcgtcatcagttcgaatattttggcgacctcgatcatgaaggtttggcgatctggcacgcgctttctcaaaaatgcggggccgtgccggcagttgaactgtatcgggcattgttgcgacagcaagcatccaccggaaaaggagggcagcgcgtgaacggaaacgcgattgaacagttcatctcgttcttttcggaagaagaaagaacgcaggtttcggccttgttgaaaaacaaagagtatgtgccgcaagaagcgatcccggcagaagcgctgcgaaacaggctgcttgattcggcagcagagagaagggaggagaaagggagtggagcatga

SEQ ID NO: 51981 - DNA, 1569 bp, Brevibacillus agri BAB-2500
atggcactgcaagcatccaacgtatttcaaggatacgcgcagcgagtgaaaaacatggcgccttttcaggtgttgttcgcccttgaaaagcgctcttgtctccatatgagagggtttgatgttgctcttgggattatcttgtacctgctcgagaatatgctcacctacgggaagaaaaatacgtacgacgatattgtgaaattcttccatgaacagtgggcggaccagaatctttcctacaaagaggtgtacgacgcgatcgtcgacctcatctataatcatctccggaatcaaggcagaaagttggaatttacatatttcaattttgagacattgcaggaagagacagtctattgggacctgcttgaaacagaaaaaccaagttttgaacaattgaaagaaaagaaaatgcggcttgtgctgtctaatgcctgcatcgacatgctgtttaagacgaaagaaatgttcattgaataccaaatttcgattacccagttgttcctgcggcagcagattcaaaaaggcgtatttgacggtgcgctccgaacgatcgatgagctgaatttgtccatccgaacgaagctcggagaaatggaacatcttgagtgggacatgcgtcgtgatgtgctcgatttttcacgtaaggcgctctgggaaaaacagctgcaaaaaaacgccgagcaatttgcaagggaaaaagaagtattcgcggatctgatgaaaatctcgaaagattcgattcgtcggcatgaaaatgacaatttgtccgatcgggagcgcatgacgctgcaaaaagcgtacgaagtgcagcgccgtctccacgcctcgactacaaaacacgattccttgtttgaaatgcagcagcgtcttcaattcctgttaaccgaactcattaccgagcgggtgtttagtgtgttttcaacaaccctgaacatcgaacaggaattgcttgcacccctcaccgaaaagcccgaacgctttgctaaggcccgagaatttctgctaccgctgtttcatccgaaggtgccgcgctggctgatggccaaccagttttacggaccgcagaaaaaacagaaacgaaaagagcacataaaggagacgctggaattgcttgatcccgaaatggtggaagaaatcgagcgaagggagaaggaggagcgtgaggcacgaagggagctgtacgcaaggttcttccgcttcttattcttcattctccttcaacaggggcgatgttcctactcagaactgcttcaccgcgcggaccccgaacttgccgacaatatgcaacaaccttcgttcatctccttccttctgtttttatttcaggaaaaggaagtgcttttggggctggatgacagcatcgttgcaagccttccgctatactaccgcggcatctctgatgccttgacgtacgatatggagcaggcgtttcgatcctttgaaatggtacccataggagaaaaaacggttcgccttccaaacgggattgaagttgcggagtttgaattttgcaccattgagcgcgaacctcaatacaacacatggcatggagaggaggtggatttatga

SEQ ID NO: 51982 - DNA, 720 bp, Brevibacillus agri BAB-2500
atgagccaatatagcagggacgcactcgaaaaagcatgccttgtgctaaaaagggccatgttgcagggccgtgtcgggatcggcgaagcggagtttcgcatgtatcaagaaaccgacgtaaaagaggtcattctcgacgtgtttcagcctgtgttccgcgtgcatgtatttcaagaagatgaggtgctgtacgtcgtaccctccgacgcacagtccctcatctacaaaagtgatcaggttcgccgagaagccatgaaattacgggatcaagacgaactgcatctagcggatttttgcgccatggtgcttggttccgtattctacaattcttcagctcatagcaggccgacacgtgcggtcatcggcctaagcgaatggttccatgaggtggaccgtaacatcgaaaaatggacgcaggagtacctcacaggacgcaaagaggagcttgaggcccaggaactgcagacggaaatcaacattacgggaatcgtcgaaaaatggcaccgcatgcggttgaaagaaggcgcagaaacttatcgggcgagccgcagcgagaaaatctctttccttaaaaaagtcgcgcagcatctgcaggaggaaggtttggtgcagttttatgacgaacgcgaactggctccaaccgaaaagtggtccgccatcatgagcaaacattacggcatgctggagcggaaagaatacatcaccaatcttctcgcgtaa

SEQ ID NO: 51983 - DNA, 4347 bp, Brevibacillus agri BAB-2500
atgccatccatgcaccgggttcgtctggcaaatattaagctcgaaaacggcacgagggtcatacccgatcaaacttacgtttttttagcacttcacgcgctctacattctggagaacggaggcggcaaaacgagctggatccaatccgtcctgcaaacagtgcttccgaacgtcatgctcggatcccgccattacaaagatgtggtgcagacgaaaagcacggggcatattgcggttgaatggaggatcgacggggttttggagcggtacgtgtgtacagggttctgtttttataacagcgtggattcgaagcacgagcttcaatattttaactatgtctacgagtatagtcctcgggacaactttaatatctcatcccttccgtttgtttcggagcatcggagtgtgatgggatttcatgagttgcggcggttccttaaaaaccagaccgagtggcaggtgtatctccccgaaaataacggagattatgccatccatcttggaaagtacgggatccactcccaggagtggaaaagcatccaagaggtaaacggccgcgagtcttccatggacaaatactttgaaaatgcaaaatctgtggaaatgcttatggaacgcctcatcgttccgacgctggaggatgctatctatgcaacggaggaagcaaaaaaaagcctcattcaaagctttggggtgttccaaaaaaatctgatggaaatcccacagatcaagaacaatctcgaagaagcggagaaaattgagactcatgccaagcgtttgcttgctgagctcgaaactctgcacctctatgcggccgcgtaccaaggcgctgtggaccgcaagcagcgatggcttaccgctgtgtcgaaggcaaaggaggacgttgcaaacctacttgagaaactggagcacgatctcgcctccaatcaaagcgagtccatggaattggagcgcctgcagcatgcacagcagatccagatggaacatgggaaaactgagtctctccagcgcgatatggaatcagcaaaggaacgcctccgccagcaagagcagaatttgcaggcagccgaagatgcgtatcggtttgcccgaggcaatctttactttcaggcataccagaaggcgcaaggcgattaccggggtgccgaggtccaaatgcaggcccgcaaagcagaacatgatgagcagctggagatgtatctcagaaaaaagacgcagttcgagcaagcaatcgcaagggaacttcgcggtacccagtcccaatcggatgaggtggaggcttccatccaggaaaacaaggaatgccagcgggaaaacgccctgcaacggcaaaagctttcggtggagcaggctaggctagatgctgtgcgggaggagctcgaaacctgggtggaagaaacggaagcggagcgcgagaggctgctaccgatcatcgggcccaaattgagtttcgaccccaaaggcgtggaaatggaattcaaaacaaactatcgggaccgtgaggcgtcatttgagcagcataggctcgatctcgacgaagctgaaagccgcggtcggcaaatcgccaaagaggaaagagaaactttggcactgctgcagacggcggaagaatcgcgtaaggacgtggtccgaaagcaagaggcatttgaacacctctcgggcctcacctcttccgcgattgacccgtggttccgtgtacatacttcgctgtatgaccaggaaacgtccattacgcttcggctgaaaggcgcagaggaaaaagccagcgcacgcgtacaacaaacgcgcaatgccgtcgacacgctgcggagacaaattgcccgttataccaatcgggaccatatcattacttccgatgaactgatgtccgtccacgactatctcgaagagagaggggtatctgcagagtacggcgtcaaatatgtcaaagcgcaggatgaacggttccgcgatcagtacccgcatctcactcggctgctgccgttcggtctgctcattcgggaagaagagtgggggagagtgcagcagctcatgcatcgagcccctgcgcctcttaaggaactgccgacttggttcttccttttagaacgtctcgggtcagatgtgccgtttggcgatgagggggcgtttgtgcgggtcacatcgtcgttttccatatttcagccacatgaggtgctctccctcgttgaagaagaggtcattcgccagaaggttcttcaactggaatctcagcttcaaacggaagaagcagcagatgccgaagccaaggctgaccttgccgcggttcaacgggcattgtttacatggaacaattttctttcccgatatccaacacgccctgactttgaatccgaactggcgggttttaatgctgcaatcgctgcgcacaatgttgtgcttcaagaaatcaaagaaaaagcgcaggcgtgcttatcgtgccaaaatgacctccgagcaaaaatggaacagtggttacacgacaaaggaagcctcatgaccctcgtccgcgatgtagagcattatgcggcacgcgcagcgctttggcccgagaaagagacacggcttactgaagccctcattcgtttggaagaaattactgaacagctccctcttctcacggatgcatttgcacaactggagcgagcggagaaactattgagcgagcgtcgggaccaactgatccaaagtaaggctatgcttcaaagcaagaaagagcagtatgagcttggcacgagcgacgacctctgctttgtgcccctgccgaccgcagaaagtgaatatgtagcaattcgtgcggaaatacagcaaatcggtctgggcatcacggagcttcaaaaaaacatggacaaagcaaaggcagatatggaatccgcccagcagcagatcgagtttctgaaatataccataatggacatggaggcgcaccatgagcacaccacgccattgatggtgcaggagcgggagcaggaggtggaggagtctcgataccgtaaagaacaagcttcaacggtgtatattcggcacgaaactgagcacaaccgtcagtcagagcaggaagccgttcttaccaaaaaatttacaggcacatacggagtcgatccgcttgccgtcgaaacaccgagcgtgactgaactaaaggcgcgcatgctcctgaatacccagcagcgagaaaaagcagaggtggagcagaagaagcagaacgacctgtggcacgagctcgacaaaatcgtggacgggtacgacaccgtaatggcgcagatcaaagaccgagggattgcaccaatggtggaagaagagcgccttacgttcggacctacatggacattccagcataaacggttgaaagacgatgagtctcttgcggaacgggaaaaacgaaatgcagagtggaaggttgaaagcgtgtacgacgccttccgcaaagatctgcagtcttccgcgaatgcgtatgtctcccaaatgcttcggcagattgataccctaaccgctacgcccaagcgttacgattttctgtatgtgaacgcacggtttcaagaaagttttgaggcggtggaagcataccgaagaaagtatgaattggatttggagcagcgcgccaaagatcgggaagagatgatcttccgtttccatactcgcgtcaaagaaatgtatgacgccattatggaaattccaaagcgctcccgtattgattggaacggcaagcgggtgcgtgtcgtggaaatcgtatacccgtggcgggaggacacgatcgtgtgggaaaagctgaaattccacctggacgcactacttcaggatctctccgccatgaaaaagcagggagagacggaacaaaagatggaggcctacatccacgcccagcttaggacgtcggtgctcctgtcggtggtatcttcgttttccacttgtgaattcaaagtggcgaaaccgctcaacgacgaaaatattgtccagccgatttctcaccactcttgggaaaacgtgcatgtatggagcggaggacaaaaatattttgggtatatggccgtatttgtttcactcttgtcagcggtccgcatgaaactgacggggagcgatcaatcctggaaagtgattgtggcggataaccccttcggctctgcgtcctcgcatcatatcttggagccgctccttgccgtgtgtaatgcaaaccatgttcaactagtgtgcctcacggcaatacgggatgaagggattgtctcccacttcgacattgtctacagcaaccgctactttcacacaggaagtgtcgagatcatgcagagcaagttggagaacaaatcaccttcggctcttcgctcaatccatgttaacttttcagccagctcgtaa

SEQ ID NO: 51984 - DNA, 1056 bp, Brevibacillus agri BAB-2500
atgaaatctatcattcgagattttatcggcggtctgacgacaaaacgcttttccgtcgttgaaacggaaaaatacgtcaaaggagtaatgggggagcgctactacgaattgggagggtactccgtcttccacgccgctatgacagaactcattgcggagcaccacgttaagcctgtcgggaaagcaatgtttggatttccgtctcttcacgcaaagtacgcagtcattcctcgcaccgaggcaccagagaaaagcgaattctacgccttgcattgggccctatcccttaagtcatattaccacaatgctgctctctgggaacaggatcggcgttacattcatgctatatcagcatttttgcacgatcggtctctccatcctaccgtgatcacggcaaatgagcggtctctaaaactctttcatgacgaaaaatggcttgtccaaaaaggaaagcctgtactgcaacggctcggcatcacgctttcagacctgcactgcgaggaaaccaatgaacccttcttctacttgtcgtgggacccaacaccaaaaaatgcgttgattgtcgaaaacaaagacacgttccacacctgcaaaggatggatcggggaacaccgcgcgctgttcggtattcctttcgaagcggtgatctatggggaaggggataagattcaccgcagttttgcatttgcacgggaagtgtggccgtcctgtaccgatgacatcgtcttttactatatcggcgacctcgatccaaaaggcatctggatctacgataaattagcgagcgaatacccgtttctccttcggccgtttgtgccgatgtatcaaaagatgctggagatgcgtgaagcggtgccgaatgaatcatcccgtcggctcgcgaagccgcccgtaaaagcgcctttgcttcagtacttgagcactgacgaacgatcggcaattgaacggttgttctctcaggggcttcgaattccccaagaagccatttcaaaggaggagctgattacatggcactgcaagcatccaacgtatttcaaggatacgcgcagcgagtga

SEQ ID NO: 51985 - DNA, 1995 bp, Saccharothrix espanaensis DSM 44229
atgaatcccgaggagctgtttcgtcacgaacgtcaagccgatacgtccccggcggacgatctcgccgtgcggcggtggatgaaccaggtggaggcggagcagcgccgccgctcgacaactcgcggcgcggacgacgaggcacatgccgaggtgaagcggttcgcacatgccgagcgtgcattggccgaaggacgtcgtgcggagggccgcggagacctcgtcgaagccgccgcgcagttgacgttggcggcggaagaaggcgtcggcgatgcggtcctccgtttggccggtgtgctgacccgctcggagcgttacgccgatgcgctggagtggtgtgcgctcgcggaagccgaggggttcgaagaggccgccgacctcgcggcgcggtgccgggccgccctcggcctgcccgcgcccaccagaacggacaggtccggcccgacggagccagcaccacccccgccgcagacggagccgaagcgcggcgccggacgcggcctccgccccacggccagcgcggacctgggcctgacccgcaggctgaaggccttggcctgcaccgttccgctgcacgagttggactaccacaaggccaagctcgactgggtcgacgcgtcgatctaccagatggcggagatcgccatgcacaccatcgaccacatcaccatcgcgatggatttcgacaccggagctgtccacgacgccgtccgggagcgggtagtgccctttgtggcggcccaggcccctggccggagccctgacgaacaccgacgtgtggcgcgctgggtcctggagaagctgatcaacgtcggcaccgtcgaccgggtattccggcacgcctacggcgagatcgacgtgaacggcgagtatcagcggcgcacgttcgacttcaagctggtgcgcgaggtaccgggagcccgcggcgagatctaccttcggaccaccgacgaggcgatcaacgtgctcgtcggcgcgctcgacaccgacgtcgcgtccgcgcaggtggccgctgaggtgaagctggacaacttgatcaaccgcggtcagctggccgacgcgcgggtcgccgcggagcaggcgcgctaccgcaccgtccagtacggcgagatgttgcggcacaagctcgacgccacgcgccgggatgtgcgcgtcgtggactgggagcacgagctgcccgacatgctcgacaaagcgctcgcccacatcgaggagcggttcaaggtcgagcacgccatcctgcgcaacatcaccgacgcgcgcgacgggtccgacgaccccgaccacaagcgccgggccgccgaactggtcgacatcgtggcggattgcatccgtaggcacacccagttgcagagtcgtctgcagtccgcgcgtgccgtgttccgtgaggaacaggaccgccaacatttctccggcccgccgcagcgggcggcactggacctgcacggccaactgctgaaacccatgttggacctgcccatcaccgacgcggtgggcccgttggagcaattcttccgcgccgcctccggcatcgagagcccggacatcccatcgctgccctcactggtgtccatgctgctgcggccggtggccgaccgcgaccgcacggctggccccgtggtcaaccccgcgatcgacgaggctccggacgacaggcggttcaccgatgaacaccggcgcatggccgataccctgctcgaactgaccggccgcgtccgcccgctcagcgcggtgctgcgggaggccgctgatttcgatgacgatctgcccgtgctcgttgccttgcgcgctaccaacgcctacagcccggctattggcgcggcggtcaagcacggccgggacaaggtgttgcttgcggtcgccgctggttattccgtcgaaccgtcgttcgccgacgtggcgggcgacgatctcttgctcaccactgccgaagtggtcgacttgccctccgacgcgcctgtcgaagacgtcgtcgccgcccacgaggagtccgcgtga

SEQ ID NO: 51986 - DNA, 4458 bp, Saccharothrix espanaensis DSM 44229
atgtacgaactctccaaggtcaggctgtactccgtcggcccgcccggtgctcggtacgaggatgtcgtcatcgacctgtccggcgcaggcaccccagtgcgtgaccagcagttgatgctcggtcaaccggaagtccgccggccctcgcctgcctccatcctgttcctggagaacggcggcggcaaatctgtgttgatcaagctgattttctcggtcatgttgccaggcaaacgccaggtagtcggcacctcgaacacgaaggtgttggagaagttcgtggatcgcaaagacgttgcgcatgtcgtgctggagtggatgcacaccaggaccgggcgcatgctgctcaccggcaaggtgtcggactggcgtcgacgcggcccgcagtccggcgaggacaacctcgtggacctctggtacagcctgcgccctaacagcgtcgtcgacatcacgacgctgcccttcgccgaggacggccacaatctcgtcgcgactgaattccgctccaggctcgacgacttcgcagaggaggatccagccctcgaactggaatgggcggacaagcactggaagtggggacagcggctcgccgacctggggctggacgctgagctgttccgctaccagcgggacatgaatgctggtgagggtgaggcggccgacgcgttcacgttcactacggacgaggcgttcgtcgacttcctgctcaaggccgtcctcccacacggtgacgcggaagacctcgccgactccatcgcggggcacgcggagaagattgccaagcgcaacgacctggagttggagcgcgcgttcgtggcggaagtgctcgaactactcgatccgttggccgagcagcgatcggccacggtgcgtgccgatgccgtcgccgccgaggcgtccaccgaactcgacgcgttcgttacccggttgatcgcccgagtcgttcacgagaacggactgctggaccaacgaaagcagcacatcggagaactgaccattgcggtctcgaacgctgcgggtgcactgcgtcgcgcgcaggacatccacgccgccttggcgcaccgtaccgagacactgcgactggacgctgctcgatcagcggagcatgccgcggccggtgtgaaggagcacgccgaacgcgtcatcaacggttgggcggcgacccgcaagctcatggaccacgagacaaccgccgagcacgctgccgcactgcgcgaggtggtcgggcagcgtgaagacgccgcacggatggcactggaggcgcgtgacacgaagtcccgggcactggcacgtgctctcctggtcacggcagacgccgctatcgcggaagctgagcacgaggacgcccaactcgagaagctgaaggaggtggtcgagggcacgactgagtcgtggcgcaccgcggtcgccgccgccgcccaagccaccgcgctcgcagcacaactcaacgagcgcgtggccggtgtcgacgccgaagtcgaagcggccgtggaagcgggtttgatcacatcggtcacctcgctctatgaggacgcggtgtcgctcgcggaccgcgtccggaccgactcggccgagatcgaggagaacgcgggacggctgaacgcactcgaagcccaggtcggagtggcccaaaccgagttgctgcaggcgcaggggaagcaggtcgctgcgcggagccggcacgagaacgcagtgaccgtattgaaccgggccgaggtggctgcggaggcactcggtcgcgagccgcgcctgatcgaactgctcgacaccgacgacgtcatgctggagtacgacgtcgagacgctgctcgaccagcttgcgaaggctcaggccgacttcgaccagcagcggactgaactgagggtcgcggacgcggccgacgaacccgcccgcctgatctgggaggagacccccgaagcgctcctgccaccgccccacgaggtcgcacacatccgtcgcctgctggagtcggaaggaatcgcctgcggaaccgggtgggactacgttgccgaccactctgacgagtcgacccgcgcggaactcgttcgacacctgccccatcttgcgggaggtgtgctggtcaacaagcccgaacacctcgaccgtgcccgcgaggtgatcgctgaacacggctaccaccccagcgggatcgtcaccgtcgcgacatcacactcgttcgacatggtggtggacgcggccttcgatctctccctccgctcgaccgccgggttcgtagccccgcccaatccagcgctgttcgaccccgcggcggccaaggcagagcagacgcggatcgccaacgaacatgcggcgcggaaggccagactggccgaactggacgccacctacagcgcggaccgggcactggcggccaggctgtcggcatggcgtgcggaatacccgagcggcaccttggcaggacttgccgaggccgtcacttcggccgaagccgcactgcgagacgccgatcaggccgtcgagcaccgcgagcgcgtcctcgtcggtgctgtcgaggcgcgtgacgcgcataaaaaactactcgcagaactgcgtcaggcactcgacctgctcaaggaacgctcccgcagcctcacagagttggctggtaagagccgcgagtcggacatctggaagaggaacgctgcccaagcccgtggccaagtggaagctgagaccacacgagcagaagaattcttcaagcacatcggcaggttgcgtggtgacgtcgcagtccgccaacgtcgagccgacgaccaacgcgcgttggcggccaggacccgtgacgagatcgacaacatccaaggcgacaccgcggtcaatcccgacgccccggttccggatcaaccagtcgcggtgctgcgggacgtgttgcgtgaggcgcagcgcgtctatgacaaggccgaagtcggtgacgaccagctcaaggagttgcaggcggccgaggttaaggcgactacggcgcgccgggagtgggaggacgagccctcggtcatccgcgacatcgcccggcagttgctcgaatccacggatggtgccgacgccgcgtcccgggcctccgcggttgcgcaggccagcagccgactccaatccgctgaccgggactaccggaacgcgtcgaacaaggctgcggcgtgcggcgcgcgtctggagcaactcccggcacccaccgtggtgctcgaccgctcgctccagccacgtgacgcagagcacggagaagtactggtcaccgaggccaccgagacggtcgagaacaccggcgaatcgcatgagcgccgcatcgccgacctggaagcggcgcggacggcgttgggcaaggccgaggtggtagccgacgcgttcaggacgattgccgatgcccaccgcgccgcatcggacgaccaatcggacatcgatactgctggtgtcgaaccgttcaggggtgacgtcgacgcagcccgaagccgctacggagaactgcgtcgtgccaccgcagtggcccagaaagtcgcacaggacgcgcaccgagcattgcgcacgcatgccgaacggctcgaccaacgcgccagggacagcaggttcgagtcactttcgatcccggcacgcacgcagatcccaggggtggggctttccgctatggcggaccacgcggccgagtgggcccaacagctgcgaccgcgcctgcggtcgttgaccgacgacttggaacaggtcgaccggcaccggtcggtcatcatcgagcggctgactgcgatcgtggatggtgcgctacgcagactgcgcacggcccagcggctctccaaacttcccagagggctgggcgactggaccgggttggagtttctacgcatcggctgcacacctgtcgaaggcgacttgctcgcccaccaactaggcctggtcctcgacgacgcggtggaacggcacaagaccaacgggaagcgcgacggtctcggggtcgtgctgcgtgcggtcagggccgcagtgcccaagggtttcaaggtgacgatgctcaagccggacgccgtgctgcgtgccgagcgcgtccggatctccgaggtccgcgacgtgttctcaggaggccagcacctcaccgctgcgatcatcctctactgcaccatggcggccctccgcgcgaacaaccagggcaggacccgccaccaccactccggggtcctgttcctggacaaccccatcggtcgggcatccgctggctacctgctggacctacaacgtggagtggctgccgcgctcggtgtccagctcgtctacaccaccgggctattcgaggaagaggcgctgggcggtttcccgctgatcgtgcggctgcgcaacgacgcggacctacgtgccgggcgcaagtacctgtcggtgcacgagcggatcgcactgcacctggattcgctcgcggtaccgaacgggaccggtgttctcaccaccaccagagtcgtccttccggagcggcgtcgtggcgaagcggattga

SEQ ID NO: 51987 - DNA, 1134 bp, Saccharothrix espanaensis DSM 44229
gtggcgaagcggattgaccggctcggggacgctctctacagggagctcctgaagtgcgccgcagtgcgaaactggcctggcactacccacaaggaagtacccatcgtcgaggtgcgccgctgcttcggcgaggtctaccagcgtagggagggcgacgacggggtcaccgcgatgatccgcgcgagcctgtccgtcctagtcgagcgccaactggtcgccccggtgaaggccaccgacctcgagcggatcgatttgccgacgaaggtcaaactcgtgcccacggccgcgaagacgccgaagatcgttccaccgatgccacgatggcaccgattgctgtatgacctggaggacttctggccgacagtcacggacaagcagcgcgtgcggtacgtggctatcaaccggtggttgttgagcaatcccgacacggcgacgatcgtgccgctgcgggagcgcgctctcgaaatattcagcttgttcggcgccgaggaggacttcgagtcgcctgaaaaagcactcgacgggatgcgcaccggaccgctgttcggcgaccaggaacgactcctgcacctcctgcgggccgtggcgaccccgccaccgctgctgagcaggcaactgcttgaggaagttaccccaagccatctgacgcgcgtcggcgaaggagatctgctgctggtcgtggagaacagtgcgacgtggtggtcgatcgtgaaggcattgccagcgctgcacaacctggggcacatcgcgtggggtctcggtgcgagcttcatttcgtcaattcgatccatcgccgacaaccacgagatccgccgcattcgctacttcggagatctcgacctctccggtctgcgcatcccggactccgcccggcgcaccgcgtccgtcgagggcctgccgtccgttcgccctgcggtgaacctctacgccgagctgttcgcgctgggccggagctggcgggcgaacgacaaggcggtggatagggctcgtgcgcgcgaactggtcggctggctacccgcagagcaccatgatgccgctgtgcggttgcttactgaggggcgccgcatcgctcaggagtgggttgggtaccgacacctcggccaaacctcgaaatggcacgccgacctcatgtga

SEQ ID NO: 51988 - DNA, 1500 bp, Tepidanaerobacter acetatoxydans Re1; identical to SEQ ID NO: 51879

SEQ ID NO: 51989 - DNA, 777 bp, Tepidanaerobacter acetatoxydans Re1; identical to SEQ ID NO: 51880

SEQ ID NO: 51990 - DNA, 4488 bp, Tepidanaerobacter acetatoxydans Re1; identical to SEQ ID NO: 51881

SEQ ID NO: 51991 - DNA, 1068 bp, Tepidanaerobacter acetatoxydans Re1; identical to SEQ ID NO: 51882

SEQ ID NO: 51992 - DNA, 1626 bp, Clostridium pasteurianum DSM 525 = ATCC 6013
atggatttaagctttttagatgtgcagcatattagaatgaaaaaaattggtgcttatgctttgctttttagaaatagtatagctaagggaacttggaaaaagtatggttttgaagagggctatgaacaagataatttaatattttcagttttgctttacataatggagcaatccctaaaggaagaaatatgtactattgatcatatagctgcttttattgatgagcttaacaatctccattttaaaaaggggattatatatgaagaatgcaggggtttaggggaattcatagttaatacaattttatgtgacgaaggtaatgccatgtattttaaagcttataattttaaagagggacaatataaagatattaacataaattttattaaaaataaaatggaatatattgaaggggtaagaagggtgtcatactctctgacggatgatggatattcactgcttttatctaccttagaaatagaggaaaatttaaaaattactattcatgaaattgtatttaaaatgcatttagaaaaagcatcttatgataaggcagcagatgatattaaaaatatatttaatatgcttagaataagagttcaaagtatggaggatgccataagaaagataaaggaaaatccacttgcatattcaactaaagactataagtccatgatggaagggaatatagatattttaaataatactaagaaacaatttattattcacagagaaatggtaaatgaaaaaattaatgagtttattgagcatgatatacatattaaagaattaaataaagaggaagaagaaaatcttaataatctaagaataatagaaaaatatttaagtagaactattgatgaagatcaaagagtattaaaaaaacattttgatttaaaggatgtttatggaaaagaacttgaaaatatttcgaaaatgtcattaattgaaagatttaattttaggaaagaagtatatgatagaatactagacaacccaaataaattagaggatattgatatatttttaagaccattatttaaaatgcatctggaaaaatattacaatataaataaagctttagaatatcaaaaggtaatcagaaaagctgaaatagaagagaatgaggaaatttcctttgatgaagagggattaattgaagctgaaaataagaaaaagctagaaagactggaaaagtataaaggtgtaatagaaatatttttagagctggcaattggacgtgataaaatttctttaggggaaattaattctttaataaaggaaagtgaaacattaatgattactttgataccaacagtggagatattcagagaagtgattattgaaatgttaaaaaatagaactatagatatagctgaaataagagaagaaagaaaaaattttgttgaatctggagaaatagaatttcagcttaataaaagtattttagaaattatagatgctaataacagttttaagaaaataacaaagataaaggttgaaaaaatattagaccatgaggatattaaattagaaggtttaagaaatgaaaatggagatataaaaaacttcatatgctcggatatttctatagagattataaagtcaggaggcttaaggttataa

SEQ ID NO: 51993 - DNA, 708 bp, Clostridium pasteurianum DSM 525 = ATCC 6013
atggcatatactactgaagaaattaaaataagcaataaaatattttatcatttattaaagcatggtgaactgaaagaaggagcggaagagctttacaaaatttactctgaaaatgaaaatgtaactgagcttgttaaagaattgggagaagcttcagaatgttatgttaaaaaatacggcggagtagtatacctaataccaaaggaagacaatgattttataggatattcaaagggtgagcttaaaaaaatactgtgtaaatctggagcaaatgataaggattattatttatcgcaatttgttatattaactcttttggtggagttttataattctcaaagtgttaccagtaaatccagagagtacattaaagttggtgaatttttaaatattattactgacagattaaaggatggtattgaaagatcacataataatgaagaaagtggaattgcctatgaaaatatacttgagaggtttgaagctttaaaaagcagtgaaaagaaaagtatgtccaagaccacaaaagaaggctttataaatgcaattttagattttttggatagccaaggtttaatttactatattaaaggcgatgatatgattaaaacaactaaaaagctggatagttttatggattggaaccttttaaataaaaataattacaatagggtgctaaaagctttaggagaagagataaatgagtaa

SEQ ID NO: 51994 - DNA, 4386 bp, Clostridium pasteurianum DSM 525 = ATCC 6013
atgagtaagataaataaaattaggtttgtaaatttgaattataattacaatactatgaaaatagatgatgaaaaattttatttagatggcgaaaatgctatgcttaatttaagaaatggcggtggaaaatctgtacttgtgcaaatgattatggctccatttgttaatagaagatatagaaacacaaaagacagagcctttgaaagttattttacatcgggagttcctacttatatattaatagaatggaagcttgatgatggagcaggttatttattaacaggtatgatggtgagaaaaagggaagctgcttctgatgaaaactctaaagaaagattggatattataaactttattcatgagtacagagaaaaaaatgaatatgacattaacagtatccctattgttgaagaaaaaaatgaaagaaaaataataaagagctttactaattgcaaaagtttgtttgaagctttgaaaaaggataggcagttaaagtttaattattatgatatgaataatcctgtaaccacaaaaaattactttaacaagttagaggaatataagattaattacagggaatgggagactataattaagcagataaacattaaggaatcaggactctcagaactttttactaaatctaaggatagcaatggattagttaaagaatggtttttgccagctgtagaaaataaactgaaggttgatgaggatagaattgataattacaggcagctgctggacagctacattaagcagtacagacagaacaaagcaaatattgataaaaaagcaaagcttgaattatttaatgagttgtctaaggatatacttacatgctgtgaggaatttatacatactactgaaaaaagagaagagataaaaaattatatagcaaatgtaatagcatatttaagagaaaagcttgaagataaagaaaaggaagaagcagcattagaacaattaattgaaagtcttaatgataaaattatagagctgcagtatgaagaagaatctataaaagtttataaaaagcaggaggaaatagatactttagaagcagatattataaaacaacaggaattagtcagtgaaagtgagtgtaggaaaaatagtttaataagaaaaggaaacatattagagtgtgcaaagatacatagacagtatcaaaaaatttcaaaagaactccaagaaaatgaaattgaattagctgtgtttagtaaaaaaaatgaagacaatgcaccgcatattaataatctaggttttactataagaggaattttacaaaaggagctagaaattacaaaaacacaaaaattagataagcttcaattaaataaaaatttagaagaggaaaaggagtctattaataatttattgaagattaatagaaatgaaataaatagtttaactgagagaaaaggatgtctttcagctgaagtttcatcctttgataaattagaggaaagctttaacagcagatgtggttttaatttattcagaaatattgaagcatattttgatgaggaaagattgcttattattgataaagaaattagtgatgaaggcaattcgatagataaagaaagaaaaaatatcagcgaaaaaatattgcagaatgaagaaaaattaaaaagcaaggaaagtgaaaaattaaggaattttgcaaaaagctctgctgttaaaaataaattgagcaataaaaattccgaatttgaaaaggcagaagaggaaatagagagaagaaaggaaataattaagtttattgattttgaggaagataaggtttttgattatgaaaatataatcaatgcttttgacagaaaaatagaaatgttaaaagaggatgaagcaaagttaaaaaagttacttgataatttaaatagtgagctcataaaacttaaaaccggcaaagttttagagctgtctaaggatatagaagaaaaacttagagaaaaagatatcagtataatttacggaatggaatggctaaagaaaaatgggtatccattagaaaagaacgaaaagcttgtaaaggataatccttttattccatactccttaataatggactctaaggaaattgaactttttgaaaaagagcttttggatatatttacttcttctccaatatcaataataaatagaagagagcttgagacgagtactaatattatgaatggagacattgcccatttaaatggaattagcttttttatatcctttaataataaactgttaaatgaaagtgagcttttaaagctgatagatgctaaagttaaagaagcacaagcagtacaagtaaagataaatgaaaagagtgaaaatatcgctttttacgaagaaaaaagaaacataataaaatattcagctttgactttagaggtatacgaagggttaaaaaaagaaatcagcaatttaaaagtggaagcttctgaattaagagaaagagaaattgctttagaaaagagtatattaagcattaaggatgaaataaaaaattataaagaaagagtacagcttttagagaaggatattcaaaaaaatattgataaagcaaaagcgtttaaagaacttttagaagcctatgaaaagtataaaaagaataaaatttctttagcgagagtgctggaaggcctaagtgcaatacataatcaaatagaaaaagctgaaagcagaataagcgatattgaaaaaggaataaaggaatgtagcagtgcgattaatttttataatattgaagaagaaaaagcttcaaagggacttgcagagtttaatatttataaatcaggaattttaattgaaaaggatagggaagatttaatatctgaatataatgccttgacaaaggatattacaagttcagaaaaagaattaaaaaataaaataaataagcttaatgaagaatttaatgggatacatagcgagcttattttaaaagctgataaatatgaagtaaaagaagttgagtatactaatgaaacttttgatactcagaaggagtttgaattaaaagatgaacttcaaaaagaaaatgaaaaatacaataatttaaaggatgaacacaataaatttgataaagcacatggtattgctgtaagtaaattagaagatttaaagggtaagcttaaagctaagtttaataaggaagagcctaaaacaaagagtttattaatagataaaaattttaaactagaaatagaaaaactgaaattagagattgtggaaactaatagtaagaagtcagatgttaataaagttaaagcaaaaattgaaaataatttaaccagcttgaatgagtttaataatttaaatgttacagataaagttgatgtaaacatagacttaaatgaattagatagtgctgtaggaaaactaaaaagagacttaaataatgtaaaagcacaagaaaatgaaagagaaaaaaatctcacaaatttagttgttgatactgagataaaggatgaatttaaacaggaaagcttgtttaaggagccaattcagacgctgaagagtttaattggaaaaccaagagagtttaaggagcagcttaatttagttgttaattcttatgggttgattatggaaaagttgatggcagacattgaactcatagaaaaagaagaggggaaaatattagagagcatattagaatatataaaagatgttcatgagaatattgaaaagatagatggcaattcatccataactattggaacaaaaagattaaaaatgctaaacataagtgtatctgcttgggaagaaaataaagagctttataaggtaaggttaaaggaatatattgagagaataagagagcaaagcataaaagctttagagcagaatgaagatatagaggatattatcagcaataatatcaatataaataagttatatgatggagttgttggaattggaacagtaaatattaaattatacaaaatagaagaggataaacagagacagatttcttgggatgaagtttcgaaaaattcagggggagagggtttcctttcagcatttgtaatattatcaagcttattatcctatatgagaaaagatgatagtgatatcttcagtagaaaggaaagcggcaaggtgcttataatggataatcctttcgcacaaacaagttctgcccatcttttaaaaccattaatagacattgctaaaaagagcaatactcaacttatatgttttacagggcttggaggggattccatatacaatagatttgataatatttatgttttaaaccttatatcctctaagcttaaaagtggtgttaaatacttgaaaagtgaacatgcgaaaggtgaggaagaaaaggaagaaattatagcatcaagatttaaaatagaagagcaaattaaattgttttaa

SEQ ID NO: 51995 - DNA, 1008 bp, Clostridium pasteurianum DSM 525 = ATCC 6013
atgaaggatttaagtagttatagtaagaaagtcatagaattagatgaaatcgaaagaatatataaaactgaaacttatgatgacttatgcggagtagtatcagatttaataaaagaagaaagacttttgccagtgaaaagcagtggtgggaatggtaagaatccaacgttgtataaaaaatataagatattagagaaaaatgcagataatagtgaattgcttgatgaaataaattataagctttcaattaaattaagtgttgaatattataaaaaacatatagataagtataaagaacatagggaatatatacttaagctaagtgattttattacaaatgagcagcatttattaagtgaacctgtttcaatgaatgaaagatcttttcaaatatggggaagagaaaaatttttacaaaaggaaggcggaaaaactattgttaaaaatttaggaatggaattagaggaactaaatttttatgatacctctgaacctttagcatattattcaaaatctaaagagacacctcagaagattctaattatagaaaataaggatacttactatacaattcgaaggcatttaataggcggtggagaaaatattttaggggaagatataagcactttaatatatgggggaggaaaaaatattaacaaagcttttaatgattataaaatatcagttgaagattatgtttctgacagtagaaatacaatattatactttggtgatttagattatgagggaatagtcatatatgaaggactatataaactatttagtaaagaatatgatatgataccatttataaagggatataagaaaatgattgataaggcaaaagctgagtcgatttgtttaccaaaaaccaaagaaggtcaaaataaaaatattagtgaaatatttttaagggaatttgataaagagtacagaaatgaaatagaaaaaatgctgaaagatggttactatataccgcaggagatagtgaatattacagatttatag

SEQ ID NO: 51996 - DNA, 1530 bp, Amycolatopsis azurea DSM 43854
gtgggccgcgccgtgttcgacgaggcctttggcgggcgggtgcgggcactcctgcgagcccggccggtcgcggatgcggctgacaatgcgagccggcagtcctggggcacccacgactacgacgtcgtcacccttgcgctcgccgccatcgacacggtgatctcccggcagggtttcgaggaagaagtgacctacgacgaggctgtcagcggcctggcgaggctggcggcgagcgcatgtcccgagcagccctccgaggaacacgaagcggtcgcacggtacgtcatcgatgcgctgctgaaccgccgagaacgcgaagccccgttcgcctaccaggtctcggacttctcgctcgaacctgacggatctgtgcagcaccgggcgattgcggtggagttccggctgctgagcgagcacgaagaccagcagcggggcgtgaacgtgctgcgagcgtccgcggacgcgatcaacgcgctggtcggcgggctggaattcgacgtcgaggacgagcaggccgcggtcgagctcatgctcgaccggcagctcaagcgaggggcgttcggccaggcggagaaagccgcggagcggtcgcggctgctgtcggtgcgctacagcgacgaactgcgcacgctcctgaccgacaccgtgcgcgacatccgtacagtcctcgaccgctgggcccgggacgtcccggcgcagttcgagcgcaaccgggtgcatctcgaggagcggctcggcgcggagggcaggctgctcgaccacgtccggagcgccctcgacacggcggaggcggatcctgcgatcaccgcggcggccgcccggatcgcgggtctgcttgaagaatgccgtcgccggcacaccgaactgcacggcaggctggtcggcgcgcggacgatcttcctcgacgaacagcttcgccagtccttccggccgatcggcgggttgcgcaacccggacatcgccgacggcgtgttcctgccgctgctgaccatggccgccgaagacgctgcggaaccggccgaagcgttcgccgtgttcgccgcggggccacaggtgccccggatcgtgcggttcgccgacctggtcgacgacctgctcgcaccgcgccgagagccccggatcgacgaaccaccgctcgacgacgaagaacttggtgacccggacccgcccgcggtctcgcccgagatcctggcggccgctacggctgtggtcgactccgttccgttgcccgcccgattgtcggtgttgctgctcgccgtccgagccaccgacctgcctggcgagctcgatcgaggtgctgtcgagcgacttgtcgcgctcgccgcgctctggacctacgccccggagagcgcggaagacttctccaccgcggtcgacaccgccgcccgcatcctcggtccggctgcggtggtcgacgccgacggcaccctgatcgacgtaccgggctggtcgggagacgacctgatcgtggccgaagacgaagaaacactcgcccgttgggccgcgacttccgttcaggaggtgtcatga

SEQ ID NO: 51997 - DNA, 4395 bp, Amycolatopsis azurea DSM 43854
gtgacctaccagctttcgtccttccgcctcgcaaacgtcggggaccgtgccgcccgcttcacggatctgacactggacgtctcgacggcgggcgagcgagcaccagtcgactcgattctctggctgcgcaacggcggcgggaagtcaagcctgctgtctcttttcttcgcgctgttgctcccgctgcgcaaagacttcatgggcaagacggtcaagcggcacatcgaggactacgtgtcctccggcgacacgagccatacagtggcggaatgggtggcccagcccggcagcgacgccagccggccagcccggctggtcaccggcgccgtctacgaatgggacgaacggcgaaagcccgccgacccggatcgcgaccgcgagaagctcaagggctggtactacagcttcttcgccgtcccgggtgtactggacctgctcggtttgccgctgcgcgacgaatccggccggacgcggacgatggccgagttcgtgaacgtgctcaaggagatcgcggcggccaatcctcagcagttcaggttcgtgatcacccgccagcgtggtgagtggacggacgcgctgaccgcgcggaacctcgatccggcggtgttcgcctaccagaagcagatgaaccattccgagggcggcgtcgccgggctgttcgaattcgcgaccacggacaagttcatcgacttcctgatcgatctgacggtcgacagcacgcagcccgacctggtcgcgaacaacctgcggaaggtcgtcgacgtgctcgcgcgcaagcccggcctgctcgtcgaccgggaattctgcggggagctggaaggcaggctggagcggctcgccgaacggcacatgctggcgaaggcggcggctgaggcggctgcgggagcccgctcctccgcttcccagcttgccggagcgttccgtaccgcggcttcgtcgcgggagggcgaccgggagtggctggcagaagaagcggaccgactggggaacagcgctcgcacgctggatcgggagcgcagccgggtcaacgacatcgcgagcgagctgtaccgggtcgcggcgaaccaccggaagaagaccgcgaaggctgagtgggaaagggcgaccaccaccgcgggcgaagccaacaataaggacctggcgtggcaggccgtggtgcatctcgctgatcgggtcgaagctcaccttcacgcggaggacgtgcggcagcagatcgctcaggaggaccgggagaccgctccgttgcgggaagcccgtgacaacgccgccgtgacgctcaaggcccgctatgcgcagctctccggggaagaacgcgaagccaaaacgattgcggatacggcagccggtgaggcgcaagcggacgcgaagacggaaggtgctcgagagcagcagaaccggaaactggcgtccgaggcgggtgtgcgtgccgaaaccgctcgtggtcggctgatcgaaatccgcgacgaggtggccgtcgccgtgacgctgggcgatctcccggacgatcaggtcgatcctgcgaccgtcctggccgagacgaagcagaaccgccgcgagaaggaggatctgcgaggccgggtgcggaagcggcgtgaggcccggcctccggttcgcggcgggcttgaaaagcagagccggaagctggcgaccgatcgcgcagccaagagcgccgaacgcgaccgcctcgatgacgaccggcgcaagctcgtggccagggccgacgcactcgggacggacgtccggctcgccgagctgacccagctggccgccggagctcgcctcgacctgtggaccgaggccgcggacttgcgggcggcactcacccgggaggcgtcggccgccgagtcggccgtcgtggccacgcgggtggacgctgccgaggacaaccgcgcgctggacgggctccaagccgacgacttcttgcccaccacgcgcgacgccgaacgggccgcggaggtgctcgtggcggacgaggtaccggcgaggccgggctggcagatcctgcgtgacctggtcaccgagtccgagcgtgcatcagtgctgaagaatcccggcgtcgcggaactcgccgccggtgtggtcgtcgccgacggcgatgcagagaatgcccgccgagctcttgcttcgatgccgtggcacgccgtcgcgcacatcgcggtatccaccgtcacgcagttcgaacgggcggtgaccgcgacgccgccggcacactcggttttccccagcgaacccgcgctctatgaccgcgatgcggcggaacacgcgcgagcagaccgtgaagagcgcaggcgtgaccaggaccggcggatcgctgagctgcaggaacaggcgaagtcggacagagcattgctggcgacgctggagtcgctgctcgaagactgcccggcggggcacctcgatgcgctggagaaggccgtcgaagagtgtgacgaggcgatctcgggcatgagcgatgccgatcaggtcgtccgggcgcagatcgaggagctggacgagcaggaagcggaagacgcggcgaccgaaatcgttttgagcgacgagctgaacctgctggcgcagcggatcgaacggctgaacacgctggcgaagcggaccgccgaacgaccagggatcgagctggcgatagtgcagctcgacaaggagatcgaggtccacaccggcatcgccgacgaggccgcgagccgggtgtcggagttgcaggaggcggagcgagccgctcgtgcgctggcctcgcagcaccaggcgaactggaagcggtacgaacgggattccacccaggtcaccctgctcgacggcgatcgggaggccgtcgtgaccggcgacggcgatccgttgtcgtggctgagcagccggttcgccgagctggactcgcaatggcagtccgtggcttcccaatccgtgctggccgagcgtctcaccgcacacctcgagcgaggcaaacgggcggaccgggcgctggccgagtacccggaatccgcgcgcgagctcgcgcagcagctgctcgcgaccggcgacggtcaggacatggatcggcgagcagcagcgcggaaacgctcccgcgacgtggccaacgaggcacaacagaagctgagcgagacgaagaccgaactcaaccaggcatcggaagaggtcaagcagcgcactccgcgtgatcggctgcggcacgccccgctcgacgacgagcccgcgaccgaggcggaggcccgggaacgagcggcggcggaagccgagcgggcgaccgaaatgagcagcgaggtgacccggctcaaccgcgaggccgaggacgcgggcaaactcgcgtccgaagccgatacggctgcccaggtgttcgctcagcaagccaaaaggctcgccggcgccgccactccggtcgaggtgcccgaagacgtcccggcctatgccggggacgagccggaagccgaactcgactcgctgctcagtaggctcaacatggccaacaaggaggccgaggagaccgccggtcgtgtcaccaggtcggtcgcggaggtccgaaggatcgctgcggaagcccggttcgccgaggtgcccggcgcgatccgcgatcgcctcaccggggacgacgcggatgtgctcgcggaccgcgccgaggcccgtgcgcaggaaatgcgggtgcggtaccggacgatcgacggccagctcgccgaaatcgggcgtgatcagcggctcgtggtcggggagatcgcgggcctcgtgaaggacgtgctcgcgaacctcgagtccgcgcatcgatactcgaaactacccggcacgctggggcggtgggcgaacgagcacttcctccggatcagcttcctgcgtccgacaggggacgaggacctgcacgcccggatcgacgcggtcgtcgaccggatcgtcgcggacaagaagacgaaaccggaggggctcgcggtcctcaagaagtgcgtgcacgaagcggtcgcgccgcgcgggttcacggtcaaggtgctcaagcccaacagcgatcttgccgtcgaaccggtcgacgtcacccacctcggcaagttctccggcggtgaaaagctgaccgtgtgcgtcgcgctctactgcacgctcgcgcggctgcgggcggtcaaccgcggacgcggacgggccgccatcggcgggactctcgtcctcgacaatccgctcggcacggccagccacgttgccctgctgcgcctgcagcgggacgtcgcggcggcgcacggtgtccagctcgtgtacacgaccggcgtggaggatctcggtgcggtcggccagttccccaacgttcttcgcatgcgcaatgcgcccggctcgcttcgcaaccggcgctacgtggtgttagaccagcaagccaccgcagatgacgacggtatcacccgcgcccgagtcctgcgcgaggacgactcgtga

SEQ ID NO: 51998 - DNA, 1050 bp, Amycolatopsis azurea DSM 43854
gtgaacgcgttggccgggcggctcgccgagcacgtcgcggcgtcaccggtgcagcgagtggagttggttgacctctacgcggctgcggtcgccttcgaccgaagtctggctacgacgccgagcgcccgaagcgaaatccgcgaggcactggacgagctggtggcggccggtcaggtggcgttccccgtgtcgcgtcagcatttcgacacgcgggaggagcctccgctgccgaagtgggtacgtctcccgccccgccggcgccctggtcgtgcgccgcgggacgttcgagtttggccggcggccctcgaggctgcgggacgcatcgccgcccgcgacgacgagatcggggtactcgagatcgccgcagttttcctgcgcgacaaaggtgcgtcgcgcccgagcgtgccggttcgcgaacgttcgctggagctattcggtgacgagaagcggctggaccgcctgaagtcgacgcgcttgttcacctcgggcgcgttgacgatggacctcttgcgctgccacgaggtgcctattcccttcgtctcgcagtgggtggcgggggctccggacccgcgcggtaccgcgctgctgatcgctgagaaccatcacacctacacgtcgctgctcgaagccacgcggttcagcgctgccgccggcggcccggctcggtacgtcggttacgggacgggtagccagtttccgtcggcggtcttgtccgtcccgctcctgtctccgccgccggatcggatcgtctatttcggcgacgtcgatctcaacggtttgcagatcccggccaccgcgagtcttaactcccagcgtgcggggcttccggtggttgagcccgcgtactcgctctacaacctcctgttcgcgacgtcctaccgacgtcctactgagccggtggccgagcacgtcgccgcgcaggtagcgggctggatgggacctttggccgggcaagcccaaaacgtgctgacggtcggtacgcggatccctcaggaggccgtggggtacgagctgctgatggctcgtcttcccgcgctggatgccgcctga

SEQ ID NO: 51999 - DNA, 1509 bp, Clostridium ultunense Esp
atggatatttccataaaaaatattacggaaaactatagggataggatggaaagattagcattattcgatcctttatatgctttagagagaaagtctggaaaggataatagtggggaacctatagattattatggactgggacttttaacattattatttttctttgaaaatatgttaattaggaataaaaaggctggggttatggaactagcccaatttttctctaatttaactcaagaaaagttagatttaacttttgaggaatatgtaaaactagctagagagatagttaaagtgtttaggcctcctagcggtaagagaaatagccggaaattttacaattgggaaacaggacaagaagaaataatccagtattccatattaaaggcctcccattttgatgcaaaggccaatactcaatattatgaattagatgaacaagggttagagcttatatttgcaactaaggaatatttttcagagtttcagctatctattaatcaattaatacttagaaaacaattggaaaaaggggaatttgtaggggctttaaggcaaatagatgagatgaggatggatgtaaggaatttacaggataagatatataggataaaacatgaaattcaaaggaatattatatccgatgaaacctatagacgttatgaatccattgttgatgatattcattttagattaagtagagaaaatgaagagtttgaagaattgaaatccttcataaaggagacaaaagaaagattagaacatgaaattcatgaagacaagatgaaaaaagcctatggattaattattaaagtggataaggagttaggtgaagtccactatgagcataggaaactcctttctcaaagtatagatatgaagacaacagctctaaatgcggctcaagaatctctctattatataggcattgattctttcaattttaaagatcaaatagccaataaactaatgtctacaccattacctttggaagcctcaagaaggttggtagagccttttctatatttggaaagaggaggattttggtctcctttggcggtttttggaaagcagcgaattgagaaaagaggcttagaagaagaaaacttaacttttgcaagccctttagaggactgggaaataaaagaggaagttaaaattcaacaggaaaattttaagcatattatggaaataattttaaaggcaatggagaaggaaaattgcataactctaagggaacttatagagtttataaaagaaaatggcaaagaagatatattaaattataggtctttttatgatttctggatactactacatcacagttctccaataaaattagaggtggaggaaaatcaaaaccatatgttggataaggtaatagaattattagaaagggattatacaagtttaatagtagtagaaattccaggcaagatagaaccgaatgagaggtatacaatcaggaatatggagttaacattggaggggaataaagatgctatatga

SEQ ID NO: 52000 - DNA, 753 bp, Clostridium ultunense Esp
atgctatatgaacaggaacaagtaatacaggctttcaaaatatattctaccttagctattaatggaaaggcttttaaagaggatttaagattatatttagctgatgattccattagaggcttagtggaccaatttgctaaagaggtagattgtactctattgctagtaggtgatctaatatatatgatacctttatctataaattctccttatcatatatccaacgaaactattaaagagaaacatctaccttctagagctgtaaatgcagatatatatatgatgtatgtagctataataatcctatttggagaattttatgatagttaccagacaacagaggctactagggattttattaagatggaagattggttaaatagtgtaaatgacaagatattatctttaaagggttatgatgagaaagaattaatggaattggaaaggaaatatgaatacaattggttagctatagtggacaaatgggatgctttagatgatataaaggaaaatgttcaacaaacggctagaaccataagtagaatgagctttatgaatatcgtaaagagatttttggaaaaacaggagttaatagaggggattggaaataatgaaatccaattgacggaaaaagcaaaagctattatccaaagatattatatggaattggaatataacagggaaatattggagttcatatactctttagaggaaaaggaaggtgatgtaattgccagccatatccaagattag

SEQ ID NO: 52001 - DNA, 4437 bp, Clostridium ultunense Esp
ttgccagccatatccaagattagattgaccaatataatatatgaaaatggaggtaagaggtttaatgacgatatatttgaatttgatggatataatggagtaatactattagaaaatggtggaggaaagacggtctttattcagacagccctccaagccgtattgcctcatgccaatctaggggaaagaagaataagggatactctatcattggaaggaggagccagccatatagctattgaatggatactaaatgataggcctagaagatatggccttacagcggtaacactatttttagggcccgaaggtttaaagtcattacgctatgtatatgattactctggaggtgatgcccattccatagagaatattccctttgtaaagaaaaatcaagaaggcaacaatagacctgctagcagacaggaaattcaagaatactatcaatatatgcagagccataagatgaatgcacacacttttgataccataaaggatttccaccaatatattgaagaaaacttccatataataccttctgaatggaaaagtatcgctcatataaatggagcagaaggggatgtggagaaattttttgaacattgtaaaactacctctcagctagtggatcaattacttatacctgtagtggaaggagctctggtaggcaatggcaccaaggattttattcaaatatttgaaagacagagggagcattttaaaaagcatagagagcttaggagaagaattgaagaaagtaagaatatagaacaaaagatagcccattatgtatctacctatactagattacatgaagcagaggaaaagatgctcaataaaaagagagaggctaaatctatatatgaatttttagtagaggaagaagataaaactcagaaggaaataagccatgtagaggagttaaaggaacttttatcaaaggacaaacaggaacttaggagaaaagaagcttcctatgaattagccttgttagataaggaattgaaaaatgcgagagatgattatgaaattattgcagaagagcatagggaaatagttagcagactagaaggaaaggaagaagaactccaaaatttagaaattgcagagcttaaagaaaatattaagaaaaatgaagagtttagtaatatattaaaagaacaattagaggaactagatgaagatgaggatataggggttttaaaggatagattagaagaaaattctagtatattgaagggatattttgaaagggaaaaagaaaatttagaaaagcagaaagagcttttggaaagccaaaagaatcgatatgaagatgaattacaaaagattcatgaaaagatagtcggccttcagaaagaaaaacaaagtttaattgaaataagggctggatatagaggagaaataaaaggtatagaagataatatggaaaatattaggaaggacatattggccaaccctattaatgaaatggtagaaggagaatatcctaaatggagacaacgggtagaggaaattgagggattaaatacatcctataaagaacagctaaacagtttaaaaagtagaaaagaacaactttccatagaaatacctaatatccatgatgaaattcaaaggcttatcaaggacactaccattagagaaaaggatttaaggtctatagaagaaaaacatgataaaatactgtctgctgtaaaggggctaaggctagaatggaattatttagattccatctacctaaagcaacaatccataatagaatatattgaagagagattagagcgaactaggaatcaaagagaagagttattagaagatgaaagattatcctataggttattagattactatggaggcaatgaatattttactggagaaccactgcttgaagagtggttatacagttggagaaaccaattccatctattggagactggtacaaggtatgtagaaaaagcagcgataaatcttaatagaaatgtaaaggagatatatagagagtaccccttatggcctttagcaattataaccacagaaagggaactggaaaagctatggcaaaaaatagaaggccaacggcaaaggcttacatttcctatattaattctatctcaagaggaagcaataaatatactattgggaaaggtaagcatagaagaaagatatatctatccccatatttggcaggataatatagataaggagaaattccaacaatggaaaagggagttagaggaattggcaaaaaaggctgtaaaggagagaaaagagaaagaaagagaggaaagagagtggcagaatatattgagaataactaatgaatttttatttgctcatccctatgatgagtatactcaattatctgaggaattaaaggttttaaaggacagattagatagatatgaaaatctattagatgaaaaacaaggagaaaatgtgtctatagacagagagatagacgattatgagaataagttgaaggatttagaacaggaatccaattatttaggtagaaagatggaaagagctttagattattttgaaaaagttaaatataaagaaaggttaagcaatcaattataccaaaaaaatgaagaattagtttttgtagataagaaaatatcgtttaatgaaaggcatagggaaaggaaagaggctatagttcaagggataaaggctggcataagggatttaagtagtcaaatatctattatattggaagattccaactatagggaagtaaaacactctaaagctttatatagggatgtaaacaaggataatatcttagaagaaaggaaatatatcaaagataggttatcagaaaaacaaaaaggtagatcggaaatagaaagacaactaaaagaaacggaaaagaatatagaaagggatggggatttattaaaaaggaagtacgccggagccaactaccctatagatgaaaatataaaatttccttttaatggtaaaatccttatagaaggactgttaaccgatattagagaattaaaggaaggattagaaaaaatattgccttctttaagaaaaaaggaaaaattttatgagaaaaaagctaatagatatgaattaagattggaaagctttcataaagaattctatgacattatatatttcactcagcctttacctagtgtaaaaaaacaaatattccaagaaagattagagatagaggaaaaggaaaaatatttggatacaaactataaaaggcttaaaaatcaattggaagatattcaaaataatattcagaatctagaaattaaaaatggtaaatatgaattcctcctggagaatatccaagggactgttttaacagcagatattaaacaaaatttaccctataatagggaaggcactatatctaaactaatttgtgaaatggaggactttaccaagaatctagagacacataaggcaatggtggattcggagagaaatcaatttgtccagtttgcaaacatcaatgtaaaggatataagattgagggagatggcagtatctggtattaaaaacaaaagagttttccatgaggtattagaatgggaaaaaaatatgggtaagactttaaaccgggtaataagaatccacgaaaaaaacatgatggaacatgataaagagctaaatcaatttatccagtatctatatacctatttatctacattggcagatgaaatgcggactatccctaaaaacactaaagtaaaaataggagatgattggaaggaaatattccaaattcaggtacccagttgggaggaggaagaaggcaaggaggaaattagaaagcatgtagactggatgattagcaaattggaaaaggaagaatttttagatgaggaaggaaaagaagatcaagggaaaataaaaaaagctatagaaaactggctccaatctaaacagctactgaatatcattatgggaggaaaagagataaaggtaaggtgccgaaaggttaccaacgatggtaaggtaagcaatatgtattattcctgggaaagttcaaaccaatggtctggtggagaaaaatggagtaagaatatggcccttttcctaggtatattaaattatgtagcagaaaagaaacaacatatattacctaatcaaaaaagacataggacggttattatggataatccttttggcaaagcctctagcgaccacgtactaagcccggtgtttttcatagcagaacaactaggcttccaattcatagccttaactgcccatggagaaggtagatttatacgagattatttccctgtagtctatagctgtaaattaaggccgtcagtagaaggggatacatctgttttaacaaaggaaaaaaatattaactatgccttctttaaagataatgatccaatggtcatagaaagaataggagaaagggagcagttaagtatgtttgagatttaa

SEQ ID NO: 52002 - DNA, 1023 bp, Clostridium ultunense Esp
atggaaaatacaatctttgaatatttaaaatcctataagaagaggacaattccattaagccgattggaaaacctactaacaggaagccaagcctatgagaattttgcatctgctataggaaaattggtggaaaaaggagtcttaaaacctataaaatctcatggtaccaatggtaaatctattccattatacaatacctatcgtgttatgaaatccaatttaagggaaacactcaatagtgagatcaaatactatagtattaaatttaatcctaatatatatttaaattcctacttttcattggacgaaaaggaatggcatagggacttcccctatatacaaaggattgattcctatttaaataataaaggtctgcctacagattatgccaccataccagaaaggtccttccaattagtaggagatgaaaaatggatagctgaaaaggatggcaaaaagttattggaaaggattaaattatgggataagcttaaaataatagccagtccagacccgctgatgttaggggttaatcccttaaagtttagggaatctagacatattcacttgacagtggaaaacaaagctaccttctatgccctgatggattccataaaggacacggattttacctcaataatatatggtgctgggtggaaggtggtatcaaatatccaaaggttacctattcaattagggttgggaaatgatatacataagatatactattttggagatttagaccctgagggtatttccatctggtattccttgtaccaaaaatataaaatagagttggccctccccttttacagagccttattagagaaaagctactccattggcaaggaaactcagcagaaaaacatggaagccatggcaaaatttaaaagctattttaaggaagatgaaatagcgattatagaccaattaattcaaagggaaggctatatccctcaggaaggtttaaaaaaggaagaattgatcaatgtttggaggaatggtttatggatatttccataa

SEQ ID NO: 52003 - DNA, 1500 bp, Clostridium ultunense Esp
ttgaaagaacgttggcagggttttagcgagcgtgtgaagcgcttaaatccattgtggcagctgggcggcgggatgaatctgggggaattgaacccatatgctcggatgctgggacttgctttattgctggaagttttttttagggaattggacaacaatccggcacgaacgcgccaggacttactccagatcacccaggatttgctccaagaaatgcacttgcatgtaccggatgtgcagatcatccggcgttttgtggacggcatcttgtggagcgggactccgcaaatgcaagaatccttcaccgcctatttctttgatgaaaaagaggaacggatggcggaacagagtttccgctatttacaggaagaccgtttgaactcccaatgggagagagggggaaatacggtttatcagctgacggatgagtcgctggagctcatcttcatgagccgtgaggttttgcaggagctggaaattggcatcgaccagctctatgtgcagcagcagatcaaacggggcaattatcggaaagcccttcgggggttggatgacctcttggccaaggtcaaccgtttgatccagcaggaacagggctatcaggcggatatgaagcggaatcccaaaatcatttttcaacagggaggacgatggcggtcgaaacgggaagaagagattcacgcccagttcgccgaggagaaaaagcggttcgatgaactgcaaagggctttgcatcggatgcaggagaccgattccggtgaatggtacgctttacaggacaagctggagaggacacgggttcaacatgacaaactggcgcaggtcgtattggataatatagcactggaggttgaactgcgcgtccgctatccgcaattgttctggaatcgtccctcctattcttttcgacgtaatgtgtgggaagaggggatcttgaaggaaggattggcccatcccgatcagctttctctgtttcttgagcccctcttctcgccggagcctccctttctttttccgctggactggggatgggccgagcagacggaaagcgtttgggaggaggaagagcgggtagaggagacgtcggcggaaatcgaagcgtatgtgccgcataggatcgattttgaacagattgccgacgtttggcagcccatctttttgaaattgttggaagagggacatttctccctctccgagcttgcccacatcggcccggaagaacaacaaaagtggttgctccagaaggagacctccgatttgtggctgatgttcttcgccagtcccctcgtcgttccgcctttgacgcctgaaatggcggtgacggatgataggctgaagttgatccaggttttgcagaaccgggactcacgctttctcgcacttaccggcaagcgcattcgtgtgcagatcgaaccgggaaaaccgatgattcggtgggaaaaactggccatcacacccttttacatgattgtggaagaggagggaagccccagtgattga

SEQ ID NO: 52004 - DNA, 744 bp, Clostridium ultunense Esp
gtgattgaaaacgaacaggtgcaacaagccgcggccctttttttctcgctgcttaaacgaaaagtgatcccgttagacgatcccatcgtccaatcgtattttcgtgaagagggggttcgggatgcgctgcgcattctcgccaacgagtcgggaacggagctcttgcagacccaggatcgattacatctggtggcaaggccgcagggttccgtctttgccacctcgtttacgcatatgaagaatcggtatggggagttggagacgaagaagtatttctacctgcaaaatgtgatcatgcttgtttttttggcggaaatcgatgtggagaacggtcatcgtcttcgctgggagaatcaggggatctccttttaccaattggaacggcaggtggatttgacgctgaaacgctggcgggagaaagaagaggagtcggagggttggtttagccgcgattggggggtggccgtatcggaaatggccgatctctgggccgccctctccacccaggatgagacgggcgaaaaccctgcttccctcacccgccgaacccgcttggggaatatcgcgttggcgatgcgggtattacgggatgagaacctggtctatatcgccgaggatatcttaagggttacgcctcgtcccgaattatacgaacgtttggaaggaatttatcaccgtcaggaccgttatctggaattgcgggatctgattcgtcgaagcctatcggaggaggggttgttgtag

SEQ ID NO: 52005 - DNA, 4542 bp, Clostridium ultunense Esp
atgccgaggatggaacgcattcgcatcaccggggtacggtatgaaaatatgcgcaaacggcacgaggatacccttttggatctgtgcaatgaggacggaccgcaacataccctgatcaccctggtgaacggcggaggaaaaggcctgctgttgcaaatgatctttcaacttcttttgcccaagaccacatggggaaaaaatggggagaaccgcgttgaagccttgttttataacgaacggaaggcgtttcgtccatacacctttcatgtgggcatcgagtggcgcctcgatacggagccacgatcctggttgatgacggggatcgccgtcaccgccaaggaaaaacaaagagtggatgagtccgaggagaatccctccgacatccattacatgctttatacccagacttatggaaaacctcacgattgggatctggcaaagatgcccctttacgatacggaaagacgggaaggggtacagatggaggaattaaaagcattcctcgatcggcagaaatcactctttcaaactttttctccctcccgtttacgagactactacgattacctcgcctctttcggaattgaaaagggcgattggcaggtgatgcggaaaattaacaaggaggagggcggagtggaggctttcttcagcgatggccaagataacgacggtctctttcgccataaaattatccctaccataagccagtacctgcagacggaggaatcggaagggcttgtccccctttttcgttcttcggtgaagatcgcccaggatctgccgaagttaatggcgcgggaggcttcctaccgagaaatgcaagaggtgttaaagcccctgaaggattctttggagaacggcctcttggaaaaaaagagggttgaagagcatcaggagaaaggggaggttttgctcggcgcaatacagggttggcaggaaacgttaggcgcagagcttgaaaaatgggaagaggagaaagagcgtgaagaggaacgactgagggattggctctggcaggaagcgaacttaagctatgcgaaacaacatcggaaagtgaagcagatgaaagatcggctcgagcaaatcacgaagcagaagatttcaaaggccgagagggtagccacgttggaacgggaggtgaaactcgcccacctccactacttgttgcgccaatggtcggatctggtgaatcaagagagggaaacccgggaggagatcgaacaattgcaaaagtccatggaagcttcccccaccgcccaggagctggagcgcctacgaaaacatcttgcggaggagtgggatcgggctgcctccctttgggcggatcatatcgcccaggtggatcaggccaaaagggagtttcaggatctgcagttcgccacgaaggaggagatcaaacaaaccgaccggcgtctggtggagaaaaaagggagagcagggaccttatccgaaaaaatgaaagagtttaacggccaggccatccggatggccaaccgctatggcgccaaagtaaatacagatccggaggcggtgctccgagaacaccagagggagtatgaacaacggaaagagaatctggccgaattaaaacggcagctggaggaatatcaacgggagaaagagagagttatcgcagaacatagcgccctcactcaggagaaagaacagcatgaaagaaagcggcttgagctggaagaagcgtaccatgcgcgccggaaaggggaagagtcgctctacattaaactccgttcgttttttccggagtggtccgtggaggatcgcggcgggatgggttggttgcaagaggcggcacggaggatcgaggaaaaaatcacgaacgtggagagagcacacaaagaggaggagcaagcctattggatgcaccagttggaccgttcgctccaaacggaggagtactggattcccaatcgggatctcgctcagctttatcggcatttggaggcggccaatatccaggcggtgtatggaaccgaatttttaaaagatttgtcggccgaagaatccctctcctatatccgtcgttatcccctcttaccctatgggcttgtaatctggaaggcggacgaaaagcggctcaaaacacttttctcctctcctaaagcacgggagtggtttctccgctctccggttcccatctattcccgggagattgaacctgagccccactctccggtggagggagaaggggatggctggttctccgatcggaacgccctctatctccatgatttcggcatggaattggcgctcggcgatgaacgctgggttcaatggcgggagaggttggaggaagaggaagcgcgctttaaggccgccctcgccatgtatgaagaacaggtgaaaagcttgcgggagatatgggatgacattcggatgttgctccgggaaacaccgtcggcggtctggcgggagaggatggaggaagaaaagaaatggctcacgggcctggaggatcgtttgcagcagctggaatccagggagacggagcgtaaggaggccgtccggagaatatcggaaaagaacctggaaacggaagaattgatgcgaaggcaagaagaggccatcggggaactgaagcggtggatcgaccgggttcttcaatacaaaggggatatgagggaacgggacgaagttctgcaagagatccatcgtctggaaacggaaaagaggagtttggaggagcgctacacccggcttgagaacgggttaaacgatttgaaagataacgagaggaattggagggggaaaagggaaaaagagttcgagaaagtaaaaaaggtgctgacggatgccgattttcccgccggaagcaagggagaatacgaggaacgggtacgtatcatcaatgaatatgtcgaggttgagatcacctgggagacggataccgggcaattgcttccactcgcccgcgaggcgctccgcttaaaacagagcgtcgaagaaaaagaagcggagttgctccgtcttcaggaaaggttgacccaattgaatcagcggcgcaaagagaaagagacggaaatggaggatgtgacgcccgattggccgcggatcacgccgattgagggagcggaagaggtgttaaaacggagatggcacatggcggagcaagaatacagggaagaacagaaacagcttcagaagctggaaagggattttgagcgcaccgacgcctcctgctctaccgaacaggagcatttgtttaaatcagcgcaagaggtgttgcaccggtacggcaaggaagcagctccttgggaagagatttcattggagttgaaggaacaagagatcgtggaaggaaaggcaaaaagcaccatccatctccacgaggtggaacagatcctcgacgacttgagacaaaagatcggccgcctggataacaatcagaagcgaatgggagatcaagggattcgcctgaaattaaccttagagatcccgcaggccctgatggaatcggtgaaacgggagccggacagggcggtggaggagtggatcgaagcccataaacggttcaaagagcaattggatcatctgaagggagccatggaaagggagcgttcccgcctcctgcagaaattggaagggttgtcgtgggatgccacgttgaaggagaatctgaaacaggcgatccacgaattagacctaaatgactggaagcagtcccgtgatgttttagagagcatgatcctacatgcggcggaagagatgaaccggctgcaagaggataagaaacgggccgaggaggcacgggatacctgggtggaaagggcgtcataccgggtgatccagatcattcgggcgctcaaaaagatggaaagcagcatggtgatcctcaatcaaaacaagcaccggtttcccctcgtgcagatgaacctgaagagagggagctttcccgaacaaccggaagagattaaaccggaattgaatgatttcttcttgcgaaccatggagaggctgatcaaaacgtatggagagatcgaaaacgtgcccgatgcggagtgggaaacggccgtcaatgacggtgaagtggtccatgtggccttccaccgccgcttcccgactttgatggtatacaagccgcaaacgacgaacagttttctttatgagactcccaaagggcatcattatacggagtggcagacgctcaacaagggatcatacaccgaggcgaagggcagcggcgggcagttgcttgcggcgcggacgatcgtgatgatgatgttaatcacctatcgcaggcagcaacaggctaaacaatggacggtcctgatttcagacaatccgtttggccaggccgtatcggaacacatcctcgatcccattttcgccatagcggaaaatctccatttccaatggatcgtcgtatcaccgccggaattgattaagctggatgtaagccgccgctttccggtttattgggaattaaaacttcacccgttcgcgcatggagaacagattgtggaagagttgcaccacggcggaaggcagtataccgatgaattatccctctttgatttttaa

SEQ ID NO: 52006 - DNA, 1086 bp, Clostridium ultunense Esp
atgatcggaaccattcgcgcctatttgcaaacggtacaatctaaaacgacccggcggaaaaagatcgccgttgatgaattggaacgagccatcatggatgcgtgcggatcggccgaccattacctgcaggccggcggttaccaatcattctatcagggggtaaaacaattggagcaggaaggcttgatcgcccccttacgttcctcccctttgaacggccgtaccccccccttggccgcgtcctactggctcatgccgcagggcgtcacggcccgatggagtgaggtacagatgttgcgggttgccgatcggttgaatatggaaaaataccggcagcaaccatccctgcagaccgatgaggaatggggccgcattgagcgagtttatcgctttctcctccgcgcttatgaacgggaatgggttacgcgggaagaacgctccctggaattgttcgggaatgagaaatggctggcggggagcgaaggaaatgcttttttaagtcgaatcgggatctccttggaggatttgaaagcgagagtttatggggagccctttgtcttctggccccgtcccggggtcgacgtggcgaaggcgagggatgtgctgattgtggagaacctctcttttttccacaccgtaaaaagggtgctggagtcagggagggagatcggagggatagagcctgatctcctcgtctacggggaaggaaaaaagatcgagtccagctttccttttttgttcgacctcatttcggggacagatcttctatcggtgagggtgaactatgtgggagacatcgacgcggaaggatggggaatctatgtacgcctcgtccgtcgttatcccgcgatgaatgtgcgcctcgcctttcccctctattccgtcatgtgtgcggtgtcgcgccgcttcgttgaattgccgtcttatcgggatcaaagcgagaacgaagaagtgctgcaggatatcgttcgctcctttaccgcgaacggattagactcggaagcgcgtcttattgctgatttatggcggcagaggagacgtatcccccaagaagtcctcacgtttgaaaccttcctacagcgttaa

SEQ ID NO: 52007 - DNA, 1467 bp, Escherichia coli KTE66
atgtcgctagggtttttggagcaggctcgtaatgaatcaatggcacgtcgtgagctgtctattcagtctcacgccttgctggtcgtgcggacgctggattcaatatatagcgcccttcagcgaaatccgttcgatggtgttgagcttgatgcgctggcggcaatcatgtatctctttgacgccatgctttattatgctgaccgcgagcgccagcctggaatgacgcgtaaggaagcggagttatgtctggttgggcacctcaatgaagcctatccgggacaagaagaacccgactacgcacaagtggccagcaagatttttgcggcgatcaaagatcctttccgcctccgttattatgatttctcgcaacgaacgcattccgaagagcagatagtccgtctggtacgctatgaccagctatccggctcagatgatattctctggtcgctgactgatgaaggaatgttgttctataccctgcgcttggatgaaacgccgatagaacgcgctgcgattctggcctggcgcacgcttaaaaccatccgtcgcggagagatcgacaaggcagtacaccagatccaatcaacacagcggcaactggagcaatatctgattggaatgcggatgaaagtgcgtgccgcccagtctggtgatttgagtgcatcttatgcacacgatatccgtcccgtactcaatgattcctttgataaaacccgagaggttttggaacatatccagaactcaatgtcggccattaccgaaatgctggttgaaggaagttcgaaaataaatcccgacaaattaaataagctacgtagggcacaggagatttttgctgaggtctgcgcttttacgcagcgctatcaagactgcttacttgatgttaacaaagattttgagcgagctcgtctgaaactcattattcccagagataataccctctttcgggaaacactggaaaaaggtgcactcaagcccttgctgtctcattcccccgacactgtcgaaaaggaaatcgatgatctcaccgcacgcctgttggctccccgaagacaggatgatgatcggcacattctgtttgaccttgaggcgctactgaacctttatctcgatagatttgaacaggcgcttccacatgagatacaggacctcaccgatcagcctgtagctattgaaaccaacctgcaaggtatccctgaatctgtcattaaaaaatgtagcgattgggttagtgaccgattgaagaattgggggcatgtgagctttagagatgtttttgacgcctatgagggcgaagaattatccgaacaagagcaacaggtttgtttactccatattggcagtctggcagctaacagcgatcccgcaatagaagtggagatagacgacgctatcgaaacaacgctctggcgggctaacaatatcaaactgttaacggttgctcccttatacccctttgaggagtag

SEQ ID NO: 52008 - DNA, 4437 bp, Escherichia coli KTE66
atgtggctgattaaacgggtttatatggatggtgcaggccatgaagaagctttctacaaggacctcacactggactatattggcctgtctcaagcggtcagtagccctgttgttgaaggcctgcgctcgcccgtcaggaatgcgaaggtggtgaccagtacttatcagcagcttgtgaatgggggtggtaagtcgacctacatcgcgctgctgttatcgatttttgagccgtccgttagtgacttcacccaatatctggcaaatcatcgccagagtgaataccactaccgcaattacttctataaagaactctctgttgttttggttgagatggtcaatgaatcaggacaaacgttattactaggacatgctcatcagcgtaatggagatgatgttgaccgcacactgtttatttgtgatgcgcccgactccctgatgggtgcgccgtttgatgaagtcccttcttattcccgcgcggaacgcaattctgagctgcgcccctatgccaatagcctgcgcagttttgatagctggcttaatctcaaggtcggtagtgaaggcggtatgcattggcgtaaaaccaccagacagaacgagtggcgcgcatttttactggaacaacaaattaacgttgatcttatcaaaacaatggtgaccttcaactccgaagaaggtggcctgacccgttttatcgaatacaaaactgaacatgatttccttggcgcgttcttcgcctgcaccatgtctaaagatgcggctgagcggctgcgggaactggtagcgcatgaagttgaacgtcagggagagttagaggggattcgtcgtaacgagtccttcctgaaggatgtgctggctaactggctggcgtttcttgatccggctaaacagctggaaagcaaccaggcacagcagcaactgctggatgatggcttccgagaagcaatgcgcgatctcgcagcctttgttggggatgctcaggttgaacagacacagcttgaagataacatggatagtttgcaaacgcatattggccaggcgatgtctctgcgtgagcagttaggtaagcgcagagcactgcttgaatatgatctcgtgcagcatcggttcaacagacaaaaagcgatagtcgatgcgcttcaagacgaggccgataccaatcagcgccagattgagattactcacgctgctatagactacaaagcctatgctaaggccctgaatgagtaccgccaggcagatgaagatctgaaggtattccaaagtgaaacggaaaggccgctacaggtgattttcgagcgtactgttggcgaagccttgggcacattagagtgggcaatcgacagacatcgccagcaggaggctacgcttgaggaagaattagggcagatggacagggaaagccatgtcctcagacagtcatacgataaaatacaaaagacgttgggtggtctggaaacggagcgtgacggatataaaagagacaaatttcagggcgaatcgcaacggaatgaattatgtgaagctgggctgatccagaaggatgaaacaccagtagcagcccaataccgactggaattaaccttacgcgatgcaaagcagagtgaagaactggctaatacaattcttcatcagaaagagcaggcgctggaagcgcagctgcatgttgtgcgggaggcatcaattgagaaaagtgaggcccagcaaaaactcattctggctgaacaaaaacaccagtcggctgtggatagtgctttagttttagcaaaaaactatcaaaaactgccaacgtcaacgcgacatgatctggatattgaagacacgagttggcacagcgagctgtgtgtattgcagctcgacaaagtattgaatgcgaacgctcaaacgctgaatggaatgaaagagcgtttactgcaagcccggcacgaactggacgagttgagggtgacgggacatgaactggttgctaagcaggtcaatgaggcacttgaagcgttttatgctgcgggcattgcacgggataagctatggacatttccacactatttggcctctgcttacaacgatgatgcacaaaagattgcagcggtgatcgatcagaaccctggccgctacctgagcctggtcgcactcgacaatgtaacgtttgaacaggtccataaaattagtgagatcctaccctggaagaaggcacctattgctatttacttgctggatgaagcacaagatcttcgccgagaaacgtctgaattagtacaggttgtcctctcaaaccccgataagcacggatatagccaggccgcttacgaaacccggctgcaagacctggagaatacagtggcgtcgcaggaagtcagtgtgaaggctacggagagcgcccttaaagtactggaatctttcaggaatgactggagtcggcattacgaacagtatggtaagcattgggcgggactgcttgaccaacgggagctggctctattaatactggaaaatgctgatgcagcacttaagcaagctgagcatgatgagcaaacactgcgtgacgagaagagagatgtccaggtgcgtttaaacaacgcccaacagcagaaaattcaggcagaaaaagcacatgataaagtgagtctttttgtagaaaaagaatgggcgaagcgtgaaacggcaataatgaaactggagcagttagctgcacagattcagcgaggcaagaacactctttacacccagagagagaggctggaacggctgagcgagctcgagaagaacaaacgctccgagaaaacccttttaaatatccagataggtagctggagtaatctgtgtaacgaaccgttctattcagatattacggcgactgaaagtatggaaggacgaagccctgaatatgctcatgagatggctgctcaggcgcacaaaaaattgctcgaagcagccaacggtgatcaagtgaccgttctcaagcaacaactgaaagatgctgaacaggcacaacgttacgcctctgagcgtttgaccgctcaacccacctacaatacatatccggatgaggtaaaagctgcggccatcaatgagctaacggtaattaataaccgcatagtacgcctcaaagaacagcaaaagcaattcacgcaaaatctaattagctctcaggtaactctgcaaaaattttcccaaagctgtgaggaggctagtaaagcacttgacgaggattttgtctgggaagagaagcccattgagatcgaggcaatccaaacgtctctggctgaaatcgtcaataacctttatgcgattgaacaccagatcaagttcctactggaacaaaagacactgctgttgagaaagattgaaaatgtgaaagagcggctacagaacgccaaaacagctcaagcgatgatccagcccattacgccgagctctgccgcgggtctacctggtaggatcctgagcatcacagaatatgctgacgatctggctgcacaatgccaaatgtatgccggtttaaatgaaacgctaaaacagcaaaatatgcgcgtctctacggtctggggaaaatttcgcaaacggatcgaagaagagttggccaaggatccagacgcccgagccagtcaggaatacttacggcagttggactcaatcgcaacttatcatgaagtgctgggcgatttggagagggtcggtacagggatctcgcaggtattcgaagctgtgcaggacagcctcgagcaattccaacgttcgattgatctgactgtcacccatctgactgctcatctggaaggggcgattaagcttctcaggcgcgcgatgtcggtcaaaattcctgaggattgccccgtactgcctggtcggcccattattaaaatgaccgaccggttgaatgatgttgccgctgatctcaggggttttgccagcagccgcttgcagcagtggatagccaggggacagataccccgagcgcccaatcgggacgccttgacagctgatttggttcagtcggtatttggcgaaggggaactggaggtgcgtttgctgaagacgaatgccagccgtccacaatggactcctgtcacccgacttgaaggttcgggtggacagcgccttacatctgcctttttactgtttgtgacggttggtaaagtacgagagtacgatacgggtatttcaagtgcaggattcttgttagccgataacccgctgggtaaatcgaatgccaatgatctaatgcgcattcaaacccaaatggccaaagcctataaaatccagctcatctacctgactggtatttcggatgaaaacgcccaatcaatgtttgataaccatctcttcctgaataaagttcaaaaactgaggcggcgcgatttggtaaccgttgataaagaacgccatgccctgtgggcggcttctctggctgctaagccacagttcgatccagtcatttaa

SEQ ID NO: 52009 - DNA, 1044 bp, Escherichia coli KTE66
atgatctggctatcccgactggagtcgacagccaataaacatcgtcttgccgctggtaaggccgcgcgtacagtgaaagctaatgcggtgctggatgaggtattacgcgcacacaatcaagaggccttgagccaggaggtgcctgatttgctgagtcaggctgttacgcaactgcttgagagggactggcgggctcagcctaagcacaaagcgagttggcagcgctactggcggggtatgagcctgccaagtacttttgtttacgaaggtgccatcgttcctacgaagacaacatcagaaatagcctggcatccctggttggcccgacgtattacaggacaacttacccagccaatcaaggcacgcttacaacagttgaatacatatctttttcgccaaaccgggggcgacaagtcgctattcccgggcttgcttgggcatcgtgagcggtctctgcttatatttggtgacgaaaaagctctggactccttgccacctgatggctggaagcatgtcactctgactttggctgatatgggcgcgtttcgacgtgcgccgcctttaccgtatgagtcatctcgttgccatgatcttccggctatcattgttgaaaactccgatgtgtattatcggctatgccaacttaatcgagcacagactcgctggtcactggtcatttatggcgcaggtaacaaagtttccggtcaggcggagtgcgtgtcacaactccttgaggtcgaacaggtagaacaactactttattttggcgatctggatgttgcgggcttaaaaatcgctcatcagttgcgttgtaagttgcttaatgattacggtatcagcttgcatttagatgaatggctttataataaactgatcttaaatggcctgatgacagcggaagggaacgccaacaacgaacggtttgatttcgagttacagtgtggctggatgccaaagtttgttttacgagaaatgaagactcttctggcgatccaccagcgtctcccccaagaaggtgtggcttctttaggtttatttatatag

SEQ ID NO: 52010 - DNA, 1623 bp, Eubacterium plexicaudatum ASF492
atgcagtatgaatttctaaaacaatttccaaagcggatgaaaaatgtcggactttatgcgcttttatttggaaacagcagtcagaagacgacatggcgccagtatggatttcaaagtatggacgagcagtttaatatgatttttgcagtgatgctgtatctgatggaacagtcgctgaaagaagaaaactgtgtgatagacgatatcggagcatatattgatacgttgaatacaacggcatttcaaaagccgatgtcttatgaggactgccgtaaacttggagattttatcgtgaatgtgattttatcgaatgaagggcggccgatgtattttgacggctatgattttgaaaagcaggaatatcgcaagatgaatatcagctatgtggcgaaccggattgtctatccggaagcagaagtaaaacgcacgtcgtattatctgaccgaagacggctacaatctgctgctaggaacgcttgagatagaaaataatatgaagctgacgattcatgagatgatttttaagatgcatctggaaaaacaaagctatgataaagcggtagatgaggttaaaaatgtatttaatctgatgcggattcagctgcagaaaattcaggaggcgatggtcagaatccgcaggaatgcgcttaattattccgttgccgactaccgggttattctggaagaaaatatggatacgattcgaaatacaagaaagcagtttctggaatatcgtgacatggtaaaagcgcgggcgacggacctggaagaggagcacatcaatgttcgaaagctggacgcaaaggaagaagaaaatctaagcaatctgcggattatagaagattatttaaaccgtgcaattgatgaacatcaaaagatactgaacaatcatctggatttgaaagcgttatatacaaaagaactcgaagagctgtcgcagatgtcatttattcaaagattttctctgcgcagtgatctgtttgaccggattttggaaaatccgcagggacttgcaaagatggatttgttttttcggccgctgtttttgaaaggaacggataagatttataatttgaataaagcgctggaaccacagcagaccgttcgtaaaaaggcggaagcggatagcgaagagcagattgattttgatgaggaacaatggcaggcagagcaggaactgcggaggatggaaaagcttgcaaaataccgcggatgcctgaaatatctgctgactcgtttgctggaaacggaaacgtttacactggctcagtgcagagacgcactattgcatgaaccggaacatcggacgcagttgataccggatgtagagatatttaaggaggtcatggtagagctgatcaaaagcagggaaattgacataccggcattaaaaagagaacggagtgaatttatacaggaatcttcgggcggttttcagcttcatgagatgatgctgtatttgctggaagaacaggaagcggcaggcgcaaaggtgattgaaaaaatagaaatctgccggacagagggcacagagcccgtagtttttgaagaagtcaatgacgcatatggaacagcaaagacgatccgctgctcggatctgagattcctggcacattttgaatag

SEQ ID NO: 52011 - DNA, 723 bp, Eubacterium plexicaudatum ASF492
atggcatatgaaatggaagaaatccgtaccggtcaggaaatattttattatctgctggaacatcatgagattcgcgaagagacggaaaacaggctgtatcaggcatatgcggaaaacgaacggatacaaaatcttgtaaaatcacaggccgagattgcgtgcagcagcattgaacgctacggagatgtcatttatctgattccaaaagaagaaaattattttcttggcttttccaaagcacagttaaaggcgcttttgtgcaaatccgggggaacggacaaagactattttctgtcgcagtttgtaattttaacgctgcttgtggaattttatgacagccagggcagaagcagcaaagcaagggaatttttgcgcgtgggagatctgcagaacagtatcggtacttatttaaaaacgggagcggagaacagccgggaagagacagatacggagcggggcatggcgtttacggatatgtacgaagcatatgaagcattgcggtcggacgagaaagggtcgaaggcaaagacaacgaaggaaggatttctgcatcatttattaaagtttttggaaaaacagggcctgattgaatacgtggaagaagatgaaatgatacagacgacgaaaaagctggataattttatggactggaatctgctgaaccaaaatcattatctgcgggtaagacaggtgctgggattagaaaaagaggtaaatgtatga

SEQ ID NO: 52012 - DNA, 4491 bp, Eubacterium plexicaudatum ASF492
atgagtaagatcaatgcgatccgattgattaacctgaactataataacaatgccattcgcatcagtgacgagacttttcatatgaaaggagagagcacgctgctgtcgctgcgcaacggaggaggaaagtcggtgcttgtgcagatgatgaccgctccgtttgtgcataagcggtaccgtgatgcgaaggagcggccgtttgaaagttattttacaacggcaaagccgacttttattctggtagaatgggtactggatcatggtgcgggatatgtaatgaccggaatgatggtgcgccggcgccaggagatcggtccggatacaccggatacgaacgaagcgctggagatcatacagtttatcagtgagtatcgtacttcctgcccttatgatatgcaccatctgccggttgtggaaaaaggaaaaaaagaaatgtcgctgaaaaattttgcggcatgcagacagttgtttgacggatacaaaaaagatccgtcggtgaaatttttcagctatgatatgaacaacagcgcacagtccaggcagtattttgacaagctgatggaatatcagattcattataaagaatgggaaaccattatgaaaaaagtgaatctgaaagagtccggcctgtcggacttgtttgcagactgcagggatgaaaaaggactggtggaaaagtggctgctggatgcggttgcaagcaagctgaataaagaaaaggacaggataaaagaatttcagaatattttggaaaaatacgttggccagtataaagataacaagtccaaaatacagcgcagagatattatcaaccgcttttcacaggagtcgcaggggattcgggagacggcggagcaatacgaagccgcggaaaaagaactgcggctccagcaggagcagattggcatatttttgtggcagctgggagcggccaaaagtatggcgcaggcggaaagtacggcgattgcggacagaaaacgccagattttggcggatattgcacacttaaagtatcagcaggtttccaaagccgtctacgaagcgatggaagcggagcggttctgcagggcaaaccgggaaatgattcagctggaacgggatgagaaagaacaggaatatgagcagacaaaacggatgctgcatcttttagaatgtgccggacaccagcaggggctggaggagcaaaatgcggagtgcgtacggtatgagcagcagctggaaatactgaatcaaaaagaacgggattttggacaggagcgcgaacagctgggatatacgctgcggatgcattatgaagcggaatacgacaggcagcaggaacagacaaaggcatatggggaagagctgacgcagatacaggaaaagattgcggaggaagaggtgaaaacggaaacctgccgtgccaaagtgctggaacagagcatgcagatcggcagcgtacaggcgaagattcaggagtatgacgcaaaagaagagacgtataatcagaggtatgaaccgggatttgtccgaaatattctgggcgaatatgagcctgcggcactggaaatcaggctgcaggaatatgaaaaagaactggacggactcaaaaagagctatcagaaaatgcagaaggatgccgaggcaggcagctggcagcaaaaggaaaacgaacggaatctggaagatgccggacgcagaagaatgcaaaaagaacaggaactgaaacatgcacaggaagtgtgcgaacggtatgagcaggaactgcaggaacgtaaaaaaatgcttcgctattttggactggatcagactgtattatacgatttggaaaagattctgcatgcggcgcagcgcaaactttctgagattgaatgggccaagcggaacctggaaaaagaagaagacctgctccgcaaggaataccggcgtctgacgcagggacgggtattggagctgccggagacctttgaacggctgctggatgatctgggcatttcttatgtctacggaatggaatggctgaaaaagaaccgttataccgaagaacagaatcaaaagctagtccgcagctatccgtttctgccatatgcgctgctgctgtccggcagagacatggaaaagctaaaaggcgcagatgagaaaaaacaggaaacggaactgccatacacatcgtttccgattccgctgattgtaagggaacagctggaacaggagcaggacaggggcaaaaacccgattgtggatctggaacgtgtgagcttttatatgctgtttaacgaacacctcttaaacgaagaaaagttaaaacagatggcggcggaaaaagaacaggaaattgcctgcaaaaacgaacagatacaaatccgccgggaagaatacgaacaatattttgaacaaaaagaacgtctgcgcagccagacggtaacgaagccgttacaggaacaggcccagcagcagaagaatcagattgtgagtgaactggaagaactgtctcaaacgattgcaaaacaaagagaagaggcacagcagctgacggtaaggctgcaaaaactgcagcagcagatacaggaaaacgtcaggcagcaaagcgcgaaggagcgcagactggacgacttaaagcagctgcttctggcgtatcggtcttatttgcagcaaaagcagctgctggaaacgctgcagcatgatctggcaattacaaaagaaaaagaacggcttgcggaaagtacggcagccaaactgcacgaacgtgccagaaagcaggaaattgaactggagcacagcaggcgtattgcggaacggttatctgaaaaagcagccggttaccggcagtatgaacaggcagaacaggtagaaggcagagtggaagatctggaaaaccgctaccatgcgattacaagtcagatttccctgcgtcagcaggagattgagcggctgctgcaaagcgcacgcgaaaaagaacgaaaaatggagcgggagcttgtaagaaagcagaaaaaatacggactggccgacggggaatggaagcagacgacatacgatacaaaggcggaagaataccaggaacagcttttgaccgtacgggagcagcagtatgaactgaaaaaggcgcaatggaacgaagcagataaaaatgcggcgcttgcaagccagcatctggaacagcaaaaaaagcaaatgatggaaaaatgtgaccgtacacagccgcttccgaaagaggaaatacagccggtagactttgatgcggaagtggagaaaaaggattacaggcgcagggaactggaacaggccgaacaggaacagcaaaagcggatggactggtacgaggaacatctgaccgcacttgcggaatatatggaatttttgccggaagatgaagatcggctgtgggagtatctgaaacaggatgcggatatggaccaaaaggaacaggtgattgcaaaactgcaggatgccgtagagcacatgtcacgagaagaactgcgtcgtaaaaaagggacgctcatgcgcgattacaacggttatcaggaacagcgccagcagcgaaaagaacatctcaccgcactgctgaatcagatggtgcgcagagagatttttgcggaagatttttacagaaaaccaatcgaagcgatgctgtctctgaccgacgatgcgggacaggtgctgcgtcagctgcacacgacgctgcagtcctacgaaagcctgatggagaaaattcaggtggacatttccgtcgtagaagaagaaaagaaacggattgcggaattgctgcaggaatatgtgcatgaagtacatcaaaatcttggccgcattgaccagaattctacgatttccattcgggataaaaacgtaaaaatgcttaagattatgctgccggactgggaagaaaatgaaaaattgtaccggatcggtgtgtgggattttatggaggaaatgacaaataaaagtatcgaattgctggaaaataatgagaatgcactggaatatatcggaacacgtgtgacgacaaaaaatctgtacgatgttgtcgtcggtattgacaatgtccggatacgtctgcataaaatcgaagaacagcgtcagtatgagattacctggtcgcaggttgcacgtaattccggcggagaaggatttttatccgcatttattattttgtcaagcctgctgtattatatgcgtcgggatgcatcggatttatttgcggaccgcaacgagggaaaagtactgttaatggacaatccgtttgcacagacaaatgcttcgcatttattaaaaccactgatggatatggcaaaaaagacgaatacgcagctgatctgcctgtccggactgggcggagagtccatttataaccgatttgacaatatctatgtattaaatctgattgcggccggactgcgtaatggcatgcagtatgtcaaggcggagcatgcgcgcggagccgatgcggaggcgacgcttgagccgcaggtatctcagatagaggtacttggacagcaggaactgatattttaa

SEQ ID NO: 52013 - DNA, 1005 bp, Eubacterium plexicaudatum ASF492
atgaaacgaatttcgttgcatgaaatagagcaaaaactgcatgcggaaacttatgaacagctgtgtgcgtatctgtaccggcagatagagaacggctgtctgaaaccggtcaaagcttccggactgaatggtaaaaaaccggcattgtatcaggaataccgggttgttgacagcgacacggatacggattaccatcagtatgaagaagagctgaattatcaaatgagcacgcacatttctatagattattatctgcgccatttgccgcagtatgcggccgaccgggaatgggtgtgccggctcaatcagtatttttttgatacggaaggcaaagtcccggagccggtttcaaaaaatgaacgcagttttcagatctggggtcgggaaaaatttctgcagcaggaacagggaaagaaaatattaaaacgctgtggggttgaggcatcccggcttgcttattacgaaacttcggaaccgcttgcgtattacagcagccatcggcagacgccgcagaacctgctcattttggaaaataaagatacattttatagcatgcgccgtcatttgcttgatcagagcgaagatcataaaaaagagattttcgggatttcttttggaactctgatttatggcgccggaaaagggatcctgcgttcgtttcaggatttttctttttgtgtggaaccttatatgcaggcgaaagaaaaccgtatttattattttggggatctggattatgaagggatcgggatttatgaacgtctggcagaatcatttgaacgacaggaaataaaaatacgtccgtttaccgaagcctatgaaaaaatgctggaaaaagcacggatggtggagcgtcttgcgaagacaaaagaaaagcagaaccgaaacatatccggaacgttttttgcttatttttccggacagaccgttcaggcgatgaaacagcttctggagaaggaatattatattccgcaggaaatattaaatattacggattttgtataa

SEQ ID NO: 52014 - DNA, 1629 bp, Clostridium sp. ASF502
atgcagtatgaatttttaaaacattttccaaaaaggatgaaaaatgtgggcctgtacacggttctgattcagaacagcctgcagaaactgacctggaagcagtacggattccagaagacggacgagcagttcaacctgattttcgccgtaatgctctatattatggagcagtcgctgagggaggaaaactgcacgatggacgatatcggcgcctatatcgatgcggtcaacgtccagtatttcaaaaaagacatgtcctacgaggactgccgccggctcggagattttattgtcaatgtgatactctccaatgagggaagggtcatgcattttgacggctatgacttcgaagagaacgcatatcagagtatgcatatcagctacgtggcgaataaaatcgtctatcttgaccaggatttcaagcgcacctcttattaccttacggatgacgggtacaacctcttactgtcaaccctggaaattgagaataatatgaagctgaccatccatgagatgatctttcagatgcacctggaaaagcagagctatgacaaagcggcggacgagatcaagaacgtgttcaacctgctcagaatccagcttcagaagatccaggaggccatggggaagatccggagaaatgcgctgaattattcggttcgcgattacgagcagatcctccatgaaaatctggaaaccatcgacgacaccaagaaaaaattccaaaattatcgggagatggtcaaaagccgggtgcaggagctggaagagaccaacatcaacgtcaggcgtctcagccccaaggaggaagaaaagctgcagtttctgcgggagatcgagtggtatctgaaccgcaccattgacgagcaccagaagattctggggagccatttggatctgaaagcgctgtacacgagagagctggaagacctgacccggatgtcgctgatccggcgtttttccctgcggacagaattgtatgataagcttctggaacatccggccgctctggaagaactggaatatttcctgcgtccgctgttcaaccaggacgcggagaaagtgtacaacctgaacaaggcgttccagcttcagcgaccggtgcgcaggcaggcggaggaggatatagaggagcagattgattttgatgaggaagcctgggaacgtgaccaggaacggctccggcgggaaaagctgaaacgatacgaggagagcatgacctgcctgctggaacaggcggtacgggcggaaaaacgggagatcaccttggagcaggcggcggcgcagacccgggaggatgaggagatgcgcggccgtctgattcccaatgtggagatcttcaaggagatcatggtggagctgatcaaaaaccgggagatggagatcgacgtgctgaaaaaggagcggagccagttcatccaggaccggcagggggaatttcagatcaatgagatgctgctgcagattgtggaggagaatccggggcttggggatgtggagcggatctgcgtgagccgcctggaacacggcggggcggtgacatttccggggattctgaatgaacacggggaacggaaggatatccgctgttccaatgtgcggatcagtgtgtatttcaaagaaggctga

SEQ ID NO: 52015 - DNA, 717 bp, Clostridium sp. ASF502
atggcctatgaatttggagatatcaaaaccagccaggagatcttttactatctattggagcaccatgagctgcgggaggaggaggaacccctgctgtttaaggcgtactcggagcaggaggagatccagaacctggtcaaatcccagggggaggcggccaaaagcaccattgaacgttacggcaatgtgatctatctgattcccggggaggaaaatcattttctcggattttccaaagcgcagctaaaaaatgtgctctgcaaatccaatgccacagataaggattactatctgtcccagttcgcgatcctcaccctcctggtggaatttttcgacggccaggggagcagcagtaaggcccgggagtatatgcgggtgggagagctgcagaactgcatttcccgaaggctgaaggaaggcgcggaaaatgtcccggaagaccgggaggaacaggcggggatcgcattttccaacatgctggaggcgtatgaagcgctgaaatccgatgaaaaagggtcgcgtgcgagaactacgaaggagggcttcctccaccacatcctgacctttctgcagaagcagggactgattgaatatgtggagcaggacgagatgatcaaaaccacgaagaagctggataattttatggactggaacctgctgaaccagaacaattacaagcgggtgctgcgggttctcgggagtaccggggaagtatag

SEQ ID NO: 52016 - DNA, 4605 bp, Clostridium sp. ASF502
atgagcaaaatcaatgcagtccgtctgatcaatatcaactacaataacaacgcgatccgggtcagcgatgagacctttcacttcaacggcgagagtacgctgatctccctgcgcaacggcggaggaaaatccgtcctggttcagatgctgaccgccccttttgtccacagacggtaccgggacgccaaggaccgtccctttgaaagctatttcaccaccggcaagccttcgtttatcctggtggagtgggcgctggatcaaaacgcgggcttcgtgctgaccgggatgatggtgcggcgcagccaggacagcgacagcggggaagacctggagatggtcaactttatctgtgaataccgatcatcctgcattcaggacattcatcatcttccggtggtggaaaaaggaaaaaaagaaatggttctgaaaaatttttctgcgtgccgccagatgtttgaagagtacaagcgggaccgctccctgcattttttctattatgatatgaacaacggggcccagtccaggcagtatttcgacaagctgcaggagtaccagatccattacaaggagtgggagagcatcatcaagaaggtgaacctgaaggagtccggcctttccgagctgttttccgactgccgggacgagaaggggctggtggaaaaatggtttctggacgcggtggaaagcaagctgaataaagagcggaaccggatgaaggaatttcagagcattctggaaaaatacgtgggccagtataaggacaaccgttccaagatccagcgccgggatacgatccgcctgtttaagcaggaggcagaacagatccgggaaaagctggagctctaccgggaaggggaggtaaaagaggaggcccaggaaaatgtggtggctcatttcattgcggagctggaacgcctgcaggccgggacgaaggaagggcatgaggacattctggcgcagatggagcaggttcatgaggagattgcccgcgtcgaatatgaaaaactgtccggcgagatctacgagctggaagagcagatgcgttttcacctaagcaaccgagatatgatcaccgtagaaaaagaagccctggaacgggagacggaagggatcgtcaggcggcttcacctgctggcctgcgcgaaacagcagcgtcttgcggatgaagaaaaggctgagtgggacggggcgctgcaaaggctgagagtggctcaggagaaaagcgtgaacctggaaccggagcggaaccgtctggggtatgtgctgcgccgccattatgagagggaactggaagaaaccgggaaaaggcagcaggaaaacagccaggcagccgcagcggcggcagaggagatttccagggaaaaagagacgcaggcggcccgggaggagcagctcagggaacgggcttcggcggaaggggcgcttaaaacccgggttcagtcctatgaccgccgggaggagcagttcaacacccggtatgaggagcattttgtgcgcaatattctgggagaatatgagccgggagccctggagatctttcgggaatccctgggaaaccggacggaggagctgagccgggagcggctgaaaacgaagaaggcgctggaagcggccagggaaacccggcgcagtcaggagcggagactgacggatctgcgggagtcacagatccgcaggaaggcaaagcttgagcagcaggagcgcacccgggctgcctttgaggaagagttagagacccgcagggtgatcctgaaatatctggatctggaggagaaggatgtctttgacacggaaaaaattctccatgcctccgggagaaagcttctggagatttccaatctccggcggaacctggaaaaagaggaggatgttctgcagaaggaataccagcggctgacaaagggacaggtactggagctgccccaggagctggaggcagagctggccggactgggaatccatgtcgtgtacgggatggaatggctgaaaaagaacggatattctgaggaggagaaccaggagctggtccgctgccatccctttttgccttacggtctgattttgtcccggcaggagctggaaaagctgtcccggcacagaggaaatatctgcacatcctttccaatcccgatcatcctgcgggaacatctggaaaataaagagacgcaggaggaggggaatgtccgcagcttcggcggcatcagtttttatgtcctgttcaacgaaaagcttctggatgaggaaaagctgcgcgggctggttctggaaaaggaacagcagatcctgcggaagcaggaagccatccggattcgccaggaggaataccggcagtattttgaacgccaggagcaggtgaaaaaccagtcggtgaaccgggaaaattatgctgccaacggaaagcttctggaagaactggaggggcagatccgcagtacggatgaggacatccgggggatttctcaggaactggcggaactgaaagaccggatggaccgccaggagcaggatatccgcagggcagaccgggaactggaacggcagcagcggaaaacggaggatttcgaggaaatgcagggggcctatgaagagtacctgcattcccgccgggagcttgagctgtgcagaaaggaaatccgcaggctcaccgaacagcagaagctctccatggaaaagctggaaaagctgcaggaccgccaaaggtcgttggaggctgagagggatgcgctgctccgggaggaagaggaacagcaggatgcggtacggaagtaccggaggtatgaggaatatacggagctggcggagaaggaagccggggaggactggcggaagctgtgggaagacgcgggggattgggtgctgcagggcggcgggcaggaggaagccggccgtctgttagatggagagtcccgggagttggacggctgcccgcagcacggtgggcttcagaagccgtccgggcagacactgcagggaatgtctcaggaatcgtccggccgggggcgtctggagctgcggaaagtggtggcggacatggaagccaggtacgcggcggttacggccaccgtttccttggaaattcaggagctggaacgccaggagcagctcagcggcaggcgttacaaagaatcggatcaggaactgcggcatctgcagaaaaagttcgggctgtctgagacggcatggcaggatatccattacaatcggaaggaggaatctcatcaggaggtgcttctggaagaccgtcatctgaagatccagaccaagcaggccctttggaatgaggaggataagcggatcgccgtcatcacccagcagaagtcggacctgctgaaaaggatgcgcacggagtgcggcagggaggagccattgccgaaggcccagatccagaaccaggactttgagtcccggaaaaaccagttgaaatatcaggagaaggagcttgcgcacactgcggacaagctgcagaaccgcctttggagcctcaatgaaaacctgaccgccttggcggaatacagtgagtttgcgcggaaggagccggtagtctgggagcaggactttggggagatgaatgcccgggagctgcggaattttaaaggcattctcatccgggactataaccagtgcgtaaaatccaggcaggaggcgaaggagcagttggtccgcgtgctgaaccagatcgtgcgggacgaacatttccaggaggactattataagaaacctctggaggccatgctggagctggccgatgatgcaggacagacgcagcgccagctggagacgaccattcagtcttatgacagcctgatggaaaagctggaagtggatatctccgtggtggagaaggagaagcagaagatcgcggagctgctggaggactaccttcaggaggtacacagaaacatcggcaggatcgaccacaattccaccatcacgatccgcgggcgggccgtcaagatgctgaaaatccagcttcccgcctgggaggagaatgaaaacatgtaccgtatccgcctgcaggatttgattgacgagctgactcagaaaggaatcgggatctttgagcgaaatgaaaatgcccaggaatatttcggcacccgcatgaccactcggaacctgtacgacacggtagtcggcatcggtaacgtccagatccggctctacaagatcgaggcccagcgggaatacccgatcacctgggccgaggtggcgaaaaactcaggcggagagggatttttgtccgcgttcgtaatcctttccagcctgctctactatatgcgcagggatgagacggatattttcgcggaccgcaacgaagggaaggtgctccttatggacaacccctttgcccagaccaacgcgtcccatctgctcaagcccctcatggatgtggcgaagaaaaccaatacgcagcttatctgcctgaccgggctgggcggggacagcatctacaatcggtttgacaatatttatgtgctcaacctgatcgcggcaagcctgcgcagcggtatgcactacctccgggccaatcacctgcgggggaatgagccggagaccatggtggtgtcgcagattgaagtgatggagcagcaggagctggtgttttga

SEQ ID NO: 52017 - DNA, 1008 bp, Clostridium sp. ASF502
atgatgaactctaaagacagactgcccacgaagaggatcactctggaacaattgaccaggcgttgtgcaaatgagacctacgccgaacagtaccgctatgtctgcgggctgctggattccggccggatcaggccggtgaaggcatccggcaccaacggcaagcgcccggctctttaccgggaatactggctggcagaggaacagaaggactatgaagaactgcgggaagagctgacatatcagcttgtcccgcttctttccgtggactattatctgaatcatcccgcggcctacgagcaggatcgggagtgggttctgaagctgaacgcatatctgaaagaacaccggacgcttttggagcatcaggagtcggtcaatgagcgcagctttgagatctggaatcgggaaaaatttctctccagggagcagggaaaacggattttaaagcgctgtgggctggagctggatttcctgaatgtctacggtactgcggagcccctctcctattattcacacacaagggacgtgccccagaagctgctgatcctggaaaataaggataccttttacagtatgcgcagacatttgctggaagggaatgaaagcatcctgggggagcggatcggaaccctgatctacggcgcggggaaaggcatctggaaatcgtttcaggatttcgaactctgtgtggaaccctatatgaaggcagagggcaacgagatctgctatttcggcgatttggattatgaagggatcgggatctatgaaagcctggccggggcgtgccgggattcccgggagatcgtcccctttgtcccggcctatgaagccatgctggaaaaagccggacaggcagagcagcttccggagacgaaggagatgcagaaccggaacatcaggaacctgtttttttcttattttacacagcccgccgcagagacgatgcgccggattctggaagccggcaggtatatcccgcaggagattttaaacatttcggatttctga

SEQ ID NO: 52018 - DNA, 1530 bp, Anoxybacillus flavithermus NBRC 109594
atgggaattgcagcatatttggagggaatcagattggacaagttagcatggtcaggcattacagaaggttaccgtgaacgaataagaagactggcgctgtttagtccgcttttagaccttgaacggatgcgggcgactgatcgaagtgggcaacctattgatatgaaagggctcggactgttgacgctcctttttttctttgaacaaaaacttatgcggcaatacaaaacaggtgttaaacagcttgctttgtttttaaaacaattgactgagcacgtatatgtgctagatgatgagttgtgtgaacagctagcacggacgattgttcaaacatttcgtcctacatctgggaaaaagcgaagctatccattttacgattgggaacagcgtgaagaaagtgtggttgaatattcacttttaaaagcgcatgattttgacacgagaacgaatacacaatattacacgctcgatgaagatgggcttgagcttttatttgcgacgaaagagttttatagtgaatttcaattatctatcaaccaacttatgttgcgaaaacagctagaaaaaggagaatttgtggcagcgttgaaacaaattaacgaaatgcgcattgatgtcgaaacgttggaagaacggatgagccgtcttaaacatgaaattcagcgcagtattatttctgaagaaacgtttgagcgatataggcaacttttggacgatatttacagccgacttacacgtgaagatgaggagtttaaagaactgcgtgagtttgtcaacgacactagagagagattatatgctcgtgatgtgcatcaaaaagaagagaagacgtatgaacttgtgctgaaaattgctcgggaattagaatcagtgcactatgcccattccgcacttcttgacaaggcgctttcattgaaaaacacgacgcttgtgaccgctcaagaatcgctgtactatacgggacttcattcgtttaattttgaccaagatatcatgtcgtacatcgtctctgcgccacttccgattgaagcgatgaaaggagtgcttcatccgtttttaaaagtagaggaaaataaatattggtcgccaatgaccatttttgaagaacaaaatattatagaagagcgtgaagaaaagatacatccgcacttcttagaagcagacaatattgaatatgttgacccgtatcgtacatggctgaaaagccgatatcgattattgatgcaacatttgttagaggcatatcagttaggacgtgttgatacgctttcttcattttttgattacttagatgacattggtcagtcgtatttatatgaacatcgatcattttatgacttttggctttttatgcatcaacgttcgcctattcagaaagaaatggacagggaagagggagaagcattgtttggagaggcgattttattgctcggcacgtatgtacttgaggtagaagaaacgaaaactgtcatccaaaaatgtgaacggttttccattcaaaatatgataattgcggtgagggaacgatga

SEQ ID NO: 52019 - DNA, 720 bp, Anoxybacillus flavithermus NBRC 109594
atgcaagcttttcaattatatacgatacttgcaagacaaggagttgcagatgcgcaagcggtacagctttataaaagtgatgatgaaattcgcgcacttttagatgcgtttagtcgtaaagtcgactgtgttattgtgttgacgagcgagcaattgttttttataccacggacgaaattgtcaccatttcatgtaagtaacgattggattaagcgtcattatcttcgttcaggcgctacaaacagtgatttgtatttgctttattttgtatcgcttgtgctgtttggaagtttttacgattcgtatcacactcaagaaccaacgcgacaatttttggcaatggatgaatgggcgcggcttgtgcaagagcgtatcgatcaattgaagcgacatgatgcagaacagctaaaacaatgggaacaagagttttcttacaattggagtgtgattattgagaaatgggaggccatggatgatattaaagagacagcaaaaaggcaaagtggcgctacgatcagtcgtctgagtttccttgatacagcaagacgctttttaatcgatcaagagcttttagttgatatcggcaaccatgaagtcacattaacagaaaaagcaaaaacgattgtgcaacgctttttcatggatgttgaatataatcgcggaatttttgagtttatttacggatttgaaagggagaatgaagatgccagcgatcagtaa

SEQ ID NO: 52020 - DNA, 4413 bp, Anoxybacillus flavithermus NBRC 109594
atgccagcgatcagtaaaattcggctgacgaacgttgtttatgaagaaggtcgcaagcggtataacgatgaattgtttcggtttgatgggcataatggagccattttgcttgaaaacgggggtggaaaaacggtattcatccacactgtactgcaagcgattttgccgcacgttgatttagcggatcgaaaaataaaacaaacgcttcaattagaaaacgcgcccgcacatattgcaattgaatggttgttaaatgatgaaccgcgccgatatgttgtgacggctgtatcgctttttatgacaaacaacggattagactcgctccgttacgtatatgaatataacgcgaacgacccacatgggattgagggtattccatttgtacgcgaaggaagaagcggaaaacgcccagcggaacgaggtgaaatgcaagattattatcatgatatgaaagtaaagtcgatgttcgctcgcacgttttcaacaataaaagaatataaatcgtttctagaagagcaatatcatattatttcaagcgaatgggaaagtattgttaaaattaatagcacagagggtggtgttgagacgttttttgatgaatgtaaaacgacaaatcaactattcgatcgtctacttattccaattgttgaaagtgcaattgttgggcatgatgagaaacgatttgctgatttgtttgaaaagcaacttgcaagctttaagcattataaaaagctaaaagaaacgattgaagaaaacaaacgtattcagcaacaacttgagcaatatgttggtgtatatgaacagcttcatcagcaacagttattgtatgaacaagcgaagcaacatgctaaaggagtatggctcgagacgctcaaacaaaaacaagcgtgtgaaaacgagcaaaatgacaatgtgatgcaatgggaagaatggagaaacgctgagttggctcatcggaaaaagcgggcaacgtatcatattttattagagcagatgagactcaatgaatttaaacgagaatatgaacaggcgttagtgcaggaaaaagaaaaagaagaagaaatggtgcgtctggagcatgaatactattcgctccaacttgccaagtataagtcagcacgagaacaacatgtagaaatgttagcttatattgaacagcagatggcgaagttaaaagaagatgaaacgctcgctcattacgaggagcaattagaagtagctcgtcgttcactactcggtttgtttatggaacaactggaaaaaatcgaaaaagacgagcgaaatgtgcgctatgagctccgtcctattcaaaaacaagtagaacaatggaaaaaagacattgaagcacgtaagaaagaagagcaagagacacgcgaaaaacgagctggcattcaaaaagtcattcatgcaagagaaaaagatatggagcatttgaaacaacgcttattagcaaacccaacacaacaatctgttgaagaagaaatggaaaaatggatggaaagagaacaatggctagatgaagaactcgttcgtttgcgccaagaaataaagcaattgaaacaattggaacgggaagtagaagcgcataaagaggaacttgaaaagcaacgagccaataaacaggcagagtgtaaagcgttggaaaaacacattcaaatgatagagagtgaggaacaagcacttataaaaaagcttgcttctgttcggccacaatgggtagcgcttgatagcgtttatattcaagaagagacgattcaaatgaggctttatgaggaaatcgaaaaaagaataaaagagcgtgaaaaacttttagtgcaggaacgggttgcttcgcggtttgtcgatgcgtacggtggacaagacttgtttttcgccgatctatttttagcagaacaggtttcttcatggaaaagtcaatttcacttccttgctacaggtgtggagtatttgcagtcgcttgaggaagaagaacgagagaaaaagcaagagtttccgctttggccaatgacgcttattacaactgcgaaagcgaaagagcaactaatacaaaaagtgcgacaatgtaacgatcggatgcaatggccaattgtcgtgctgtctgtcgacgaggcatcgcgtgtggaaaatgaacatatatcgtatgagtgggttgcaccatactattggcaggaagtaatcgatccgacatcgttcgcgatttggaaaaaacgtatgtgtgataacgctgaacatataatgcaacgccgccaagagaaagaagcagagataaggatttggcaagatgtacaacaagcatggcacacgtttttagccacttacccatacgaaatcatcgaggcgcttcgtatggaacatgctgatcttttacgtagcatagaacaattagcgataacaatcgaaaaagaaaaaaaacgtataaacgaatgcagattgcatgttgaacgagatgagtcgcttgttagccaatacgaaggggagttaagtggttttcgcgataaaataaaagatgccacgacctatattcaatataaaaaagaagtgcaagaaggacaaaagcaaatacacatacttgatgagcagcttacatcgttgacaaaagaaatcgtgcgttttactcgttctctagaagatgcacatgcacaaagcatagagcttcaagaacgccttcggtcacttgacacagagcgacgttcaattgaacaacattacgattatcgttcgctccatcatctcatccctatttattcggggaaaagcgaggacgtcatccgcgaaaacattcgtgagttcgagctacgtattcgagggattaaaacatcatacggtgagtggaaagaaaagaaacaatcggctcaaagggagattgatcgccttactcatgagatcaataagttaaaaaagaaacaagttgatttagatgaaacaatggtattcccaagtgatggggagtatttacttgaacggcttgaggaacaaatggcatcggctcatgaatcgttgaaacatctgaagcgacaagtgcaagaagcgttaaaacgaaaagaacaacaaaaaggtgtcgtgaagacaaaagaggagcagtttcaggagcaatttccaaacgaagagaaatggtcattttcaaatgaactgagtgatgttgctgtgcaattggatgtggaacgagaaatgcttgtgaaacgaaaaacatttctcgaacaagaacgagagcgactcacgaaggagataagggatattgagcaagcagagcgatcgcttcacgtagcaaaagaaatgcatcattttcattccccagcaatcattgctttatcgttgaatgaagaagaagtcgcatcattcacgtacaatcgttgtcgtttcgttgagcacgtgatcgaacggttgaaagtgagtaagcaagcggttgaattagcaaaagaacgtgtagaacgagagaagcgatcatttaaagaattttgtcgtacatcaatccaagatgtaaaaatgcaacaaacagctataaacggcatcgagcataaagaaacgtacgaagacattatcgcttttaaaaaccatatgatgcaaagtgtggagcgagcaacgaattacgctaatgaacatattcgtcaaaaagatactgagttacaagcgtttattaaccatattcatacacatttgcgtacgttagttgaagagttaaggcaaataccgaacaaaacgagagtaaaagtcgaagaagaatggaagcgcattttcacatttgcgattccagattgggaagaagaagtcggtaaaatgcgtatccgcaactatattgaatggatgctgcaacaacttgaatctgaacgtttcctaaacgaacacggtcagcaagacgaggcaaaagtacgtaaagaaatcgaaatgtggcttcaatcgaagcaacttctacaagtggtaatgaacaacgaaggaatgaaagtaagttgtcgtaaagtaacgaacgacaataaagtgacgacgcgctcgtattcgtgggagcaaagcaacgtctggtctggcggtgaaaaatggagcaaaaacatgacgctctttttaggtattcttaactacgttgccgagaaaaagcagcatattcgtccgaaaatgaggcgacatcgcacggttattttggacaatccgtttggaaaagcatcaagcgatcatgtgttaagaccggtgttttttgtcgcagagcagctcggttttcaaatcattgcattgacggcgcatgcagaggggaagtttttgcgtgattatttcccaattatttatagttgccgacttcgttcgtcatctgattcgaacaagcaaattatgacgcaggaaaagtggattcaccacgcctattttcaagatcatgatccgaagtcacttgaacggttaggtgaaacagaacagttagagttgttttga

SEQ ID NO: 52021 - DNA, 1020 bp, Anoxybacillus flavithermus NBRC 109594
atgcaagaaaaaatcgaaaagcaattggcgttgttttcgaaacggacgatttcgcttgatgagttggaacgaattattcagccttttgtgcatacgtatgaagaatttgctgaaatggtgcttgcgttggaggcgaaagggacgattgaaatggtaaaagcaaaagggaggacgatacgaacaccgtcacttgcatttcaatatcgtatccataaacatcttttaacgaaagactatcatcgcgagttacaacgctatcaaaatcaacttcattcagccattcagcttgacgagtattatggaaaggaaccttctatatgggagcgggacaagccatttattttaaaaattgactcatacttacgaactcatgatctcccttgtgaagtaacggctgcgccggagcggagtatggagttagttggtgatgaaaaatggatcgatgaaggaggagggagagaagtactgaaacgcattggtctttttgaactccttcgtattattcccgtttccgaccctttaatgtttgcgatcaacccaacgaatgtgacaaggacatctcagcttcatctcattgttgaaaacaaaacgacgtatcaagcgcttttgcctgcgctttgtggcacggttttttctacgctcatttatggaagaggaaaaagcgtaattaatagcattgagcaattttcgatgcaatatccaatccaagcagatcatcgtttctactatttcggtgacattgatcgcgaaggtgtttccatttggtactcgctttcaaaaaaaatccctgtctcgcctgcactcccgttttatcgagcatgtttgcaaaaagagccaacgcgtggcaaagagtatcaagttgagcgagcggaagcacttccgtcgttcctgtcttattttgacctagatgaaaaatgccgactttctgaacttcttgtttctggtttatactatccacaagaaacattgaaaacatgggaattgcagcatatttggagggaatcagattggacaagttag

SEQ ID NO: 52022 - DNA, 1530 bp, Streptomyces fulvissimus DSM 40593
gtggttttcaaggatgcgacgcacacaggtgaagctgggtcggacgagggtctgttgcacgatgaggggttgatccgtcgggcgaaggcgctggcgtgcacggctcccttgcatgatctggatgcgaacaaaggcctactggaatgggcggacgccaaggcctaccagatggctgagattgccctgcacacgatcgaccaggtcgccatcgcgatggacttcgacaccggcgccagccggcggcatgtccttggcagggtccagcggttcgttgcccggcaggcgcccgagcggtcggatgaggagcacgcccgggttgcggggtgggttctggacagtctgatcaatgtcggtgacgtcgagcgggcgttccgccgttcctacggcgccgtggacgccgatggcgtctaccaggttctgtcgttccctttcaagctgatcgtggagcggcgcgacagtgccggcgtgctgtatctgcacgcctcgcacgaggcgttgaacgttctggtaggcgcgctggacacggatgtggagtccgcgcaggaggccgccgaggtcaagctggcgaacctgatcaggcgtggccggctcgccgacgcgaagcaggtggcggatcaggcgaggatccgcaccattcagtacggcgagttgatcaatgcgcagttggaagcaacccggcgcaacatcttgctggtggactggatggaggagttcccggcggtgctggatgaggcactggatcatgtcgaggagcgtgtgcgcgcagagcgggcgatcgccaggaacatggccgaggcccgggatgaggccgtcaacccggtgcgcaagcggcatgcagcggagcttgtcgacattgtggaggattgcacccgacgccatattcgcctgcaggaaaggctgttggaagcacggagtgagttccgtgcagagcaggaccgccagctgttctccctgagaccccgacgggcagctttcgatctgttcggacagctgctgcgtcccgctttggaactgccggtggcggatgcggccggggcggtggactgctttttcagcaggtcgactgggtcttctgttcaggatcttccgtatctagcgacgctgattcctgcgctgctgcggccggcgccggagccgtcccggttcgctgggcaggtggaggaaccggaggtggagctgcgggaggagacgacgcgtttcactaccgagcagtggaagatggccgaacggctcctgcacctgccgggggaggttcggtcgctgtcgagtctgttggaggaagcggctgggctcgatgaggacctgcccgcgctggtagcgctgctggcggtgcacgccttcagtcctgacgccggtgccgcacggcggcgcggccaggctcacgtccggctggcgatgcaggccggcatcgccctgaacagtgccggtttcgccggggacgacctgtggctgaccacagcacatctgccgtccgcatcaaacggcccagagcaggcagaccggtcgcaacggcagggggcgggacagtga

SEQ ID NO: 52023 - DNA, 4485 bp, Streptomyces fulvissimus DSM 40593
atgtatgaactgtcccgtgttcgcgtgtgctcggccggccccgcgggcgcccgattccaggatgtgatcctggacttctccggagcagggcagccggtcgctgccgtgcaggagaatctgttcgagacggctgctcacgtggtgcgcccgtcgccggcgagtgtggtgttcctggaaaacgggggcggcaagagtgttctgctgaagttgttgttctctgtggtactgccgggccgacgccaggtcaaggacgcacctgacccgcggctgttggaggatttcgtcctggcgcgggacgtctcccacattgctctggagtggatgcatgccactaccgggcggctgctggtcacggccaagacgctgtgctggaaggaccaggtcgtctcgacggtcgccgagaacctcatcgagcattggtacgcgttccacccctcccccaccctcgatctggacagccttcccatcgtcgaggacggcaagtaccggtctctgtcgtcctaccgggagtgcgtgaaagagctgggggctcaggaccagcggctgcaaatgagctggccgaagtcccaagaagagtggaccgacctgctggaccacctcgggctcgatcctgaactgtttcgctaccagcgcgccatgaacaaggacgagggtgaggccgttcatgcattcactctcgactccgacggaggcttcgtcgatttccttctcaaggctgtgtacgatcacaagagcctgaacgatctggcctccctggtatccacctacgcccacaaactcgccgggcgtaaagacttgctgctggagctctccttcgtggagcaggctctgacgctgctcgagccgcttatcgaagcagccggcgcggtgggaaaggcccgtgcccacacacaccggaccgcccaggacatggcgcacttcagtggccaggtccatgcacgtttgcgcgttgacgcagagcgcctggcgcatttgcagcggcaggaacagagccgctcggcggagttcacccatgcggccggcctcacgcgccgctgggctgcgacggcggcacgccagcggcacaagctggcggagttgcatttcgccaaggccatgtccgatgccgaagaagctgcgcgcgacagacaggcagcacaggacctggtcagggggtgggttgcggtcggcccggtagagcggcacctgaacaagtcggccgcagcccgggatttggccttgctggtgcagcagggggatctggctgccgagccggcgcttcaggcccggcagcgggccgccagagcactcgcccaaggtctgctggctctcaaggagcatgcggagaaggcgtcgggagccctgcaccgcgacatccgcgcgcgcaggaaggccgagaaggacagccggctggcgcgggaggaggcgctgaagagcgccgaccgagccgagactcgggctcgtgagctgctggagcagatccgttccgtgcgcaacgacgccgagagagccgtggtggacgggctggcgtcctccatcgacggcgtcccccgggccgcgagggaagccctgcaggcccttgagcacgccgcggacaagatcagcgctctggagcgggaggaggaaagcctcggtctccagcacgcggaggcgcagaagcttctgtccaccgccatcggcgatgaggccactgcgcgggggcgcagtgagcaggcgcagcacagtctggggactgcggtctcacgtgcctcggtgctcgaggccgaagccagggcagtggccttattggggtcggcggtgagcttggacgcggacgcgcaggtgctgctggagcgcttgggtgcggccatcacgcacacagagaagcaaagggtcacactgcaggtcgagcgggcccgtgatgagctggctcggctggcactgatggacggcccccggctgcctccgccccaggtcgtgagcgacgcctgccgactcctggtgcagtccgagccgcggatcgacgcctggcccggatgggagtacatcgcggagttccctgccgatcagcgcgaggagatgctcgttcgcgcaccgcatctgatcagtggagtactgctgaactcggccgacgatcaggaccgtgcccgggagattctcgaccgggcggcgccgacgggctactacgtcgccgtgagcgcagtcgcggccttgtggaaaccggagggaccggcagcgccgggggtgctgttcacgctgccgttcaacgccgcgctgtatgacgatgaggccgccgaggccgagcgcaagaccgtcgaagagcgctgggtgcgctccgagggacaactgcagcaactgcacgcagcccagcagcacgacgagaagctgcggcagaggatcgctcagtggcgggaggactatcccgttggtgccttggcagacctgcatgaggcgtgtgtgatcgctggcaaggctctgtccgcagccgaggacgtcactgccgggcatcgtctggtcgtggaaggtttcaccgagcgccgggaggagatccgtggggaactgcgggacaccaggaaggcacacgagcgtgggcaggagacgagccgccgcttgaccggcctctccaaacgcctggcgcacatgcccacgtggcgtgagcagatcaccgccgcccacgacgagcaacaggaacaccagcaacaggccaaagacgccgacgacaacgccgaggagcaccgccgggcgaccgaaacactggatgctgcgctgcaggagcagcgccgggccgccgacgaggccgcccggcaatgggccgagctacccggagcgcatgagatgcggttcgaaggcgaggctccgagcgacccggtgccagtgctacgggaggcttatgaaagggcccaggtcaacttcaaccacgccaatgtgccagaagagcttcgcaaccggctcgatcgggcggaagaggaggcacgagacgcggcagctgggtattcggcgacgccacaggcggaccgggcgactgcgcataagttgttgcggacgcctgaggcactggacgagcgcagccgctccgaggcactcgagctcgcacgtcagaccctttcggcggctgagaagaaagacacgcgggccgcggtggagcagggcaagtgcgacaacgccctgagcgggcggctcacggagctccgcggcctgaccgccgacggcaccgtgcccatgccagccggcgacactgcggacacgatcgacaggtgctcgcagtcggtgatggaagcggagaagcaggacgccacggcacaggaagccgaggcggctgctctcggcctgaagaccaccgccgccgaggagacttcgcgtgctcgggatgcggccaaggcattcgagcagctgacccagacgctggcggacacggtcggcgatgtggacgcagacccttaccccggtgatggcgacgccgcctggacgaactacctgcgcttgagcaatgacgccaagcgggccaaggaggagctgaatcgcagcgagaaagacctgcgcggagcggcggaactgatcaggcggcacgccgccaccgaccggtacgcacgcctgaccatccctgtgcggcagcagatcatcgagttgtccgtcgagcagaccgccgagcatgcggcagggtggctcgcggcactccagactcgccaaagaagcctgcacgacgacatcagcaaggtgaaccagcaccggcagaccatcgtcgaacacctgaaaggggaaagcgacaaggccctgtccttgctgcgctcagcccagaagctgtcccagcttccgcaaagcctcaaggactgggccgggcaggagttcatccacttcgccttccagccacagcccgacgaactgctcctgcctcgtctgggcgacctggcggaagaagcctctgcaggtcagacgagcgatggccgcaaggtcgcccgcgacgggatgtcgctgctgctgcgcgcggtccacaccgccgttcctaccgggttcaaagtccatgtgctcaagccggacagggtcgtgcgaacagagcgggtgcgggtatcgaaggtcaagaacgtcttctccggaggccagcagttgaccgcggcaatcctgctgtactgcacgatggcggcgcttcgcgccaaccagaggggccgacagaagtcacctcactccggcgtgttgttcctggacaatcccatcggccgagcaaacgccgactacctgctggacttgcaacgccaagtggcacaggcccatggagtgcagctcgtctacaccaccggcctgtacgacgagaaagcactgggccagttccccctgcttgtccggctgcgaaacgacgccgacctgcgcgccgcgcgcaagtatctcgtcgtcgacgaggtgttccgtccgtacctcgacgatctgccccccgaggacgggaccgggcggatcgacagtgccagaatcttccggcgtgagacatcaggcgccgccttcaggggagacgatggcactgcagcgtcgggagaatga

SEQ ID NO: 52024 - DNA, 1125 bp, Streptomyces fulvissimus DSM 40593
atggcactgcagcgtcgggagaatgatctggtcgtcgggctgcgggtatgggctgcggcccacggccgcagccgctacaaggcagcgctgatccctctcgaggacgtgtgggaggtcttccgccgtgtgccgaatcgcaacgtggacgatgctttcgagccggcggtcctggccgctctgctgaacacgctggaggcggctggtttgatcgagcaagtccagcggcgcacgccggagcgggtgtccttgccggtcaaggttcggcttctcgcacaggcagaacctcccgttgttccgcccatgcccatgtggcatccggacctgagctggctggcggcgtactggacctctgcgacggcgaagcagcggtcggcttacgcggccatcgaccggtggctcaagagtgggcccgacctgttccgcatccctctgcgggaacgagcgttggaaatcttcggaacgttcgggaacgaagcggacttccccatgccggagaagaccctcgacactctcacgtccgggcccctgttctccgatacggggcggctggatgaacttctgcacaccttcaggcctcccccgcctctgatcactgagacgtttactctggaggaggacgacagccactactgccgcgtcgggaccggcgacgtgctgttcgtcgtggagaactcgaccacgtggtggtccctggtggagagcctgcctgccggtcaccggctcggctacgtggcgtgggggctgggcggcacctttcgcgcatccatccgtgccatcaaggcaaagcacggcatcacccagatcaggtacttcggcgacctggacactagcggactacggatccccctgcgggcctccggcactgccctcgatctcggccttccaccggtacagccggcgaagcgcctctatcaagcattgcagtcgctgggaaggccccgccctgctgcagccaaggaagcctctgtgagcaccggaaccgccggcgaactggcccaatggcttcccgcgggatgccaggcggccggcagacaactgttgatggacgggcaccggctggcccaggaatgggtgagctaccggtacctgcagcgctcctcggactggcatgacgacgtgcgctga

SEQ ID NO: 52025 - DNA, 1515 bp, Caldisalinibacter kiritimatiensis
atgataatagacactaaagctttaactgaaaactatagggagagagtacagagattagctttatttgaccccttgtttgatctaaagagaaagaaaacaagagacaatagtggtaatattattgattatcatagtcttggacttttagccctgcttttcttttttgaaaatatgttaatgaggaataaaaagacaggggtaaaggagttagcagaatttttttatgaaattaatcaaggcgaaatagatttagacttagaaggctttgaaaaggctgcaagaacaatcattgaaacctttagacctccaggaggtaaacgtaactttagaaagttttataattgggagactagaaaagaagaaattgtacagtattcaatattgaaagcagaaaaatcagatataaaaaacaatacccagtattatacattggatgagcaaggattagagcttgtatttgcaacaaaggaatactttagtgaatttcagctttcaataaatcagttggtactaaggaagcagttagaaaagggtgaatttgttagtgctcttcgtcaaatagatgaaatggcaatagatgtacaaaatcttaaggatagaataataaaaataaagcatgaaatacaacggaatataatatccgatgatacatatgaaagatacaagaaaattatagaagatgtaaatctacgcttaaatcgtgaaaatgaagaatttaatgaattaagggcttttgtaagggatacaaaggagagacttgaatatgaagcaaatgaagaaaaggatagaaaagcctatcaactaattttagacattgataaagagctaggaatagtacatcatcagcataacaagttgcttcaggaaagtattatcttaaagacaagtgcattacaggcagctcaagaatctctatattatgtaggaatagattcctttaactttgaccaagaaataacaagtcgactaatatcttcaccattacccgttgaagcatctcgtagattaatcgaaccattcttatttatggaaaggtttgaaacatggtctcctttaacggtatttgcttctcaaagaattgaatcggaaacaaaagaacaaaattcttatgaatttttagaagtaagtgatgaaagttcaatagatgaacattgggatatattaaagaaaaactttagaacagtaatggaaatgattttagctattttaggtgatagaaaggaaataactcttaaagagatagttgaatatataaaagaaagtgaagaatacagaccgctattaaattaccgttttttctacgatttttggattatattacatcagtattctccattagttatagataagactgagaaagagggaagggacatatttgtcgaagtaaagaatcttctaaagggtaaattcaaaataataacagcaacagaagtagaaggcataatagaaggaagccaccgatttagtataggaaatataaaactagagttggaggaaaagaacaatgatgtataa

SEQ ID NO: 52026 - DNA, 753 bp, Caldisalinibacter kiritimatiensis
atgatgtataatcatgaagaagtcataaaagcatttaatttgtatacaaaattatctgttaatggctacggtgaaaaagatgagttgagattatatttagcagatgatgagataaggggacttgtggaccaatttgcaaaggaagtagactgtaccattattacagcaggagattatatatatcttataccgatctctatggattcaatttttcatgtatctaatgatactataaaacgaaaatacctaccatctaaagcagtaaatttagacatatacatgatgtatgtggctattatagtcctttttggagaattttatgatagctatcaaactattgaagcaacaagggattttatatccttagagaattggcttctaagtataaatgaaagggtacttgcattaaaggaatatgataaagaagaattaaaggaattagagaaggattatgaatacaattggatttcaatagtagaaaaatgggatgcaatggatgatcttaaagagaatgtaaagacccaagatgcaagaactaatagtagactaagctttttaaacactgtaaagaaatttttagaagaacaagggttaattaacgatataggaaatgatgaaatagaactgactgaaaaagctaagacgattatacaacggtattatatggaattagaatacaatagagggatattggaatttatgtatcagttggataaaagagaggaggaagacaaagatgccagccatatctaa

SEQ ID NO: 52027 - DNA, 1899 bp, Caldisalinibacter kiritimatiensis
atgccagccatatctaaaatacgatttacaaatgtgatatatgaaggaggacaaaaaagatataatgacgatatattttattttgatggacataatggagcaatattactagaaaatggtggaggaaaaacggtatttattcaaacggctatacaagctatacttccacattctgatttagcagaaagaaaaataaaagaaacattatcccttgaaggtaatgcagctcatatagctatagaatggataattaatgaaagacctagaaggtatttagttacggcagttactctttttattaataaaggtaaattgaattcttataagtatttatacgaatacgaaggaaatgatgaccactctttagaaaacattccttttactaaaagaactaaagacggaaaagctcgtccatctagtaaagaggaaatatatgaatattatcaatacatgaagcaaaaccatatgaatgcaaaactattcgaaacaataaagagctatcataaatatttagaagaaaattataaaataatatcttctgaatggaaaaatatagtgcttataaatagtgcagaaggtggagttgaggatttttttgatggatgtaagacaacaggtcaacttgtagataacttactaattccaactgttgaagaagcattagcaggcaaagggacaaaggattttgtagagacttttgaaaaacaaagggagagatttaaaaaacataagcaattaagagagagaattgaacaaagtagaattattgaaaaagaaatagatgattatgttttaacttattctaatttgcatgaagctgaagaagatttttcaaaaaagaaggaagaagctaaagcattattcaactatgcaatagcagaaaaaaacaaaatagagcataaaataaaagaaaatgaattagctaaaaacgaaacagaagaaaagatagaagaattaaatagaaaaaaagcatcctatgctcttgcgttattaaaagaagaactaatagattttgaaacaaggtacaaaaaagtcaaggaaagctataatcatataaaaggaatatatgaagaaaaacaaaaaagaaaattaaatctagaggtagcaagacttaaaaagaaaataaaagagagtcaagataaaatagaattttatcaaaaacagcttgaagaactagataaagacaatgacattttagatattcaacaaagactcgaaactaattcttcagaattaaaaggaatatttgaagaacaagaagacgaattacaaaaacaaaacagatatataaaaggacaaatagataggttaaaagaagagcttaaatatagcgagaaagaattaaaaaaatatcaggatttaagagaaaagttaaacaatgaaaagataacctttgatgcaataataaccgaaacaaaagagagaatggataatatatgtagacgggttttagataattacaaatatgaagacatagaagaagaatatatgaaatggaaaaaaagaatagaagaacttagcaaaaacttaaataatataactatggctgtaaatgtattgcaggaggaaaaaaacttaaaaacaagagaattacccgtactaagaaatgaactaaagagtttattaaggaaagaaagtaaaactagtagtatattagatagaatatcagaaaatcaagaagaattattattagaattaagagagtttacattagattgggagcgctatgattctttatatttaaagcaaaactctattactaatttctttgaaggtagaatagagaagttaagatttgaaaaagagaagctattaaatgaagaacgctatccaataggttttatacagaatataaagataatgaatattttacagccgacccacaactgcagaatttaa

SEQ ID NO: 52028 - DNA, 1014 bp, Caldisalinibacter kiritimatiensis
atggatgagaagattttatcttacttaaagacattaaaaaggcgaaaaactgtgactttaggagaattagaaaagctgttttcaggggataaagaatacgaagactttgctaaagagataaataagcttgtacagatggatatactcaaagaagtaaagaaacatggaaccaatcataaaataattcctttagctaatacctatcgcttaaataaatatgctttaaaaaaagtatttattgacgaaattcaaaatatgcagctaaaaattagtccacacatcaatctcaccgtctatttatccttaactgaaaaacaatgggaaaaagatttaccatatatagaaaagatagatgcatatttaaaggaaaagggattacccaaaagtacagctacatcacaagaacgatcatattatcttgtaggtgatgaaaaatggatagatgaaggtggaggtaaaaagttattagagaggttagagctttgggataaattaaaaataaacaatgtgccagaccctcttatgttagcagtaaacccacaaaatttttcatactcagtacatagacatttaatagttgaaaacaaagcaacttactatggattattagaagaactaaaaaatactcaattcacatctttaatctatggagctggctggaaaatagtatcaggtattgaggcactggaaaaacagctgggattagaggatagtgagcatattttatactattttggtgatttagactttgaaggaatatctatttggtatgcattaagcaataaaaagctagtaaagcttgctatagaattttatacatctcttttacaaaaggattattcaaaggggaaagaaaatcaagctaaaaataaagaagctttaaatgactttttagctttctttgataaagaagaccaagaaaaaattaaagacgtcttacaaaatggaggatattacccccaagaaggattaaataaagaagaattacgggaaatatggaggaaaatcctatga

SEQ ID NO: 52029 - DNA, 1626 bp, Clostridium pasteurianum BC1
atggatttaagctttttagatgtgcagcatattagaatgaaaaaaattggtgcctatgctttgctttttagaaatagtatagctaagggaacctggaaaaagtatggttttgaagagggatatgaacaagataatttaatattttcagttttgctttacataatggagcaatctctaaaggaagaaatatgtactattgatcatatagctgcttttattgatgaggttaacaatctacattttaaaaaggggattatctatgaagaatgcagggatttaggggaattcatagttaatacaattttatgtgacgaaggtaatgccatgtattttaaagcttataattttaaagagggacagtataaagatattaacataagttttattaaaaataaaatggaatatattgaaggggtaagaagggtgtcatactctctgacggaggacggatattcactgctgttatctaccttagaaatagaggaaaatttaaaaattactattcatgaaattgtatttaaaatgcatttagaaaaagcatcttatgataaggcagtagatgatattaaaaacatatttaatatgcttagaataagagttcaaagtatggaggatgccataagaaagataaaagaaaatccacttgcatattcgactgaagactataagtccatgatggaaggaaatatagacattttaaataatactaaaaaacagtttattattcatagagaaatggtaaatgaaaaaattaatgagtttattgagcatgatatacatattaaagaattaaataaagaggaggaagaaaatctcaataatttacgaataatagagaaatatttaagcagaaccattgatgaagatcaaagagtgctaaaaaaacattttaacttgaaggatgtttatgggaaagaacttgaaaatatttcgaaaatgtccttaattgaaagatttaattttaggaaagaagtctatgatagaatactagacgacccaaataaattagaggatattgatatatttttaagaccattatttaaaatgcagccagggaaattttataatataaataaagctttagaatatcaaaaggcaattagaaaagctgaaatagaagatgatgaggaaatttcctttgatgaaaaggaatttattgaagctgagactaagaaaaagttagaaaaattggaaaagtataaaggggtaatagaaatacttatagaactggcaattgggcgtaataaaatttctttaggagaaattaattctttaataaaggaaagcgaaacgctaaggattactttgataccaactgtagaaatattcagagaagtgattatcgaaatgctgaaaaatagaactatagatatagctgaaataagagaagaaagaaaaaattctgttgaatctggagaaatagaatttcagcttaataaaagtattttagaaattatagattctaataacagcttcaagaaaatagcaaagataaaggtcgaaaaaatattagatcatgaggatgttaaattagaaggcttaaaaaacgaaaatggagatataaaaaacttcatatgctcggatatttctattgaaataataaaatcaggaggcttaaggttataa

SEQ ID NO: 52030 - DNA, 708 bp, Clostridium pasteurianum BC1
atggcatatactactgaagaaattaagataagcaataaaatattttatcatttattaaagcatggtgaactgaaagaaggatcagaagagctttataaaagttattctgaaaatgaaaatgtaacggagcttgtcaaagaactgggagaagcttctgaatgttatgttaaaaaatatgggggagtagtatatcttataccaaaggaagacaatgattttataggatattcaaaaggtgagcttaaaaaaatattgtgtaaatctggagcaaatgataaggattattatttgtcacaatttgttatattaactcttttggtggagttctataattcccaaagtgtcaccagtaaatccagagagtacattaaagttggtgaatttttaaatattattactgacagattaaaggatggtattgaaagatcacataataatgaagaaagcggaattgcctatgagaatatacttgagaggtttgaagctttaaaaagcagtgaaaagaaaagtatgtccaagacaacaaaggaaggttttataaatacaattttagattttttggatagccaaggtttaatttactatattaaaggcgatgatatgattaaaacaactaaaaagctggacagttttatggattggaatcttttaaataaaaataattacaatagggtgctaaaagctttaggagaagagataaatgagtaa

SEQ ID NO: 52031 - DNA, 4386 bp, Clostridium pasteurianum BC1
atgagtaagataaataaaattaggtttgtaaatttaaattataattacaatactatgaaaatagatgatgaaaaattttatttagatggcgaaaatactatgcttaatttaagaaacggcggtggaaaatctgttcttgttcaaatgattatggctccctttgttaacagaagatatagaaacacaaaagacagagcctttgaaagttattttacatcgggagtacctacctatatattaatagaatggaagcttgatgatggagcaggttatttattaacaggtatgatggttagaaaaaaggaagctgcttctgatgaaaactctaaagaaagattagatattataaacttcgttcatgagtacagagaaaaaaatgaatatgatattaatagtatccctataattgaagaaaaaaatgacagaaaaatgataaagagctttgctaattgcaaaagtttgtttgaagctttgaaaaaagatagagagttaaagtttaattattatgatatgaataatcctgtaacgacaaaaaattactttaacaaattagaggaatataagattaattacagggaatgggaaactataattaagcagataaatattaaggaatcagggctttcagaactttttactaaagctaaggatagcaatggattagttaaagaatggtttctgccagctgtagaaaataaactaaaggttgatgatgatagaattgataattacaggcagctgctggacagttacattaagcagtatagacagaacaaagcaaatattgataagaaagcaaagcttgaattattcaatgagttgtctaaggatatacttatatgctgtgaggaatttatacttactgctgaaaaaagagaagagataaaaaattatatagcaaatgtaatagtatatttaagagaaaagcttgaagataaagaaaaggaagaagcagcattagaacaattaattgaaagccttaatgataaaattatagagctgcagtatgaagaagaatctataaaagtttataaaaagcaggaggaaatagatagcttagaagctgacataaaaaaacatcaggaattagtcaatgaaagtgagtttaggaaaaatagcttaataagagaaggtaatatattagagtgcgcaaaaatacataggcagtatcaagatacttcaaaagagcttttagagcaagaaactaaattagctaatttacataaaaagaatgaggataacgcaccgcatattattaatctaggctttactataagaggaattttgcaaaaggagctggacactgtaaaaaaacaaaagtcagataagcttcaattgaataaaaatttagaagaagaaaaagaaactattaataattccttgaagattaatagaaatgaaataaataatttaaatgagagaaaaggaagtctttcagctgaaatttcatcctttgataaattagaggaaggctttaacagaagctctggttttaatttatttagaaatattgaagcatattttgacgaggaaagattgcttagtattgataaagaaattaacgatgaaggcaatacgctggataaagaaagaaaaaatgtcagtgaaaaaatactgcaggatgaagaaaaattaaaaagtaaagaaagtgaaaaaatacgcaatttagaaaaaaactctgatgttaaaaataaattgaacaataaaaattcagaacttgaaaaggcagaagaggaaatagagagaagaaaggaaataattaagtttattgattttgaggaagataaggtttttgataatgaaagtataatcaatgcttttgacagaaaaatagatttgttaaaagaggatgaagtaaagctaaaaaagttatttgataatttaaatagtgagctgataaaacttaaaacaggtaaggttttagaactgtctaaggatattgaagaaaagcttagagaaaaagacatcagcataacttatggaatggaatggttaaagaaaaatgggtatcagttagaaaagaacgaaaagcttgtaaaggataatccttttattccatactccttaataatggattctaaagaaattgagcttctagaaaaagagcttttagatatatttacttcttctccaatatcaataattaatagaaaggatcttgagaaaagttttgctaatataaatgcaggtgtcgctcacttaaatggagttagcttttttatatcctttaataataagctgttaaatgaaagagagcttttaaagctgatagatgataaagctaaagaagcacaagcagtacaagcaaagataaatgaaaagagtgaaaatattgctttttacgaagaaaaaagaaacataataaaatattcagctttgaccttagaagtttacgaagggttaaaaaaagaaatcagcaatttaaaagtggaagcttctgaattaagagaaatagaaattgctttagaaaagagtatattaagcatcaaggatgaattaaaaaattgtaaagaaagagtacagcttttagagaaggatattcaaaaaagtattgataaagcaaaagcttttaaagaacttttagaagcctatgaaaagtataaaaagaataaaatttctttagaaagagtactggaaagcctaagtgtaataaataatcatatagataaagctgaaagcagaataagtgatattgaaaaagaaataaaagagtgtaacagcgcaattaatttttataataatgaagaggaaaaagcttcaaaggagcttgcagagtttaatatttataagtcaggaactttaattgaaaaggataaggaagatttaatatctgagtataatgctttgacaaaggatattacaagctcagaaaaggaattaagagattcaataaaaaagcttaatgaaaaatttgatgagatacatagcgagcttactttgaaggctgataaatatgaagtaaaagaagctgagtatattaatgaaacttttgatacgcagaaggagtttgaattaaaagatgaactccaaaaagaaaataaaaaatacaataatttaaaggatgaatacaataaatttgacaaagcacagggtatcgctgtaagtaaattagaagatttaaaggctaaacttaaagctaagtttaataaggatgagccgaaagctaagaatttattaatagataaggattttaaactggaaatagaaaaactgaaattagagattgttgaaactaatagtaaaaaggcagaagttaataaagttatagcaaaaattgaaaataatttaaccagcttgaatgagtttaatgatctaaatattacagataaagttgatgtaaacatagacttaaatgaattagacagctttgtaggaaaactaaaaagagacttaaataatgtaatagcacaagaaattgaaagagaaaaaaatcttacaaatttagtcgttgatgttgagataaaggatgaatttaaacaggaaagcctattcaaagagccaattcagacgctgaaaagtttaatcggaaaaccaagagagtttaaggaacagctgaatttagttattaattcctatggaatgattatggaaaagttaatggcagacattgaacttatagaaaaagaagagggcaaaatattagagagcatattagagtatataaaagatgttcatgagaatattgaaaagatagacgacaattcatccataactattggagcaaaaagattaaaaatgttaaatataagtgtatctgcttgggaagaaaataaagagctttataaggttagattaaaggaatatattgagagaataagagagcaaagcataaaagctttagagcagaatgaagacatagaagatattatcagcaataatatcaatataaataagttatatgatgaagttgttggaattggaacagtaaatattaaattatacaaaatagaagaggataagcaaagacagatttcctgggatgaagtttcaaaaaattcagggggagagggtttcctttccgcatttgtaatactatcaagcttattatcctatatgagaaaggatgatagtgatatctttagcagaaaggaaagcggaaaggtgcttataatggataatccttttgcacaaacaagttccgcgcatcttttaaaaccattagttgatattgctaaaaagagcaatactcagcttatatgcttaacaggactaggcggagattccatatacaacagatttgataatatatatgttttaaaccttatatcctctaagcttaaaagcggcgttaaatatttaaagagtgaacatacaaaaggtgaggaagaaaaggaagaaattgtagcatcaagatttaaaatagaagaacaaattaaattgttttaa

SEQ ID NO: 52032 - DNA, 1596 bp, Bacillus cereus VD140
ttgagtacgaacattgaagccatgctagaaggttttaatgagcgaatgaagcatatagcgatgttttcacccatcctacgattagaacaaccagtgaagtttaaagaattgcctatccctacggttgctctctatatacttctttatatgctcgaaaacaaactagcatttaataaaaacacgacaaaagaagaattacaatatgtcattttagaagtggtccgacaatattggaacaaggattttactaaagcagaagcagatgagctcgaagattggttggtttccaaaaatcttcgaaacagagggaaagctcacacatttacgtattatgatttcgataaaagagaagaaaaaacttattattttcatctaattgaatatggagaaggaacgaacgtttttagtgatgcagaagatagcttagacgatttcacactaacttcaatgggattggagctactattcaaaacgaaagaagtatttggagaacttcgaatcactatttcccaattattcttcaaacgacaatttgaaaagggacttttcaccgatgctttaaggagagttcacgaaatgcatactttgatagaagatgaaaaaaagaagataaaaaaattacaaaacactattaccaaagatgctcttggtgtttctcaacgttctgaacttgaagctatgataaaaagaatcgatgaaaccttaaaggcagaaagagaacaatttgatgatttgaaaaaattggtagaagaaaaaattgatgaattctatgaaggtagtctaacagaaaaagaacaagaaggaatccatataatccaagaaattgaaggaaaattacttcaagcaattagtgtacatgaatccttatttactgaaaaacaaaaaacacaaaatattatgagtgaatcacttgaatcttccattattcacgcgttttcagttcatttagattttgaacaagaaatactaagagaactagtagaaacccctgctacagaagaagtattaaatgctatttctaaaccatttctacctttgaggcatcataaatcgtttaatccgctacttgcattagctcctcaaaagagatacaagaaaaaacaactaaaagaagaagaaattgttgaagtagatgaagaaaaaatgaggttgcaagaggaagaagaagctaggaaaaaagaggaaattgaaaacaaagaatatcgatatataacggccttattaaaacacttgattgagaaggacgagtatctattaagtgatattttccaaatgattgaaactcaagatgaacgcatttatgaggatattctatacaatccagatccactgctcggattaattgcagaactacatcagtccgaatacaatcgttttgaaaaagtgacttcagatgtgtggaaaaacctcccggatgataaaaagattaatagaatgttaataagactatcaagtgaattttcaacattacaagagatagaatcctttagcttattagaaacagatagatctcactatatcggaactatgaaatacaaggatatgttaattacaaggggtgacttttatggagtggacagaagaaatcgtaagtaa

SEQ ID NO: 52033 - DNA, 753 bp, Bacillus cereus VD140
atggagtggacagaagaaatcgtaagtaaagggtttgccttgtatgtggcccttagtaaaaaagggtttattacaagcaaagaagatgaatattttcaatggtatgaggaaagggctgtgcaagattttattcggaaaataattgaacctagagggaaagtcataatctttctggatgaacaagatggcgttattcaaatggtgccggaggtcgagaatgaaacgatgtcttatacgaatgatgatttaaagaaagaattaggctttaaggacaataaggaaattcatctattctactttattttgttcatcttaatagtagagttagaacaaccatatgatacagagtctgctgatcggatgtatctcccgatggaagaactattggataacatgaatggatacatcggacaatatgaacgactgggcgaagagaaattagaagaattaagtgatgaatatgatgtggacgtggccgggattgtagaagcttggggaagaatggctgattttaaagaaggtgctacaagccatattcgaacaaaagataatcgacggatgtatatcgaaaaaacattgaaatttttagaaaaagaaaagcttatcagaataagagaacataccaatgtttctgtcaccaacaaaatgaaaaatattattagtcattattatcataatgtcgagaacaagagcaaaattcatgatctattgctggtaacaaaagaaggaaccgtgggagaagaggaggaatga

SEQ ID NO: 52034 - DNA, 4374 bp, Bacillus cereus VD140
atgccacgattaatgaaagtgagaatgactaatatccaattagatgaagggaagaagatcatctcaaacagcttgtgggaaccaaacgccaaagatgccttatttattttagaaaacggcggaggaaaaacgagttttatccaactagttactcaaaccgttcgtcctaattccaatttaagtaaacgtttattaaaagaagtggtgtataaaggtacaactggtcatattatgacggaatggaaactagatggagaaaaccttccgtatgaatacttatgtttagggtttacttatatgaatggggaaacaaaaacagaagaattaaattacttcacatatctgtttacttataacagaggggacacattaaatatcaatacccttcctaccacagtagatgggaaagtaacaagactaaatgaataccgcaagtttttaagacaaaatgatattcgtatatttgatgtcaatcgtgattataaaaaggaattaaaacgattccaccttattgaagatgaatggaagatgatacaaaagattaatggagatgaaggtggagtagataattacttcaaaactgcatccagcacgtatgacttattagtgaaacttcttatcccagaagtcgaaaataccatatttgacagcgaagaaaagaaaaaggaaatccaaacgtactttaaagaatacagtaagaatttattaagtattcccgatatgaaaagagacttggatgatttccaaaggataaaaaattgtgctgaagacatggtaaaagcggtagaagactttcaagtaaaaaagaaatcttttgcggaagcacaaaagcatgtagttacgctaaagaaaagcattgaacttcaaattgctgataaggaagaaaaaatcgatatcttaatgggggatattaagaaaaatcaatcattaatgcatgaagcgggttggaagattgatagctataaggctcatattttaaaaggacagatcgaagcaaaagaaatagagctagctgctgttgaaaatgaacttaaaatgaaaacagaacaactaaaacaagcaaaagcattactacaacaattggaagcaaaaaaagaatatggagattatctagatattcataaaaaagtactgcagctaaatgaagatatatctgctttaacagcaagtgagccagaattagaaaagagaagaaatgaatctaaaacgctcttaacagaggcgttaaattttctcatagaagaacaacaatttgctttggaggatattaacaccgacatcaaatttacagtagaagaaattaatcttaaagacgcagaaagaaaacgattagagaaggagaaactagatttatatggcgagtacaaggatgcagaaaatcatttaaataattaccaagaaggtaaacaaaaactgatagatgaattaggagaagaagccggatatcatccatctgtcacgttcaaatcactaaatgaacaacaacaacaatcttcagtgactattatccaaaaagaagagaaaagtcaattaaacgaacaggaaatggatgaaaagcgcgagtttgtaacaagtcaaagaattgttatgcaaaacaaaaataatgaaattacttcgttaaaggccgaacataccacatttgaaaaggagaaacataacttactttcacttcttttagacgatgggaagaatacgataaacatatttgaagatatgcaggagtttcttcggtattatcaatattcaaaagtggaagcggaacaaaaaacagatgaacttaaacagtatattcataatttaactaagaaaattaacctttgggaatcgtacgatttctttgttcctgatgaaactttattaaaggttcaacaacatctagaacaaaaaggtgttattactatgttaggtagtgaatggctatcggaactttctagtgaagaaatgaaaaatcagtaccttaattcctatccattgctgccttatacgttattggttgaagaagcaaacttaactgaagtcaaaaaatccttgaatagcttgaataaagaactgttaaacgtaccgttattgttttatgtaaagagtaaacttcaaattcaaacaaaatcagtagatgcaaaaatagatgaacttttccctctatatgatgagttatatctctatcatcagttagatgttcagtggttcgcatctagagctaaaatccaagaaattattgatggattaaaaatggagcttgctcaatataaagaacaattaacttttgcacaaacaacttccaataattacaatgaaatattaactgcattagaaacattccatactcgttattctagtacattcccggactccaacatgcaagctgtccagaaattatcggaagatataaaagaggttcaccaacaaataaataatgccaatgagcatattaagatgttagaaaatgataacaaattaattagtgaatttatctcagatgaaaaagtaaaaatagccaaaagagattctcatataaagcgccttcaaagttttatggacctttacccaaaccctgaagagttagttgaaaaagtaaaaaatttaaaagagaaatatgaccaatacgggacaaaagttaatctgtgtgaagaggaagtaatagagcaacgtgaagcattagatagacagaaagataagaaacgaaacattcaatctgttatggatggattagataaagaaagaaaacaccaccgattggacgagaagctggaaccgtctgatagttacaccagtgaagaaaagaatgtgtatgtagcccgttttactgcagtacaaaaagaatacgctgacaaagatcaaacgaaaaattttcttgaagaaagtctttcagataaaaaaaatgaacttttaaaatctgaaaaacgaatcaataatatcggatttgctctagaagaagttaaaatgttctactctgaagaaattaatctagaagagttaattacaaaacaaaaagagacagtcaaaacactttctatttccgcaaaggatatagaggttgaaaaaggaaaagtagaagaaaatctaaaagggaaaaccgaacaattagtattagttaagaaggagattgatgacgagtacggaaaagaagtattcctttataaatggcagcatgaagaggaacttaaccgtttcaagcagttaaaggaacaattgggtgaagctaataacgaacttgtaactaagaaggaatcgttaggaaattctataacagatgctgaaaaagcaatggtacatttgcaaattaaaaatctccccctatacaatgaaagattcggtttaatacttgaagaagaaattatttcaaagtcaaaaacatatcaaaaatatgcacaaactcatgctaatgagcacttaacaaagttgcaaaagttagaggagagcaaaaaaggtgtatacctatcatttgaaacgtatttaaagaagattcaagaatctaataatccaaagactgaacaatttgcgaatggtttgtcaaaattgaaaacaagtgatcaaatatttgagttagagtttattttagaatcgtttaatcgcgtctttgacaccattaatgcctttgaagaagatttaaagcgaaagataatagaatgtgaaaaggataaggtaaaactggtagacttatgttttcagcgagtagaggctatttataagaacgtaactgaaatcccgaaattctccaaagtgaaagtatttgattatgaattgcaattgattaaaatgagatgggaccgttttaatgacgaaaccacttatggtaatttacattaccatgtccagacaattctggaaaccttacaacgaatgaagcgagagaacaaactagaaaatgaattgaatgaatacctagtacaaaaacttgatacagtggtattattagataaaattgctcctatcaagaagtgtttggttagtatatataaaccacgaaaaaaatcacttatgacaacccatccagaaaactggaaatcttgggatgaagtttctaaatggtctggtggagaagaattcagttcctatatgtccatgtttatgatacttgtaacgtatttgcgtaaaaaggttaatgccagagacgattcttggaaagtcattattgcagataatccttttggtaaagcatcatcagaacacgtagtaaaaccaataatggaactagctagaaatagtaaaatacaactgttttgtctaacagctcataacaatgaagacattcgttctcattttgaatgtgtcatgagtaatcgttactacaatacagtaggtattgaactacttcaagtggaacatagggaaaaaggggtttcccttggaatgtttgcttatgagcatgattaa

SEQ ID NO: 52035 - DNA, 1077 bp, Bacillus cereus VD140
atgagaaaatgggaaacgtttatcatagattatatgaataaatctagaaaaacccttgtgaaaacgatagatattgaactgcatcttaaaacattacttaaacaagaatatgatgacgatggtggatattttagattttctactacgttgaagaaaatggtagaagaagagaggattcgaccagtaaaagcaagagggcataatcatcagattccacctgtatttaatgtatatagattagtaaaacaagaaagaataacgaatcccactcacattaaaaagttaatgaccgattatccattgttcaatatgactgctttttatgatgaagcagaatttgaaaaatggaagttttatatagatcgagttcatgcttttcttacacacaacagtgataccaaaaaggatatgttaaaagcaaatgaacgttcctttgaactatttagaaatgaaaagtttcttttagataaagaaggaataaagtttttagctaatttaggactcactctatcggatttaaactgtcgaagaacttatgaaccttttgtagaataccaattagatccctccagaaagccaaaaaccattttaattattgaaaatagagatacctttgattccgtaaaagagttaatgatggatggtattaacacatggagcggaattacctttgatatggtgatatacggggaaggggataagatacaaagaagcttctatttcttagaagaatacaagctagaagattacgaagtctattactttggggatttagatgcaagagggattcatatttgttccgaattaattaaaatagataatagagtaaaaccatttactcctttttatatagaacttttaaatcgttatggttatgagccttcagcgagaaccatcgaaagaaaattgaaacaaactattattgacgattcattaaaattattttcagctttttttgaagatgattatattgatgaactcaaaaaatacaccaaaattattcagaatgttcaaatatatattccgcaagaaggattgaatttagcgattctccgtaaattaggggaaaggaggtag

SEQ ID NO: 52036 - DNA, 1410 bp, Bacillus nealsonii AAU1
ttggaaaaaatggatcaatccttaatttctatttttaacatggatatggagaaaccagagctactccaaacaatgcgggatatggctgctttagctggtgtattgaatgaattaagtgataaagaatcatttcaggccccaaagaatgtattacgctttatacgcatacttaatctcattaatcaggaagcacttgggatcactgatcgaattgaaaatgaggacacactcttttaccggtatcgtcacatatatggatacgatgaagagatgactattgaatatgtgaagcacttaatctatatattagggaaatttaattggataacgaagacagcaaagcgcattaagatgcgcgatttaggaaaaagaatgatggatgtattaattcgattggcaaatgattcactagcttattatatgaatgacgaagttgccagatccttgtttcaagcaaaaagagatgcagaaattagtgaagcttatgatgacaaaggtatttctggaggaaataaattagctagtatgatcaaaaatgttgaagaagccattttattattaatagaaagagagctagaatatttagctgatcgaaatgcgttatcccaagtagaagtaattcatcaactgatgacagaattggaaatgaaaatggtggaacgtctagctaaatttgagacattggatcaggaattagtatttgcatctatcaaacagagaggtatgacagctataagtgaaggaaccaagattagccttgggaccattaataaaatcctgaagtttgcacatatacaagagactaattttattgaaacgatacaaccagatttactaagaaattttatcgtgcaatcttttgatccgccgattggctcagatattccaaatgctcatcaaattcttagttttatggaacagggacagtatgaggacgaaaatatggagggtctttgggtaccgattaaattcgctagtccattatcttcgacagctatttttgaaggtatagactatattgagaattatgaacctattacagatgaaattgaagaaaagatggatgcagattttcaagagattgaagaaatcatggaggagaagttagaagaagtaatgggtgattcaaaatggcaaatgacgaagcaaatgattcataccgagcatattgaaaaatacctggatggggtagaagaagctggattagatgagttagtaatacatgctgggtctgaaaaatggagtgacgtattaaatggtttaatcggagtatctgcactggtggcaaataaaaaggcagatattgatgaaaaagcaaaccgaaaattactagggaatatggaaaaaagagattggaggtggacagatgatgaacaaggaagctatggaattagaaaacgaggcaaatga

SEQ ID NO: 52037 - DNA, 708 bp, Bacillus nealsonii AAU1
atgaacaaggaagctatggaattagaaaacgaggcaaatgaatctattaacaataatcccttgtatgcattacagtctctacaaggatttttgactaaagaagaagagcttacttttatgcaaattttattttcctcttctgctacgattcgacaggggaacttcggtctttctcgcaaagaggtggagaaattacttggggcaaatgatgaagaagcgtttttttcttttttaaagcgagttaatcaagcagttagtcggtatttcaaaattgtttatgatgaacgaagaaatcaggtagtggtgttgatgcgtgttcctgcaaaacaagcaagaaatgtgttaaataaagagagtttggctattcttatgtttattttttatcatcaagaagtgcttcaaaatgaatacacattattttctcaattgatcaatagcttcggtcatgagtccttacaggtaacaagaaaaattcaagctaatttagatcccttaaaaaaaatcggtgcaatcgaaatttataataccaactcggatgaagaggcttaccaattaacaactattggtgcccatcttttttctgattcatttttacgaagatatgcagagttcagtcaatctaatcagcttcatatggaggatgttcttcgattctttaaacgttacaacatgaatggaggtttactaaatgataccttggaggattag

SEQ ID NO: 52038 - DNA, 1278 bp, Bacillus nealsonii AAU1
ttgataaataatgtatggaaagattatttatataaatatattttattgaaaaacgaggagcttaatttactggacattagagaaaataatggaattttagatattcctgtgataaaaaagactactcgaactagaaggactgttgcgattttgacggtgggaattaataatcaaattatcccacctgaacatttggtgaatgtgtttgcaagcccaaaggttaagaaacagtttgtccttacagatgaaatttatgaatttattcgtaatgcatggattattagagagtatcgcttggcaaaagacgaacgaactgtgaaaagtgaacagtttcgcatgggattgtctttatttcaatataaaaaacaaatggaggatgaacaagaaacaatgagaactgaatccattgtcgaatgggaaaatcaatggattaaaataaagaattcttcttccgcacctaatcttgaacggatagaaaagcttaatagattaaaagatatattagatgaaatcgtagtggcaaataaaattaacagtattaattctaattggagatttcaaaaaaaacttttatttttacactttttagtagctttttatcaaatttcaatggttgagcatcattttgattggaagcaaattggagcaaggtattataggaaaataggaggttctaaggaatttgattcatataaaaaagaatttattgaggttgccgaagagttacttgagtatccattacatttacttggactaagtagtttaggtacaattactcccatctattttactggaccaatgcaaggtgatagtgcttcttataattatggagcaattcatgcaactactgatttagctgtttttaccgaggagtttaaaacggaagccgaggtattgtggttagttgaaaatagagcgattgtaacacggatgggttatgaaagggactttttaatagattcaaacagttttatattaggaattgatggccagttaaggtctgcacatcgacgattaattgaacagcttgcttctactgttaaacaagtgattatttggacagatgttgatgaagcaggactcttcattgctaaagatgtaggggaaacggtacgaaaatatcaggtaataactaaatggattgttccgccattagaagtagtactaaatattgaagagtttcaatcacggtatgaaagagcaatagaggttaagaaagaagaacaggagcaggagattggaggagtaatactttggaaaaaatggatcaatccttaa

SEQ ID NO: 52039 - DNA, 1635 bp, Lachnospiraceae bacterium A4
atgcagtatgaatttttaaagcagttttccaaaagaatgaagcatgtcggcatgtacgcactccttctgcaaaacagcatggcaaaacagacgtggaagcaatacggatttatgaaggcggacgaacagattaatgtgatttttgcggttatgctgtatattatggagcagtccctgcgggaagtgcactgcacgatggacgatataggggcgtacattgataccctcaatgccagttattttcagaaaagcatgtcctatgacgactgcaagaagcttggggattttgtggtgaacgtgattctgtccaacgagggcagagcgatgtactttgaggggtatgatttcgacagcaggatatacaaatccatgaatatcagctatattgcaaatcgtgtcgtctatgtggaggagggggtcaggcgcaccacctatcatttgacggaggacggctataatctgatgctgtccacgcttgaaatcgagaacaatatgaagctcacaatccatgagatgatctttaagatgcatctggaaaagcagagctatgacaaagcagttgacgaagtcaagaacatatttaattatatgcggatacagcttcagaaaatagaggaggcaatgctgcgcgtgcggcgcaatgcgctgagttattcagttgcagactatgaggcgctgatgctggaaaatatggaaaccatcggtgacacgaaggaaaagtttacaggataccgcgagatggtccggctcagggcatctgagctcgaacagcagaatatcaatgtgcgcaagctagatgccaaggaggaggaaaaactggaaaacctgcgcagtattgaacgctatctgaaccgctcgctcgacgagcaccagaagattttaaacctgcattttgatttgaaattactgtatgacagggaattgcagtcacttgcccagatgtcgctgattcagcggttctccattcggacagaactctatgacaagctcttagagcagccgcagtatttggaaaatattgatctttttttcagaccgctgtttcaccagcagcttcccaaaatctacaatctaaacaaatgtatggagctgcagcgccctgttaggaaaaaggcggaggaggacaccgcagagcttcttgactttgacgagagacagtggcaggaggagttggaacgcaaaaagaaaaagagactccagcaatatgagaacagtctggcattcattatagatgcagcactcgacaaaggcagcctgtccatgagcgaactaaaagggctgttggaacaaaatcgggcggcgcaggaaatctgcattccatctattgatgtgttcaaggagattatggtggaactgatgaaaaaccgtgaaatctgcatcgagacactgcgaaaagaaaaaagtgagtttattaccgaacaggcaaacgattttcaattaaatgacatgctgctctcactgacagagaaacacgcaggaaatggcaaagacaggagtgtaattcagaaaatctgcacagagcgcatgcacgatggaacggtggtcgcgtttgagcgcgtgccggacgcttctggaaacgaacggacaatccggtgtacaaatgttgtgatccgcattgagcagaagaaactatag

SEQ ID NO: 52040 - DNA, 729 bp, Lachnospiraceae bacterium A4
atggcatacgaaatagaagaaatacgcctcagccagcagatattttattaccttcttgagcactttgagctgcgggaggaggcatcaaccgggctttacagggcatatgtggaaaatgagcaggtgcagcttctggtcaagagtcagggagaggaggcgcgcagcagcattgagcggtacggcgacgtgatttatctgattccaaaagaggagaatgttttcttgggcttttcgaaggcaaaattaaaggaaatactctgtaaatcgggcggtacagacaaggatttttatctgtcgcagtttgtgattctgacactgctgtcagaattttacgacggtcagggcgcaagtgccaagtccagagattatattcgtgtaggagagctgcaaaactgcgtgacggatcgtctcaaaaatggtgttgagaacacctccgacgaggaggaggaaaagaaggggctggctttccgcaatatgcaggaggcatatgagtcgctcaaatccgatgagcgcggctcgcgggcacgcacgacaaaggagggatttcttcaccatatttttgtgtttctcgagaatcagggcttaatagaatatgttcaggaggacgagatgctcaagacaacaaagaagctcgacaacctgatggactggaaactgctgaatcaaaataattaccagagactctgtaaaatattatcgggagacagccagggaggcggcgatgagtaa

SEQ ID NO: 52041 - DNA, 4434 bp, Lachnospiraceae bacterium A4
atgagtaaaataaacgcagtgagattgattaatctgaactataacaacaatactatgcgcgtcagcgacgacatcttccagatgcaggggcgcagtacgctgatgtcattgcagaacgggggcggcaagtctgtgctggtgcagatgatgaccgccccgtttgtacacaggcggttctgggacgcgaaggacagaccgtttgagagctactttacgaccagcaaaccgacttttatcatggtggagtggcagctggaccgcggcgcgggctactgtctggcgggcatgatggtgcgcagaagccagctttcagaggaggacgaggacaaccgtcttgagatggtcaatttcatctgtgagtacagcggcagatgtgcgcaggatctttaccatatgcccgtggttgagaaaaagaataaagagcttgtcttaaaaagctaccgcgagtgcagacagctttttgagacctacaagaaagaccacgcacttaaatttttctgttatgacatgaacaacagcgcccagtacagacagtattttgagaagcttgcagagtaccagatctattacagggagtgggaaaatattattcgaaagattaatctggaggaatcggggctctctaagcttttttcggactgccgcgatgaaaaaggactcatagaaaagtggtttctggatgtggtggagagcaaactcaacaaagaaaaagaccgcatgaaggaatttcagagcatcatagagaaatacatcatttcttacaaggcaaaccagtcgaagatcgagcgcagaaataccattcgccagtttaaggaggacgcggtggagattgccgcctgcgccgaggagtacaagcttgcaacggacgcggcgggggagcaggaaaacaatattgcaggttttcgcactgagctagcgcgcatggagacagcgcagaatgacgtgaaaaacgcgctgcttgacgacaagaactcctgttccgatgagctagcgcgcatcgagtatgaaaaatattcttatgaaatacaatgcctgacggatacgcttttgtttcatgtgggcaaccgtgacatgattggcatggagcgtgacgccttggaggaggagacacagcaaatcgagacgctgctgcacaaaatcgagctgtcgaagcagaacgcgcaggttcaggagctcctgcaggacgagcgccttctcaaagaacggctcaaggtgctgcatgagggggaggggcagctcgaacctgaacggagggcgcttggaaatacgctttgcatgtattatgaacagcttgccgccgggcttgcaatacagattcagcagaatgagagcgcgtatcagcaggaggcacaaaagcagcaggagtttctggacaggcagcagtggctggacaacacgataatcgggctcatcacacaaatcagtacctgcaaggaacgaatgaatggttttggccgcattgaggacagctttcaggaggaatttcaggaaacgttcgtccgcaatattgtgggcgaatacgagccggggtttttggagatcaaaggcaggcagtatcaaaaggagctggaggagcacacaagaagctgtactgcgcacaaaaagcagctcgacgaggcaaacgaacggcaaaagtccctgctgcgcgatatcgaggaccggcagcaggaacgaatccgtcaggagtttatgctggcggagctggaacaggagcatacagaattagagcaggagtttgcagaacgccttgtcatgatgcgctacttcgatctttctgaaagtgagccgtggaatatggacaagcttcttgccgctgccgacaggaaacttgccgtgtgcgagcaggcaaaacgtatgctggaaaaagaggaggacacgctgcaaaaggagtatgtgcgcatcacgcagggaaaagtgctcgaactgccaaaagagctgctttcgctgtttggcagactcgacatcaacatcgtttacggcatggactggctgcgcaaaaatggttactccgcgcagaaaaatgaggagattgtgcgcagacagccgtttctgccatatgccttggttttgtcaaagcaggatttgaacacgcttgctgcacacgacagggaagtctacacctcctttccagtgcccatcatactgcgcgagcagcttgaggcgtgcatggcatcacaggtaggcggactgctcgcgctgcaagacgtacatttcctgatgtggtttaatgaaaagctgcttgacgaggacgcgctgcgccggctggcagcggagaaggaacagcagttacaggacaaaaggaaacagaccgcgacgcgcaaaaaggagtatgaggagtattttgaaaaaagggagcgcttgaaaaatcaaaggctcacgcgggaaatatacgacaaaaacatgacacagatgtcagaaatgaaagatttgttagaagcgctcaccaaaacgctgcacacattaagggcagatgcccagaagaatgaggagctggtcggcagcctgacagccacgattgccgccgaacagcgtttgatcgaaaagctgcaaaaacgtgagaaagccttcgccctgttttgcaaggaatatgaaagctatgtagaatgtatggcgctgatgaatcgcagccaaaaagaaaaggagcggcacgaacagaaccgcaaacttgtcaaagatgcagccgaggcaggcagggagcgcatgaaaagtattgagcgcgcgctggcagagcttgacagaagaaatctggactataaaaagaagtgcagcgtttatgagccataccgcacggcagcgtctcctgctgtggaatcagaatcaaaatcagaagaaatcccgttgccggcgtccatacatgagaaagaggcacggtttgaggcaattacctccaaaatgtccatgcaggtgcaggatttggaaaagcagctgcaaaaaactgctgtaacactgaacagacagcaaagtgaactcgaacggctttccaaaaaataccgccttgcagaacaggactgggcggggctcatctatgatgagaaggaggagacacaccaagaaatacttctcgaggacaggcgcagtaaatggaagctcaaagacaggcagtggaatgaggaggacaaggaaacagccgtctgccaaagccgcatcagtgccaaaaagaaggatatgcttgaaaagtgcggcacggaggagccgcttgcaaaagaccaaatcaaaacgacagaatttgcgtcggcagtcaatcaactgcactttcgcctccagaatatcgaggaggacatcaaaaaggtggaccagcgcctgaaggcactgggcgaaaatctgagtaccctcgcggcgtatgaggattttgtgtgccgccatgagccgcagtgggagacggatatctcactgctcggcaccaaagagctgcgcgatttccaaggacggctgctgcgcgattacaggaatctgaaagaagcgtgtgcgcacaaaaagagccggctgaccgcctgtctctacaagctgatgcaaaaggatatttaccaagaggattattacagaaaaccgcttgattccatgctttctctgacggacaatgcggtcttgacgctggcacagcttgatacgacgctgcaatcttatgacagccagatggaaaagcttgcagtggacatttcccttgtggagaaggagcgttcgcgcatcacagagctgctgggggagtactgccaagacgtgcaccgcaatctgggacagattgacagcaattcaaccatcaccattcgggaaaagccggtcaagatgttaagattacagcttccggactggtcagagcaggagggaatgtaccgtttaaaactgggcgatttcctcgatgagctgacagcgaaggggattgagatcttggagaaaaatgagaatccgcaggaatattttggcacgagaatcacgacgcgcaacctttatgacagcattgtcggaattggcaatgtacaaataaaattatataaaatcgaggcacagcgcgagtatccgattacttgggcacaggcagcaaaaaactctggcggtgagggatttttgactgcatttgtccttctttccagtctgctgtattatatgcgccgcgacgagacggacatctttgcagaccgcaacgagggcaaggtgcttgtcatggacaatccctttgcccagaccaatgccgcgcatctgctcaagcccctgatggatatggcagacaagatgaacacgcagctcatttgtttttcagggctgggcggctcttccatctatgaacggtttgacaatatttatgtgctcaatcttgtcgcgtcgaagctgcgcggcggtatgcagtatttacgcggagagcatctgcgcggcacggaggaggagctgctcgtgagcgcccagttcgaagtgattgggcaggagaagctggtcttttaa

SEQ ID NO: 52042 - DNA, 1053 bp, Lachnospiraceae bacterium A4
atgaaaaaaatacatctcgatgccctttcggcaaaatacaacatatccgaatacaaagcgctttacgccaaaatcatcgcgctgcttcaagacaacaaaataaagccggtaaaagcgtcaggaaccaatggaaaatcgccagccttatacaaggaatactggattatagaagaaaagcaggatatgtccagctatctaaatgaactaaactatgcgctggtgccgtcgatttcgacagactattaccgcgcgcacatcagccagtaccttgaggacagaccttgggtgctgctgctaaatgactatctcaaacagggcaattttatgacacaaatgtcagaaaatgagcgcagctttgacatctggcaccgggaaaagttcttgaagcaggagcagggaaaaaagattttaaagcgctgcggactagagacaggggttttaaattattacagaacgaccgagccggttgcgtattattgtgcgacgcggcagacaccgcaaaaactgctggtcatcgaaaataaagatacgttttacagtatgcgcaggtgtttgatgggcagccagccgctgagaagtgcatctggtaaaaacaggacggacagcgcgctgcggacaatctgcggggaaccggtcggcacgttgatatatggtgcgggaaaaggaatcattgcggcattttctgatttggaactcagcggtgagccctacatgacagcgccggagaacacggttctttactttggtgatctggactatgagggaattggcatctatgaacattttgcggcggagtatggggaacagtatgacattgcggtttttaaaaatgcctatgtgcagatgcttgcaaaggcaaagtgcattggcatagactgccttccgaggacaaaggaggggcagaaccgaaaacttgatcatgtgttttttagccagttttcacaggcacagcaggacaacatcaaagaaatactggaatgcggcagatatattccgcaggagattttgaatatagaggatatgcagtcaactgatgtacagtataaggagtaa

SEQ ID NO: 52043 - DNA, 1614 bp, Lachnospiraceae bacterium 3-1
atgcagtatgaatttttaaagcattttccgaaaagaatgaaaaatgtagggctatacgccgttttggttcaaaacagccttcagaaggccacctggaagaaatatgaatttcagaagatggacgagcaattcaatatgatttttgcggtgcttttgtatattatggagcagtctttaaaggaagaacgatgcaccatggatgatatcggcgcttacattgataccatcaatatgcagtattttcgaaaaaatatgaattacgaagagtgccgcactctgggggattttattgtaaatgtaatcctttcgaacgaaggaaaggtgatgtattttgaaggatttaattttgagcagaaggcttaccaggagataaacatcagctatgtggcaaatcgggtggtatatagccagcaggatgtaaagcgcacttcttattatcttaccgatgacggttataatcttcttttatccacactggaaattgaaaataatatgaagctgacgattcatgaaatgatttttcagatgcacctggaaaagcagaattatgataaggcggtagatgaaatcaagaatgtgttcaatcttctgcgcatccagcttcaaaaaattcaggaagccatggagaaaatccgccggaatgcattgaattattcggtaaaagattaccagaagattttaaatgaaaatttagagaccatcagtgagaccaagcagaaatttcaagactaccgggaattggtgaaaaatcggacacgggaattggaggagtccaacatcaatgtccgcaggcttaccaagaaagaggaagaaaaattaaatcatctcagagagattgaacagtatttgaatcgcaccatagacgaacaccagaaaattttaaatagccattttgatttaaaatctttatataccaaggaactggaggctttgtcccagatgtccttgattcagcgttttcccttgcggacggagctgtatgataagatattgacccagccaaaggcgttggaatacttggaatattttctacgtcccttgttttgtcaggacatagaaaagggttataatttaaaccgagcctttcagctacaaaaaccgatccggggaaaagtggaagaagataccgaagaaaccatggattttgatgtgggagaatgggaacgggagcaggaatttgcccgcagggaaaagctaaagcgttacgagcagagtattgcctatttgctgcggaaggtggtgtcgcagggagagatttctctggaggaaattgcagggcaggtgcaaggtcaggagttggaaacactgattccaaatgtggaaattttcaaagaaattatggtggagctaattcggaacaaagaaatcgacattcccacgttgcaaaaagagcaacgagagtatattcaggagcagtctggggaatttcaactgaatctggtgctattgcatttaattcaaaattgcagagaatttttggggattttacgaattgaaacttatcggctggaggatggaaaagtggtggtattttccgatgtcttggatgaaaaaggagacaagaaaaccatccggtgctccaatgtgctgattcgggttacaaaggaggaataa

SEQ ID NO: 52044 - DNA, 714 bp, Lachnospiraceae bacterium 3-1
atggcatatgaaacagaagaaatccggcagagccaggaaattttctattatttgttagagcatcatgaactacaggaggaagaggagcaggctttgtaccgggcttatgcggaacaggagaccgttcagaatttggtaaagtcccagggagaaattgccatgtgcaacattgagcggtatggaaatgtgatttatctgattcccaaagaggaaaatcattttttaggcttttccaagcctcaattgaaagcaattttgtgtaaatccaccagcacagataaggattactatttgtcccagtttgtgattttaactcttttggtggagttttttgatgggcagggaagcagcagtaaatccagagaatatatgcgggtaggagaattgcagaattgtatttcacaaagattgaaggagggaacgcagaacgtgccagaggaagaagaggaacaggttggaattgccttttccaacatgatggaagcctatgaagccctgcgttccgatgaaaaatctacccgtgcaagaaccaccaaggaagggtttttgtaccatatcctgatgtttctgcaaaagcagggtctgattgaatatgtggagcaggatgaaatgattaagaccacaagaaagctggacagctttatggactggaacctgctgaatcaaaacaattatcagagaatccttaaggtattgggggaaaatcatgagtaa

SEQ ID NO: 52045 - DNA, 4407 bp, Lachnospiraceae bacterium 3-1
atgagtaaaatcaatgcggtaagactgattaatatcaattacaataataatgccattcgggtcagtgacgagacctttcatttgaatggagagagcaccttgctgtctttgcgtaacggaggtggaaaatctgtgttggtacagatgatgacggcgccttttgtccataaacgttaccgagatgcgaaggatcgcccctttgaaagttattttaccaccagtaagccttcgtttattttggtggaatgggccttggaccagggagctggctctgtgctggtaggaatgatggtgcgtaaaaaccaggatggagaagaagccaatggggaaggtctggaaatgataaatttcatcagtgagtatcaggggccttgcctacaggatatccatcaactgcctgtggtggaaaagggcaaacgagagatgattttaaaaaattttgctgcttgccgccagatctttgaaaattacaaaaaagatcatgggataaaattttttagttttgatatgaacaacagcgcccagtctcgccagtattttgacaaactggccgaatatcagattaattataaagagtgggaaacgattatcaagaaggtaaacctaaaggaatcaggattatcggatttgtttgcagactgtaaggatgaaaagggtctggtggaaaaatggtttctggatgccgtggagcataagctgaacaaagagaggaaccgcatgaaggaatttcagtccatattggaaaaatatgtaggccaatataaggataatcagtctaaaatcaaacggcgggatatcattcgtctatttcaggaagaagcaaaaaggattgaggagaaaaacggaaggtatcaggaaagtgaaatcaatgtaagaagtcaggaaaacaggattgcaggcttccggcaggagttggagaaattacaagaacagactgctttggaggaacaggaaaatcgagagcaaggagagaagcttcagttagaaatcgagcgtctcaattatgaaaaattatctgaagaatattatcacctggaagaagaaaagaaattccatgtaagtaaccgggaaatgattgggatcgagaaggaaggactggaacgggaaatcgagagaatccaaaagagactgaacttattgttgtgtgccaggcagcaggaggcggcaaatgaggaaaaatctgagtgggatctttcgtatcagcagcttgcagtggcaagagaacgggataaggatctagagccggagcgaaactgtattggatatttgctgcgtagccattaccagaaggctttggaaaagacgaaaaacagtctgtcccaaaatcagaaggaccgggaggaggccacagagcagatcaaagaaacccaggagattctgatagagttggaggattttcttcggaaaaatgcattgtgggctggtgaactgaaaagtcggattggaagctatgacagacaggaggagcagtttaatactcgttaccaggagcagttagcgcgcaatattctgggtgaatatgagcctgggagcctggaaatctttggggatctgtgtcaaaagctacgagaagaggaagcgcgaaaaaaggctgcaaaaagccgtgagctggaacaggcaaaggatcagagaaccagcttggagcacagtttgcttcgccggaatgaggaaaaaacatttgcaattgcagggagaaagcaacaggaagagttgcaggagagctttgagaaggagctggcaaagcgcagagatattttgaaatatttagagctggaagaatctgtgctgtttgaggaagaaaagattttaaagactgcagaccggaagcttttggagattgaaggtcttaggcggaatctggaaaaggaagaaaatgaattacaaaaagagtatcagcgtctgacagagggaaaaatcttagaactgcctccagagcttgagatggaatttgaaaaagctggaattcatatggtatatggaatggagtggctgaaaaagaatggctattctcaaaaaaagaatcgggaattagtgcaaaaccatccgtttttgccgtatgcattgattttatcagagggggaagcagagaaattatcccgttttcgcggcagcattcccacaggctttcctattcccattgtgttacgaaaaagtctggagcagaaagggaaggaaaaagatggaaatctgttggctttcccaggaattcgattctatgtgctgtttaatgaaaatttactaaatgaagaaaagctgcagcagcttgtgatagaaaagcagcgggaaatagataagaagcaggaattgattgatattcgaaggaaggaatatgaatcttattttcagtggaaagagcaggtgagaaaccaacaggtctcccaagaaaaatatcaggaaaatcaacagaagcttcaggagcttgtggaaagcattcaagaactggaaaagggaattcatgagacgagccaggaacttttgcacctgcaggagcagagcttgcagttggagagagagattcgccaaggggaaaagcaggtggaatatctggagcggaaggaaagagattttgcgcagctatatgaggcttacaaggaatatcaagaaagccgcaggcagcaggaaaagtgcaaaaaagaagaaaataagcttacagagagccgtaagctgtctcggttgaaggaagaaaaattacaggaaaaattgcaaagttttcggaatcaacaggctgacctggagcgggagttggaaaagcatcaggagcagttgggacgctaccaaagctatgaagaaataaatcagcaggaaatagaaaaactgccaaaagaggtgtcagagctggaggccaggtatcaggcagtaacggctggggtatcccaggaaatccaggttttggaagagagggaacgaagaagcagcaaacgttaccaaagagcttgcgaggaattggagcatttgtcgtcaaaatttggtgtttcgaaagagcagtgggaggcagtcctttacagccgtaaggaggagacacatcaggagatccaactggaagaccggaaaaagaagctgaagataaaagaaggactgtggaacgaagcagataagcaggtggcattgctgattcatcaggtggaacagcgggtacagcgtatgctggaggaatgtggacaaaaacagccgctgcccagagaggaaattcccagtgaggattttaaagcccgcaagaaccagttggattatcagtacaaggagttggaaaggattggaaaagcattgcagattcgtttcaataactacaatgaaaacttgacagctcttgcagaatacagtgagcttttagtggaagagcctgtgatatgggaacaggatttttctggaatggatacccgcaggcttcgggattttaagggaattttgattcgtgattataagaaatattgcgaggacagacatggggcaagagagcagcttgtgtatctgctgaaccagattgtgcggatggaggcgtttcaggaggatttctaccgaaagcccttggaggccatgctggaattggctggggattccagtcaggtacaacgccagttggatacgacggttttgtcctatcaaagcttgatggaaaaactggaggtagatatttctctggtggagaaagaaaagaataaaattgtggagctattggaggattatttgcaggaggtccatcaaaatctaggaaagattgaccacaattctaccattaccattcgggagcggccagtgaaaatgttaaagattcagcttccttcctgggaagaaaatgagaacctgtaccgtctgagattagtggattttattgacgagcttaccaaaaaaggaattaacatttttgagcagaatgagaatgcccaggaatattttggcatacaaatgaccaccagaaacctttatgatacggtagtgggaattggcaatgtgcagattcgtctttacaaggtagaggaacagcgagagtatcccattacctgggcagaggttgcaaagaattccggtggagaaggctttttatctgcctttgtgattctctccagtcttttgtattttatgagaaaggatgattcggatatttttgcagatcgaaatgagggtaaagtgcttttgatggataacccctttgcccaaaccaatgcttcccatttgctaaagccgttgatggatatggcgaaaaagacaaatacacagcttatttgcctgactggtcttggcggggaatctatttataaccgttttgacaatatttatgtgctgaatttggtggcagcaagtcttaagcagggaatgcagtatttaaagggagagcatatgagggggaatgagccagaagaaatgagtgtgtcccagattgaagtggtacagcaggaattggtgttttag

SEQ ID NO: 52046 - DNA, 990 bp, Lachnospiraceae bacterium 3-1
atgaaacgaattaccctggaagagcttttggggaactgtcctaatgcttcctatcaacagcaatatgcttacattatggaattgttggaaaaggggaagctaaagcctgtgaaaaacgctggaaccaacggaaagactcccaggttatgtctttcttattggatggtggaggagcaggaggaatcccaggatgccctggcagaagaattgaactattgtatggaaccgttgatttccattgaatattatctttcccatttagaccagtaccaagaggacaggagctgggtgcaaagactcaatgattatctcaaagaaaaccgttctttgttaaaggagccaatatcggttaatgagcgtagttttgaaatctggggaagggaaaaattccttaccaaagaacagggcagaaaaattttaaagcgatgcaaaatagagatgggctttttgaatatgtatgagacggcggagccttttgcctattatacacataccagaaagattccccagaacatgctgattttggaaaataaggatactttttttagtatgcggaagtttttactggaagggaatcaccagatttttgggatggaaattgggactttgatttatggaggcgggaaacggattgtgaaatctttccgggattttgacctttctgcagagccttatatgaaggaaaaagaaaatcagatttattatttcggcgatttagattatgaggggattgggatttatgagagccttgccaggcagtggaaagggaatggaagaccaattccctttgtaacggcttatgaggcaatgatagaaaaaggcaaaaaaattgatagccttccaaagactaaggaatttcagaaccagaatttaaagggtgaatttttctcttatttttctaatgaaacagtggaaaagatgcaggaaattcttaagaagggagaatatattccccaggagattttgagtattttggattatctggtttga

SEQ ID NO: 52047 - DNA, 1629 bp, Lachnospiraceae bacterium M18-1
atgcagtatgaatttttaaagcattttccgagaaggatgaaaaatgtagggctgtacacggtcctgatccagaacagcctgcagaaaacgacctggaagcagcatggatttcagaagacagacgagcagttcaacctgatctttgccgtgatgctctacatcatggagcagtcgctgaaggaagagaactgtacgatggacgatatcggcgcttatatcgacacggtcaacgtccagtatttccggaaagacatgtcctacgaggactgccgcagcctgggagactttattgtcaatgtgatcctttccaacgaggggagggtcatgcattttgacggctatgacttcgaagagaacgcatatcagagcatacacatcagctacgtggccaacaggatcgtctatctggatcaggatttcaagcgcacgtcttattaccttacggacgatggatacaatcttttactgtcaaccctggaaatcgagaataatatgaagctgaccatacacgagatgatcttccagatgcacttggaaaagcagagctatgacaaagccgtggatgagatcaagaacgtgttcaacctgcttcggatccagctccagaagattcaggaagccatggggaagatccggagaaatgcattgaattattcggtccgtgattatgagcagatcctgcatgaaaatctggaaaccatcgacgacaccaagaaaaagttccagaactaccgggaaatggtaaaaagccgcgtacaggaactggaagagaccaatatcaatgtcaggaggctcagcccgaaggaggaggaaaaattaaggcatctgcgggaaattgagtggtatctgaaccgcaccattgacgagcatcagaagatcctgggcagtcatttggacctgaaagcgctgtacacccgggaactggaagacctgacccggatgtcattgatcagacggttttccctgcggacagaattatatgacaggcttctggaaaaaccggccgccctggaggaactggaatatttcctgcggcccctgttcaaccaggatgcagaaaaggtctacaacctgaataaggctttccagctgcagcgcccggtgcgcaggcaggcggaggaggatatccaggaacagatcgattttgacgaggaagcgtgggagcaggagcaggaacgtctccggatggaaaagctgaaacgctacaagcagagcctgaccggactgctggaacaggctgtccgtacagagaagggggagatcaccctggaacaggtggaggagcagattcgggaagacatggaagtctgcgaccggctgatcccgaatgtggagatcttcaaggagatcatggtggaattgatcaagaaccgggaagtggagcttgatgtgctgcggaaggagcgaagccagttcatccaggaccggcagggggaatttcagctcaatgagatgctgctgcagctgacagaggaaaatccggaatttgcggatatccggcagatccgggtggaacgcctcgaaaagggcggtacagtgacttttgcggggatccgcaatgaaaacggggaacgaaaagatatccggtgttcaaatgtgcggatctgcgtatcccaaaaagaaggatga

SEQ ID NO: 52048 - DNA, 717 bp, Lachnospiraceae bacterium M18-1
atggcatatgaatttggagatatcaggatcagccaggagattttttattatcttttggaacaccacgaactgcgggaggatgaggaggtcctgctgttcaaggcatacgcggagcaggaggagatccagaacctggtcaagtcccagggagaggcggcctatagcacgatcgagcgttatggaaatgtgatctacctgatcccgaaggaggaaaatcattttcttggattttccaaggcccagctgaaaaatgtgctctgcagatccaattctacggataaggattactatctgtctcagtttgtgatactgactcttctggtggaatttttcgatggacaggggagcagcagtaaggcccgggaatatatgcgtgtgggagagctccagaactgcatttcacggagattaaaggaaggcgcggaacatgtgccggaagaccaggaggagcaggcgggcattgcattttccaatatgctggaggcttacgaggcgttaagatccgatgaaaagggatcgcgcgcgaggaccacgaaggaagggttcctccaccatatcctgacattcctgcagaagcagggactggtcgaatatgtggaacaggatgagatgatcaaaacgacaaaaaagctggacaactttatggactggaacctgctgaatcagaacaattataaacgggtgctgcgggttctcggggttgggaaggaagtataa

SEQ ID NO: 52049 - DNA, 4611 bp, Lachnospiraceae bacterium M18-1
atgagcaagataaacgcggcccgtctgatcaatatcaattacaataacaacgcgatccgggtcagtgacgagaccttccgcttcaacggggaaagcacgctgatctctctgagaaacggcgggggaaaaaccgtcctggtccagatgctgaccgccccctttgtccacaaacgctaccgggacgccaaggaccgtccttttgaaagttatttcaccacaggcaagccttccttcatcctggtggagtgggccctggatcagaacgcaggtttcgtgctgaccgggatgatggtgcgccgaagccaggacagcgacagcggggaagacctggagatggtcaatttcatctgcgaataccggtcttcctgcctgcaggatatccaccatctcccggtggtggaaaaggggaaaaaagaaatgactctgaaaaatttttctgcctgccggcagctgttcgaagggtataagcgggaccggtccctgcagtttttttattatgatatgaacaacggggcgcagtccaggcagtattttgataaattacaggaatatcagatccactataaggagtgggagagtatcatcaaaaaagtgaacctgaaggagtccggcctttccgagctgttttccgactgccgggacgagaagggactggtagaaaaatggtttttggacgcagtagaaagcaagctgaataaagaacggaaccggatgaaggaatttcagagtattctggaaaaatacgtggggcagtataaggacaaccgttccaagatccagcgccgggatacgatccgcctgtataagcaggaggcacagaagatccgggaaaagctgtccgtttaccgggaaggggagcaaaaggaggaagagcaggaaaatctggtggcccattttatcgcggagctggaacgcctgcaggctgtaacaaaggaagggcatgaggaagtcctgtcgcagatggaagaggtgcttgcggagatcgcccatattgaatatgaaaaattgtccggcgagatttatcagctggaagaacagatgcgttttcatctgagcagccgggacatgctttctatggaaaaggaagcgctggaacgggaaacggaggagatcatccggaggctccatgtgctggcctgcgcgaagcagcagcggcttgcggatgaggaaaaggcggagtgggacgaggctctgcagcggcttcgggtggcgcaggagaaaaatgtaaatctggaaccggagcggaaccgcctgggctatgtgctgcgccgccattatgaaaaggaactggaagagaacgggaaaaggcagcaggagaacagcctggccattgcagagacagaagaaaatatttcccgggaaaaacagatacaatccaatctggaagagcagatccgggaaagggtatcggcagaaggggcgctgaaaagccaggtgcaggcatatgaccgccaagaggagcagttcaataaccggcatcaggagcaatttgttcgcaacatcctgggggaatatgagccgggaacgatggagatcttccaggaagctcaggagaaccggatggaggagctggttcgggaacgcctgaaaactaaaaaggcgcaggaggcgtcgaaggaaacacagcggagccaggaacggaagcttgcggatatgcgggaggagcagatccgcaggagagcggagcaggggcagcaggaagggatccggagcagctatgaggaagaactggaagagcggaaggtgatcctgaaatatctggacctggatgagaaggagcttttcgacagggaaaagatccttcaggcatccgggcggaagctgctggagaccgccaacctgcgccgaaatctggaaaaggaagaggacggcctgcaaaaggaataccagaggctgacaaaaggccaggtgctggagctgccccaggagctggaggcggagctgaccgggctgggaatccatgttgtatacgggatggaatggctgaaaaagaacggatatccggaaaaagcgaaccaggagctggtccgcagccacccatttttgccctatgggctgatcttgtcgaagcaggaggtggaaaagctgtcccgccatacgggtaatatctgtacatccttcccgattcccatcatcctgcgggagcatctggaaaagcgggacagggaggagccggggaatatccgcaggttcgaggacgtcagcttttatgtcctgttcaatgaaaatcttctcaacgaagaaaagctccgggaactggtggcggaaaaggagcggcagatcgcgcggaagcgggaagcgatccggatacgccaggaagaatatcagcagtattttgagcggcaggagcaggtgaaaaaccagtcggtgagccgggaaagctatgaggagaatgagaaacgcctgaaagaactggcggaccagatccaaggtacagacgaggatatccggacggcttcccagaagcttgcggaactgaaagagcagatagaactccgggagcaggacatccgcagagcagaccaggagctggaacggcagcggcggaaagcggaagacttccaggaactgcgggctgtgtacgaggaatatgtgcgtttccggcaggaactggagctgtgcaggaaggatatgggcaggcttgcggataagcagaagctgtccagggaaaaactggaaaaactgcaggagcggcagaagtctctggagactgagagagatgctctgctccgggaggaagaagagcagcaagaggcagttcggaagtatcggaggtatgaggaatatacggagtttaaggagaaggaggccggggaggactggcgcgggctgtgggctgcggccaagagcggcggagcggctgcggccgggggacggcaggagcaaaaaagtcggtcaggagccgcagatggtgcggccgggggacagcaggagcaaaaaagtcggtcaggagccgcagatggtgcggctgtaaaaccccgtgcagaaaaatctgcggtccagatccggttggacctgcggaagatcgtgtccgatatggaggccagatacgtagcagtcactgctacggtttcgctggagatacaggaactggaacgccaggagcagctaagcggcagacgctgcaaagaagcagaccaggaactgaagcatctgcagaaaaaatacggccttacagatgatgcatggcaggatacgtactataaccgaaaagaggaatcccgccaggaagtcctcctggaagaccgcaggttgaagatccggacgaagcagtctctttggaatgaggaagataagcggatcgccgtcctcacccagcagaaggaggatattctgaagcggatgcgtacagagtgcggccaggaggagcccctgcccaaaagcgagatccagaaccaggattttgagtcccggaaaaaccagctgaaatatcaggaaaaggaattgaaaaacaccgcggacaagctgcagaaacgtctccacagcctggatgaaaacctgaccgcgctggcggaatacagtgaatttgagaaaaaagaaccggtggcctgggaacaggattttatagaaatgaacgccaaggagctgaggaattttaaaggtatcctcatccgggattataaccagtgcctgaaatccagacaggatgcgaaggagcagctggtccgcgtgctgaaccagatcgtgcgggatgcgcatttccaggaggattattataagaagccgctggaggccatgctggaactggccggcgacgcaggacaggtgcagcgtcagctggagaccacgattcagtcctatgacagtctgatggaaaagctggaagtggacatttccgtggtggagaaagagaagcagaagatcgcggagcttttggaggattatctcaaggaagttcaccgtaaccttggcaggatcgaccaaaattccacgatcacggtacgggagcgcgccatcaagatgctgaagatccagcttccggcatgggaagaaaatgaaaatctgtaccatatccggctgcaggacctgatcgacgagctgaccgaaaaggggatcgggatctttgagcgaaatgaaaatgcccaggaatatttcggcacccgcatgactacaagaaatctgtacgatacggtggtgggtatcggcaatgtgcagatccgcctctacaagatcgaggcccagcgggaataccctatcacctgggcagaggtggcaaaaaattcgggcggggagggatttttgtctgcattcgtgatcctgtccagcctgctgtactatatgcgtaaagacgagacggatattttcgcggaccgcaacgaaggaaaagtgctgctcatggacaatccgtttgcccagaccaatgcgtctcatctgctgaagccgctcatggatgtggcgaaaaagaccaatacccagctcatctgtctgaccgggcttggaggggacagcatttacaaccggtttgataatatttacgtgctcaacctgatcacggcaagcctgcgcagcggcatgcagtacctccgggccaatcacctgcggggaaatgagccggagaccatggtggtgtcgcagattgaagtgatggagcagcaggagctggtgttttaa

SEQ ID NO: 52050 - DNA, 981 bp, Lachnospiraceae bacterium M18-1
atgaaacggatcgctctggaacagctgataaaaccgtatgcagataaatcctacgccgaacagtgccgctatgtccgggagatgctggattccggccgggtgaggccgctgaaggcatccggcaccaacggcaagactccggccctgtatctggagtattggcttacggaggaacagaagaactatgaagaactgcgggaagagctgacctatcagcttgtcccgcttctttccgtggattattacatgaaccatcccgcggcctacgaacaggacagaaaatgggtcctccttttgaacaaatatctgaaagaacgccgggagcttctggagagccgggaatcggtcaatgaacggagcttcgagatctggaaccgggaaaagtttctgacgagggagcaggggaaaaggatcctcaagcgctgcggacaagagatggatttcctgaaagtgtacgaaaccacagagcctctttcctactattcacacaccagagatgtgccacagaagctgctgatcctggaaaataaggatcccttttacagtatgcggcagcatttgatcgcgggaaatcataagatcctgggggagagtatcggaacgctgatctacggtgcgggaaaaaggatcttgaaatcctttcaggactttgacctttgtgtggagccctatatgaaggcggaagggaatcggatcttctatttcggagatctggattatgaaggaatcgggatctatgaaagcctggcagggctcagcagggattcctggaagatcgtgccctttgtcccggcgtatgatgctatgctgaaaaaggccggacagtgcggagatctgccggagatgaaggaaaggcagaaccggaacatccgggacgagttcttttcttattttacgccggaatgcgcagaggccatgcgccggatcctggaagcgggaaggtatataccgcaggaaatattaaatatttcggacttttag

SEQ ID NO: 52051 - DNA, 1614 bp, Lachnospiraceae bacterium A2
atgcaatttgaatttttaaagcatttcccccgcagaatgaaaaatgtcggcctatacgccgtcctagtacaaaacagtatccagaaggccacatggaaaaaatacaaattccagacaatggatgagcagttcaacatgattttcaccgtcctcctgtacattatggagcaatccttgagggaggaacgctgcaccatggacgatatcggtgcctatattgataccatcaatatgcagtatttccagaaacccatggactttgaggactgccgtgcgttgggtgattttattgtcaacgttattctttccaatgaggggaaggtgatgcatttttcaggtttccattttgagcagaaagcctatcaggagatgaacatcagctatgtggcgaaccgggtggtgtacagcgagcaggatgtgaagcgcacttcttattatctgacggatgacggctataatcttcttttatccacactggaaattgaaaataacatgaagcttaccatccacgaaatgattttccagatgcatttggaaaaacaaaactacgacaaagcagtggatgaaatcaagaatgtattcaacctgctgcgcatccagcttcagaaaattcaggaggccatggggaaaatccgccggaatgcattgaattattctgtaaaggactatcaggaaattttaaatgaaaatctggaaaccatcagcgataccaagcagaaattccagaattacagggaactggtgaaaagccgggcaaaagagctggaggaatccaatatcaacgtgcgcaggctcacagaaaaagaggaggaaaagctaaaccatctgaaggaaattgagcactacttaaaccgcaccatagacgagcaccagaaaattttaagcagccactttgacttaaaatccctgtataccaaggaactggaaaccctatcccagatgtccttaatccagcggtttcccctgcggacagagctgtatgacaaaattttggaatatccagacgctttggagcatctggaatatttcctgcgccccctcttttgccaagaaattggaaaaacctataatttaaaccgggctttccagctgcagaggcccatccgcggaaaaaaagaagcagatacagcagaaccattagattttgacgccggggcgtgggagcaggaacaggagctgcgccgcagggaaaagctgcgccgttacgagcagagcctagcctgcctgctccgccatgtttccgccaaaggagaggtttccctagaagaaatctccgtgcaggccaaaggccaagacttggaaaccttgataccaaacgtagagattttcaaggaaattatggtggagctcatccgcaataaagaaatcgacatcccagccctgcggaaagaacagagcgaatatatccaagaacagtccggggaattccagctaaacctagtcctcctccacctcaccggcaactgccgtgaattccttaatattgtgcaaatccgcacataccggctgcaggatggaaaagtagtaattttcccagacgtcccagacgaaacaggaactaaaaaaagcatccgttgctctaacattatgttccagataataaaagaggagtaa

SEQ ID NO: 52052 - DNA, 714 bp, Lachnospiraceae bacterium A2
atgtcatacgagtccgaggaaatccgccaaagccaagaaatcttctactacctgctggaacaccatgaactgcaggaggaagaagaacagtccctgttccgggcatatgccgaacaggaatccgtccagaacttagtaaaatcccaaggggaaatcgccctgtgcaacatcgaacggtatggcagcgtcatctacctgatcccaaaggaagaaaaccatttcctaggcttttccaagccccagctaaagtccatcctgtgcaaatccacaggcactgacaaggattactacctgtcccagtttgtggtcctgaccttgctggtcgagtttttcgacgggcaggggagcagcagcaaatcccgggaatacatgcgggtaggggaactgcagaactgcatttccaagcggctgaaggaaggagcccagaatgtcccgccagaagatgaggaacgggctggcattgcattttccaatatgacggaggcttacgaggctttgaagtcagacgaaaaatccacccgggcaaagaccaccaaggaagggttcctgcaccatatcctgatgtttttgcagaagcaggggctgattgaatatgtggagcaggacgaaatgataaagaccacaaggaagctggacagctttatggactggaacctgttaaaccagaacaattaccagagaatcctgaaggtactaggagaacaccatgagtaa

SEQ ID NO: 52053 - DNA, 4422 bp, Lachnospiraceae bacterium A2
atgagtaaaatcaatgcggtaagactgatcaatgtcaattacaacaataacaatataaggattagcgacgaaaccttccatttcaacggggagagcaccctgctttccctgcgcaacgggggcgggaaatccgtactggtgcagatgatgacggcgcctttcgtccacaagcgttaccgggatgcgaaagaacgcccctttgaaagctattttaccaccaataagccctccttcatccttgtggagtgggcgctggaccaaggggccggctatgtgctggctgggatgatggtgcgcaaggcccaagagggggaagaaggcagcggggaaggcttggaactggttaatttcatcagcgagtatcaggagccatgcctgcaggacatccaccatctgcctgtggtggaaaaagggaaacggcaggttgtccttaaaaattttgctgcctgccgccagatgtttgaggggtataagaaggatcattccctgaaatttgatagctttgacatgaacaacagcgcccagtcccggcagtattttgacaagctggcagagtaccagattaattacaaagagtgggaaacgattatcaaaaaagtgaacctgaaggaatccggcctgtctgatttgttttccgactgcaaggatgagaaagggctggtggaaaaatggtttttggacgcagtggagcagaagctgaacaaagagaaaaacaggatgaaggagttccagtccattctggaaaaatatgtcggccaatacaaggacaaccagtctaaaatcaagcggcgtgacgccatccgtgcatttcaggaggaggcaaagcggattagggaacagaaccagaagtatcttaagagtgaagccagcgtacacgcacaggaaaacaagattgccgccttccggcaggaattggaactgctgtaccagcaggtaaatgcgaaggagcaggaaaaccacaggctggcagaggaattaaagcgggagctttcccgcctgaattatgaaaagctgtcggaggaatactaccagttggcagagcagaaaaaattccatgcaggaaaccgggaaatgattgggctggaaatggaagggctgcagcgggaactggaaaacatccgccggacgctgcacttattcttttgcgcaaggcagcaggaggccgtggacgaggagaagtccgaatgggatttggcttgccagcagcttgcggtggcaaaggggcaggataaggatttggagccggagcggaaccagatagggcttcttttacacagccatttccaatctgcattagctgaaacaggaaagcgcctaaccgacaaccagcaatacagggaagaaaccatggggcaaatccagcaggaacaggagctgctggccgggcttgaggaggagcttagggaaaatgcacggcaggccggggagttaaaaacccgggttggcggctacagcaggcaggagaaccagttcaatgtccgctaccaagaacagcttgtgcggaatatccttggggaatatgagccgggcagcctggaaattttcggggacgcctgccagaaggcatgggaagaagaaacaaggaaaaaagcagcaaagagccgggaactggaacaggccaaaagcaggaggaccagcttggagcacagcctgctccgcaaaaatgaagaaaaagcatttgccattgcagggaaaaaacagcaggaacaattgcaggaagtatatgaacaggagcttttaaagcgcagggatattttaacctatctgggattggacgaatccgctttattggaagaagaaaagattttacaggccgcagggcataagcttctggaactggaaaacctccgccggaacttggaaaaagaagaaaatgaactccaaaaggaataccagaagcttaccgagggaaaaatcttagaattgcccaaagaactggaaactgaatttgaaaaagccggcatccatatcgtgtatggcatggaatggctaaaaaagaacggatattcccagaaaaagaaccgggagctggtacagagccacccctttttgccttatgccctgatactgtcagatggagaggcagaaaaattgaaacagctttctggcagcatcgccaccgggttccccattcccatcctgctgcgtaagaatttagggcagaaagcaaagggccaagccagcccattggtagatttttctgacgtccagttttaccttctgtttaatgaaaatcttttggacgaggaaaaattgcggcagcttgtggcagaaaagcaggggcaaatcgagaaaaagcaagagcagattgccatcaaaaagcaggagtacggatcttatttctcatggcaggagcaggtgaagcagcagcaagtccgcaaggaaaattatcaggaaaaccagaagcagattctggcattggaagaaaaaatcaaggatctggaaaaagaaacccgctggttttcccaagagctttccagcttgcaggaacaaatttctattttagaaaaggaaatccgcacggcagaaaagcagattgagcatttcaaacaaaaagaactggatttttctgaactgtgcagagcctatgaggaataccaagagcattgccggcagcaggaaaaatgccggaaggaagaactgcgcctgacagaaggcaagaagctgtccagactgaaggaaggaaagctccaggagaagcttgtaacccttaggaaccagcaggcaggcttggagcggatacaggaacggctggatgggcagctttccttataccggggctatggggaagcggtggatggggaaggccgagcagaagttttggtgctgcccccagaaaaagtatccgaactggaagcccgctatcaggctattaccgccaatgtatcccaagaaatccagtctttggaggagcgggagcagaaaagcagcaagcgttaccagaaggcttgtgaggaattaagccacctctcccggaaataccgcctttccaaagagcaatggctggaaatttcctacagccgccgggaagaaacccatcaggaagcccagttggaagaccgggccagcaagctgaaaggaaaggaaagccgctggaacgaggaggacaagcaggtagccttgctgatgcagcagatggaaggccgcatccggcgcatggccgaagaatgtgggcaggaacagcccctgcccaaggaggaaatccgaagcgaagatttcaaagcccggaaaaaccaattggactaccaaaggaaggaactggaacaggccgggaaacgcttgcaggaccgcaggaacagctacaatgaaacactgactgcccttgcagaatacagcgggctgcccatcacagagccagtggaatgggcagaggattttgaagattttggcacccagagcctccggaatttcaaagggatcctgcttagggattacaatcagtaccgggacgacaggcaaaaggcacaggagcagcttgtccatgtgctgaaccagattgtgcgtttggagcagttccatgaggatttctaccggaaaccgctggaagccatgctggagctgtccggggacgccgggcaggtacagcggcagctagacacaacggtccagtcctaccagagcctgatggaaaaactggaagtggacatttcccttgtggaaaaggaaaaaagcaaaattgtagagcttttggaggagtatgtgcaggaggtccacaaaaacctagggaaaatagaccataattccaccatttctatccgggaacgcccggtgaaaatgctgaaaatccagcttcccccatgggaggaaaacgaaggcctttaccgtttaaggctggaagatttcatagacggcctgacccagaagggccttgcaatttttagccggaatgaaaatgccggggagtatttcggtacccagatgacaaccaggaacctctatgacacggtggtggggattgggaatgtgcagatccgcctttacaaagtggaagaacagcgggaataccccatcacctgggcggaagttgcaaggaactccggaggggaagggttcctgtctgcgtttgtcatcctttcaagcctgctttattttatgcgcagggacgatacagatatttttgcggaccggaatgagggcaaggtgctgctgatggacaacccctttgcccagaccaatgcttcccacctgttaaagcccctgatggacatggcaaaaaaggccaacacccagcttatctgcctgacgggccttggcggggagtccatttataaccgttttgacaatatttatgtgctgaacctcgttgccgccagcatacggcaggggacgcagtacttaaaaggggagcatatgcgtgggaatgagccggaagagctgagcgtggcacagattgaggtggtgcagcaggagctgctgttttaa

SEQ ID NO: 52054 - DNA, 996 bp, Lachnospiraceae bacterium A2
atgaaacgcatttccttggaagaattgctgcagaagcatcccaatgattcctaccagcagcagtatgcccgcattatggagttattggggcagggaaagctgaaaccagtaaaaaatgccgggcacaacggcaagaagccagccttatgcctttcttactggcaggccggtgaggaaggtggcggttctcaagaattggaagaagaattaaagtaccatttagagccggtgatttccatcagctattacctttcccatctggaagaataccaaaaagacaggccatgggtgcagatgttaaacacatacctgaaagaaagccgccatctgctcaagcagcccatttccgtcaacgaacgcagctttgaaatctttcaccgggagaaattcttcacaagggagcaaggccttaaaatcttaaaacggtgcggcttagggccagagtatttcaacatgtacgaaacggcagagccatttgcctattattcaaatacaagaaaggttccccaaaatttgctgattctggaaaataaggataccttttttagtatgcgcaggttcctgctggcaggcagcgcccatatatttgggacggaaatagggactttaatttacggcgcagggaaacggattgtgaaatctttccaggattttggcctgtctgcggagccttacatgaaagcagaagggaaccggttttactattttggggatttggattatgagggaatcggcatttatgaaagccttgccgcccagtcttcggcgcaccataagctggttccttttctggcagcatatcaggcaatgctcgcaaaggcagcgaaatcgggcaggctgccagacgccaaggaattccagaaccagaacataagcggagcatttttttcctatttttcgaaagaagcagcgaagcagatgcaaagggttttggaaaaaggccagtacatcccccaagagattttaaatatcaaagactttatggcagaaggataa

SEQ ID NO: 52055 - DNA, 1536 bp, Paenibacillus barengoltzii G22
atggagtcaaaagggatgccaatcgaattgaatgacatactgtccggcttccaagagcgaatgggcaagctcgcattgttcgatccgttattcgagctgagtcggcaaaggaaaactgaccgcagcgggaaacaagtggcgatgatggagctgggactgttgacgctgctgtttttctttgagaaaaaactgatgcgaagtaggaagatcagtgtgaaggatctggtcggttttctggccgttgtgctggaggacaagtatgatctcgaccaggaagagctggaagatatcggccgaaggattatgcatgtatttcgtccttcatccggacggaagcgggagtttcctttttttcatttgggaacggggcaagaagggattcattatacgtccattctgcgcaccgattcgtatgatgcggcaaccaatacccagtattacgcattggacgaggatggccttgagttggtatttgcaacgaaggagttttatttggagtttcagttgtccatccatcagcttttgttgcgcaagcagttggaaaaaggggaattccagggagcactgcgccaaattgacgagatgatgatcgatgtggaaacgctgcaggagagaattatcgctctggggcatgaaattaagcggagcattgtgtctgaagaaacctttaatcggtaccgatctttgttggaggatatttttctgaggctgaaaagggaaaatgaagaatttaacgagctccgggattttgtgaaggagacgaaggaccggatttacgccgaacgggaacttctgaaaaacaggctgccctatgagctcattgtacgcatcggtgtcgaattagaaaaagtccacaacgagcatacacggctgctgcagcaaagtatggaactggaaagcagcgctcttcgcgcggccaaggagtcgctttattacacgggaatgaatgcatttaactttgagcaagatattgcgtcgtttatcttcggcactccattgccgattgaggcgatgaagggcgttgcagcgccgttcctgcaattggaacaggccgaattatggtcgcctcttacggtatttgccaagcaacagctttcgggccatgatgatgggtctgttattgaggaaagccttcttgctctgtctgaggaagaagggaattcttcttacatgcggaagcgtacggagcgttttgtccaagtgctggaggctcttttccgctgttatgagaagttggatcgtgatgaagtccgattgagtgaatttatcgcatttttggatctggatgaagctgtagatctaaagaaggaacgggatttttacgattgctggatgattttgcatcagcgcagcccgattcgtccggtgatggatgatgaggaagccgggggatccgatcaaagcctctatgaggccttccggtctcaactgcaagggagaacgttgatcgttcaggagtcggagggcattcttagggtcaatgagcggtattccattcaagaacttatcattcggttggggggatatggagaatga

SEQ ID NO: 52056 - DNA, 738 bp, Paenibacillus barengoltzii G22
atgaattataccggtgatgaggtcatgaaagctttccgcatctatgcgcagttgtctagaagcggggttgccgataaggaaagtctgctccaggtggaatcggacgaccgcgtccgcgggttgctggatcaatttgcatctgaagtggactgcgtcgtgatgggagcgggtgaccgcttgatgctaattccgctggtcagactgtctccttttcatattaccaatgaatcgctgaagcgtacgtatttgcgcggcaatgcggtgaatgcggacctgtatttgatgtatgtagccattattgtgttcatcggggcgttttacgatagttatcagacgacggaagcgacgcggaatttccttcagatggaagagtggatgaatttggtccagcagcggatcaatggactgagggaacattccgcagaagaattgaaggcgcttagtcaagagtactcctaccactggccggacattattgaaaagtgggatgcgatggatgatgtgaaggagacagcaaagcggcagagcggtgctaccatcagcaggttaagctttctggatgcggttcggagatttatgctcgatcaggatctggcgaagcaggtcgggcccgatgagttggatttgacggagaaaacgaaaatgatcgttcagcgttattttatggaacgggaatataatcgcggcattttggaatttctatatggtctggagccaaaacggaaggaggagagttaa

SEQ ID NO: 52057 - DNA, 4443 bp, Paenibacillus barengoltzii G22
atgcctgttatatcgaaaatccggtttacgaatgtggtctatgagggcggagccaagcgctataatgattctaccttttattttgacggtcataatggagcgattgtgctggagaacgggggaggaaagacggtattcattcaaaccgcgatccaggccatactgcctcatagtgatgtagcgggaagaaagatcaaggatacgctctcccttgaaaatggcccggcccatgtggcgatcgagtggatcttagctgataagcctcggcgaagatatgcccttacttgcgtgagcttgtttatgagtgcgacggggttggactccctgcgttatgtttacgagtattccgagcatgacgatcatcgaatcggaaagcttccctttacgaaagagatgggcggcgggaaacttagggtaacggagaagggcgagattcaggaatattatcagtccatgcagtcgaaaaatccggtgtcggccaaaaccttcgataccattatgggatttcagaaatatatcgaagaacattttcatattatccagtcggaatgggaggcgattgtgaaggtcaattccagcgagggcggggttgaggcatttttcgatgaatgcaaaacttcatcccaattggtggaccgattgctcattccgacgattgaagaatcgatggaaggatttaagcagggcaccttcgcagatttgttccagttacagcgtgagggtttcaagcagtacaaggaactgaaggaaaaaatcgaggagaatcggcgtattcttgccgagttgcacaagtatgtgggctgctatgaggttctgcaccgggagatgcttcggtacgaggaactgcggaaggaagcgaaagtatttcttcagacaacgatgaatgtcgaacaggagcagcaagcggaacaggaccggcttcaagaacgtttggaggaatggaagcaggagtacaagaattggcgaaaaagagaggcatcccttgcaatcgccgatgagagacaaatcgcggggagtttggagaccgaactgcagttggttggaactgaaaaagatgaattggaagaacaagcgtcttccgctgcgcggtactactactcgctggaatatgcggagcagcgggagaagcttcgtgaagcggaagagcgaatggcctacctgcagcgggagttggacaggttggcgcaatcgcaggatgaggaggagcttgagcaggcgtggaagcttagcggacgtaagctcaaagcatggtttgatcgggaagaaacgagactgtccgagcttctgcaggaggtgcagctaggactcgacgcgttggcggagcaaaggcaggactgccttcgcgaacgggatgccgcggccaaggagcgggaaaagcagttgctgcgcattcgcgaatttgagacgaaggttcaggagaaaaaggatcagcaatacgggattgcgcgaagaatcttgtcccagttgtcctcgcaaaccgtggagcagcagatgccgctgtggcttaatgaactgcagcaactggagcaggatggattggagcaatcgagggcgttgcaagagctggaccgtaacaaagtagagcttcagcaagaaagaaaagctgcatccgcagagcaactcagaatccaacaggagttgacggagttgcaagcttggcgggaccgctacgagcaggagcatcaaaaggtcaaaatcgctttagcaaatttacatccctcctgggagcggatggcttccgttcatgacaagatggattcgattcgggagaagttagcggacgggctggcgctgagaatgcagcagaagcagcaactgctgcataaggaacggttggccttccgctacgtggatgattatggggagcaggaggagtttttcgcggatcctcaagttgcaagactagctgagcaatggagcaaccaattttcccttttggagattgggatccgatacgcatcggctgttccggattcgtccgatgataagcagttatgggctgtgacactagtgacgacttcgcaggagaagccgcttcttatacgcaagctatccgagacagctgatcaactgcagtatccgatccgcattttgtccactcaggaagcaaaagtgttggtcaacggcagtcccgcggacgaatccgttgcggaggaagatggagcatgggtggaaccggcccattggaaaaccctccgccaaatcgatcgattccaggaatggaaacgggagatcgtacgggagtcaaaggcggctgaggagaacaggcgggagaaggaacgggaacttgaggcatggcgggatgtccagaagcttgcagaagagttttttcgcgactatcccttgatggtcgttcatgagcaagagcaggctaatgccgatcgattggagctgcttaagagtctggaacagaagctaacccgtatcgagcaggagcttcagcaactggataacaagaaggataagctgagggaagcccaacaattgcttgcccagcgccagaggcaagtggagcatcagttggagcaagggcagatctacatgcaacttgccggggaactaacgaggatcaaggagaaattgcagtttgcccgggaagctcttcacaaagccgatcgatctctgcacagatggaatcagagaatggaacttcttgaccagaggctaaaggtgcaggaggaaaaacgtgccgatgttcacgggaaactgctgcggctgcgggaggacgaactgtatcaagaggttcaggattgtgtgccgcttcctgtggatgaatcgatagttcagttgcgtgaagaacgcaagacgcttgagttgcagcggcaccgtatcatgaaggaacggtcggcgctggagcgggaactccgagatcaacgggatcggcggacagaggcttcccggcaaatgaagcgtctggcggatgcccatgacggtttggatacggagttggagcttccgctgcatgtcgagtcaaaacttgaggccgctttggcagagtttcgtacactggagaagagagttctgcaggttcgtgaagtctggtctcagatgaatcacgaattgaccaagcaggaggccaaggtacgtttccaacaagagcaatatgccaaggaatttgataacgagcagccgatgatgtttttggagccgctcagtcgcgtgcgcgagaggcaagcaatcgagcgacagcaacaggatgaggtccgaaaagaacttgaccggctttatcttgttgtggaacgaagattggacgagacgcggcgggtactgcagttgtggaacagctatgtccgggtgcacaagttggatgatcctcttcttgaagtgcccgattcggatgtggagtccataggagagatcgtatatcgtctggagtccggcagtcaggacgtgatcagacggttggaacagcagcgggaagccatcgagaaagagcgggggaacgttgctcggggccgtcagcgattccgggaattttgccagcggcatgttaaggatgtaaagctgcgggagatggccgagcgcggtgtggaggtaaaggataattttgccgagctgcaggaattcgaggcgatgatgggtgccggcatcctgaaggccaatcagatcgctgagctgcggatgcagtcggaggatcagaagcttcagcagttcattacacatatccaagcccacttaaggcagattgcacaagaacttcgggagctgcccaagaggactcgagtccgcaccgacagcggcaataaggacatttatgttttccatgtcccggattgggatgagcaggagggcaaggagcgaatccgcaactatattgaatggattacggagcagttggagcacgccaagtatcgagatttggatggaacggaacagccggtggtcatccgcaaggatctcgagaagtggctggatgccaaacagttgctgcaaaaagtattccagcaaggtgcagctattcgtatcagttgccgtaaagtgaataacgaccagcaggtgacaggggcgacttattcctgggaggaatccaaccgctggtcaggcggagagaagtggagcaagaacatgaccttgttccttgggattctgaattatgtggcagagaagcgccagcatattcatagtcagatgaagcgtcaccgttcggtcattctggacaatccgttcggcaaggcttcgagtgaccatgttctcagccccgttttctatatcgcagagcaattgggcttccagttgatcgctttaaccgcgcatgtggagggcaagttccttcaggactattttccgatcgtttatagctgtcgcttacgtgcagcggctggcggaggaggcaagcaaatcatcgatccccagcagcaggttcaacaggcgtacatccgtgatcacgcgccggaatcgatggacaggatcggcggagagaaaaaacagttagagctgttttag

SEQ ID NO: 52058 - DNA, 1053 bp, Paenibacillus barengoltzii G22
atgatgcgatacaaacaaaaactgatagactttttatgcacatttcccaaggtaacggttggtctctcggaccttgagcgagcgttccaaggcgagcagattgactatgaaacattcgccgggatcgttttggagctcgaaaatgaggggagtcttggagcagtaaattcgcacggccggaacggaaagcctctttcgttagcctaccactatcgcatacacaagcgactgctgcaagaagagtatgttcgagaactgcatcagtggagctcgagattgcaccccgacattagtctagatatttattatggcctcagtccggacatatggcgtgcggacctgccttatattgaacagatcgacgcgtatttaaagcggggatcgcggccaacacggcaagcaccggcacccgaacgcagctatgagcttgtccgagacgagaagtggattacggatcacggaggacaagccttgttggaacgtttgggcatctgggagcagctccagattgtcccggtcagcgatcccttgatgttagcggttaacccttcaatcagatttgcaagcaaaaaacacttgcatctcatcgtggagaacaagtcgacattccaagggttggtgccggagcttccggggatggccttctcttccttgattttaggctatggccgaaaaattgtaggaaatctggggatgctccgtctgcagtacccggttcaaagcgcggaacatgaaatttactattttggcgatctcgatctggaagggatactgatctggtacgaccttcatgtgaaattcggggtagagctggcgctgcccttttatcaggcatgcttgaaaaagcccccggctagagggaaacaaaatcaccgattgaatgaagaggctttacgggcctttacaagacgttttaacaaagaggaatcaaatcagatcatcgccatgctgggtgaggggtgctatatcccgcaagaaactttgaaaagtgaagaattgattcgagttgggagggaagccgtatggagtcaaaagggatgccaatcgaattga

SEQ ID NO: 52059 - DNA, 1617 bp, Dorea sp. 5-2
atgcaatacgaatttttaaaacattttcccagaaggatgaagaatgtcgggctttatgcgctgctgatccagaacagcgcccagaagacgacctggaagcagtacggtttcctgacgctgggagagcagctgaacctgatcttcgcagtcatgctctatgtcatggagcagtccttgaaggaggaacactgtacgatggatgatgtgggcgcttatatcgacacggtcaataccgggcatttccagaaagacctgtcttacggcgagtgcaggcagcttggggattttgtggtgaatgtagtgctatccaacgaggggagggctatgtatttcgaagggtttgacttcgaggaaaataaatatcaggatctccatatcagttatgtggcaaaccggatcatttacatagaccaggagatcaagcgtacttcttattatctgacggatgacgggtataatcttctgctggcgacgctggagatcgaaaataatatgaagcttacgatccatgagatgatcttccggatgcatcttgagaagcagagttatgacaaagcagtagacgagatcaagaatgtgttcaatctgctgcggatccagttacagaagatccaggaggcgatggggaagatccggaggaatgcgctgaattattctgtgaaggattatgaagagatcctgcttgggaatctggataccatcagcgatacgaagcagaagttccagaactacagggagatggtgaagagccgggcgcaggcgttggaggaggagaatatcaatgtaaagcgtcttggagagaaggatgaggaacgtctctcgcatctgcggatcattgaatcgtatctgaaccgaacgattgatgagcatcagaagatattgaacagccattttgacctgaaagcattatatacgaaggagttggagacgctgacgcagatgtctctgatccggcgcttccctctcaggacagaattatatgacaaggtgctcgcgaatcccaaggcgcttgccgatctggatcttttcctgcgtccattgttcaatcaggaaccggataagacatataacttgaataaagcgttccagttacagcgtccggtgagaaaacgcatggaggaagacagcgcagaggagctggattttgacgaggaagcgtggatgcaggaacaggagatgcgccgcaaggagaagcttaaaaagtatgaagtgtgtctttgccggcttcttggttatgccgtgaagacgggggaggcatcgcttcaggagatcagcgtggctgtggaggggcaggtagaagaacgggagcagctgatcccgaatgtggagatcttcaaggagatcatggtggagctgatcaagaaccaggagattgacattgccgtgcttttgagggagcgcagcgagtatatccaggatatgccgggggaattccagttaaatgagatgcttttacatctggtggaggaatacccggaattccgtgggatccggagggtggagacttatcggatcgaggatgggggcactgtgacttttgaagggattttggatcaggacaaggcggcgaagacgatacggtgttctaatgtgttgatccgtgtagggaaggagtaa

SEQ ID NO: 52060 - DNA, 714 bp, Dorea sp. 5-2
atggcttatgaattagaagatgtccggaccagccaggagattttctattatcttctggaacaccatgagctttgtgaggatgaggagatgcaactctacagggcgtatacggagcaggaagagatacagaatctggtgaaatcccaaggggagattgccgagagccggatcgagcggtatgggaatgtgatctatctgatccccaaagaagagaatcatttccttgggttttccaaggcgcagctaaaggcggcgctctgtaaatcatcaggaacggataaggattattatctctcgcagtttgcggtgctgacgctcctggtggagttcttcgacggacagggcagcagcagtaaagcccgggaatacatgcgggtgggagaactgcagaattgtatctccagccgcctgaaggagggcgccgagagtatggatgaggaacaggaagagcagtcggggatcgcgttttcgaatatgcttgaggcgtacgaggctttgcgctcggatgacaaaggttccagggcgaagacgacgaaggaagggttccttcatgcgatcctggtatttttgcagaaacagggattgatcgagtatgtggaagcggatgagatgatcaagacgacgaagaagctggataattttatggattggaacctgctgaaccagaataattatcaccgggtgctgcgtgtactggggatagagaataagtaa

SEQ ID NO: 52061 - DNA, 4428 bp, Dorea sp. 5-2
atgagcaagattcaggcgatcaggctgatcaatgtaaattataataacaatgcgatccgcatcagcgacgagtgctttcatctgaacggcgagagtacgctcttgtcccttcggaacggaggcggtaaatccgtgcttgtccagatgctgacggctccgttcgtgcataagagataccgggatgcaaaagaccggccgttcgagagttattttaccacgaataagccttcttttatccttgtggaatgggtactggacggcggggcaggctatgtacttaccggaatgatggtgagaaggagccaggagacaggcgaggggaacacagagaatcttgagatggtcaatatcatcagcgagtaccgggaagcctgcatccaggatcttcaccaccttcctgtggtggagaaagggaagaaggagattgtccttaagaattttgcggcgtgcaggcagatgttcgagtcttataagaaggacaggtctatgagtttcttctattatgatatgacgaatgcggcgcagtccagacagtactttgagaaattggcggagtaccagatccactataaagagtgggagacgatcatcaagaaggtaaacctgaaagagtccgggctgtcggatctgttcgcagactgccgtgacgagaaggggctggtggagaaatggtttctggacgccgtggaaagtaagctgaataaggagcggaatcggatgaaggaatttcagtcgattctggagaaatatattgggcagtacaaggataaccagacgaagatcaagagacgcgatatcatacgtgaattcaaggcacaggcagatgggatccgggagaaggcagaggattatcagggaaagagcagccttgcaggaaggcaggagaatctggtcgcacattttatcgcggagctgtcacggcttcatgaggtgacggaggaggaataccagaggatccttggggaaatcgagtcgatacaggggcagctttccagagtagagtatgagaagctgtccggtgagatacataagcttgaggaaaagcttcggtttcacttaagcaaccgggacatgatcgagattgagaaggaggatatggagcaggattctgagaggattctgcataagctgcatcttcttgcctgtgcgaaacagcagaaggcagcggagcaggaaaggggagaattggaactgatccgccagaagctccttgtgtcaaggcagaaggaagaggacctggaaccggaacgcaagtctttgggatatactctgcggcgatattacgaggggcttttggaggaaaatgaaggaaagaagagggcaaatgaagaagagggcgcggcggtcgcagcagagctttctaaggcagaagggaagctatcggaactatctgacagcctgatcgagaatgcggcgcgcgcaggagggcttaagagtgcggcgtcgtcttatgaccgggcggaggacgggtataaccagcgttatgaagaagcgctgatccgtaatattctcggcgtgtatgagcctgggagcctggagatccgccggggagattatgagaaggagttagagacgctcagacggtcgcgcctgtcgcttttcaagcagcaggagcaggcaaatgaaaggagccgcagttctgagcgcgggcttcaggatcttaacgcagaggttctgaaagggaagatggagcttaggcagcaggaacgcgtgcggcaggagtatgagggtgaactggagaccaggaaggtcgtgctgcggtatctggatctgccggaggatgtgatttttgacagggagaagatcctgcacgggtcggaacggaagctcagggagattgcaggattccgcaggaaccttgagaaggaagaggacatcttgcagaaagagtatcagcgtctgacccagggaaaggtactggaattgccggaggaattagagcaggagcttgaggatctcgggatccatgtggtctatgggatggagtggcttgcgaagaacgggtattcggaacagcagaatctggagttggtgcgcgcacatcccttcctgccctatgggttgatcctgtccgaggctgaggtgggtaagctatcccggaatatgggcgggatatatacttcatttccgataccgatcgtggcaagggagaggttggagggtagcagagcggatcgggagagcgggatgatccggctagacggcgtcagtttctatgtctggttcaatgaaaatctgctgaatgaagagaagcttaaggatctggtgcaggagaaagagcgggagattgagaagaaaagggagtctatcgccatccggcaggcagagtataaggagtatttcgagcgtcaggagatgatccgcaaccaggaggtcagtaaagaaaactgggatacgaacgagaagaggcgcaaggaacttaaggagcagatcgacaggcaggagcgtacgatccgtgaggtttcggaagagctggcagggcttagggaggagatcgcaagattggaacatgcggtccgaagcgcggaccgcgagatgagccgccagcagagaaggcttgaggatttcgggcggctatgtaaggagtatgaggcgtatgagcagaacgtaaaggagcttatgcgttgtaagaaggaggcggaaaagcttaaggagaagcagaaattatgtaagaaccggcaggagaagctaagagaacagcagaagaccggggagatcgagcggaataacctgatccgggaaggagaggagatccgcagggaatgccggaagtatgaacggtatgagcgggcagaagaccgggcagaaggcagggaaaaaacaaaggaggaagtaagccaaagcattcgggatatggaggcgcggtacgccgcgattacttcctgcatgtctcaggagatccaggaacttgaggaacaggagcagcgtgccggaaaacgttatcaggacgcggcggatgaactggaacatttacggagaaaatatcggctttccgaggagaatctggagcaggtaagctatgatcgcgaggaggaatctcatcaggagatcatgctggaagactgtaaccgtaagattgccgtaaagcaaaggctctggaatgacgaggataagcagatcgccgtggtaaaccagcagaaacgtgagcgtctggaacgaatgaagtcggaatgcggcgaggaagaaccgctgcccagggaagagatccagaaccaggattttgacgcaaggaagaatcagttccgttatcaggagaaggaggcgaggaagcaggcggacggcttacgggaacgtcttcgcagctatggcgagaatctgacggcgctctcggaatacagtgacttcccgttgggggacgaggtggagtgggagcaggattttgcggagatggacgcaaagagccttcggaatttcaaaggcatcctgctccgggattataatcagatgcttcgggattgccgggaagcacaggatgtacttacccgtcacctgaaccgtaccgtgcgcatggagcagttccaggaggatttctaccggaaaccgttggaagcgatgcttgagctcacccaggatgcgtctgccgtgctgcggcagctctataccacgatccagtcctatgacagcctgatggaaaagctggaggtagatatctcccttgtggagaaggagaagagcaagatcgtggagcttctggaggattatgtccgggaggtgcatctgaatcttggcaggatcgaccataattcgacgatcgcgatccgggagcggcccgtgaagatgttgaagatcgggctgccggagtgggaagagaatgagaacctttatcagatccggctgcaggatatgatcgacgaaatcacgcagaaagggcttctcttatttgaccggaatgaaaatgcacaggagtatttcggaacgcagatcaccacgagaaatttgtatgatacggtagtagggatcgggaatgtgcagatccggctgtataagatcgaagcgcagagggagtatcccattacctgggcggaagtggcgaggaactcgggaggagaaggattcctgtcggcgtttgtcattctgtcgagccttctgtattatatgcgaaaggacgatacggatatatttgcggacaggaatgagggaaaggttttggtcatggataatccttttgcccagacgaacgcatcgcacctgctgaagccgctgatggacgtggcgaagaagacgaacacccagctggtgtgcctgacggggcttggcggggattcgatctatagccggtttgacaatatttacgtgctgaacctgatcgcggcgagcctgcgaagcgggatgcagtatctgaaggcggaccacttgcggggaaatgagccggagacgatgatcgtgtctcagatcgaagtgatggagcagcaggagctgatattttaa

SEQ ID NO: 52062 - DNA, 987 bp, Dorea sp. 5-2
atgaagcgtatatccctggaagaattgatctgcggcaggcaaaatgctgcatacaggcagcaatatgaatatatacttgcgctgatcttagaaggaaagatcaagcctctgaaagcatcgggcacgaacgggaagagccctgcgctttaccgcgaatactggttggcagaacctcaaaaggactatagtaaatgggaagaagaactgaaatatcagctccatcctatgatctcggttgatcattacctgtcgcatcttgcgaactatgaacaggacaggcagtgggttctgatgctgagtgaatatttgaagaaaagcagggaaaaattgagatattcagagtctgtgaatgagagaagctttgagatctggggccatgagaagttcttaagccgcgggcagggaaagcggatcttgaagaactgcggcatggaagaaggcttccttaatatctaccagacaacggaaccgctggcttattattcccggacaaggcaagtgccgcagaatatattgattttggaaaataaggataccttctatagtatgcggaggcacttaatgggtgaagacgcagttatgggtatggagatcgggacgctgatctatggcgcgggaaaggggatcttgcgttcctttctggattttgacctatgtgcggagccttatatgaaggattgtaagaaccggatttattatttcggagacctggattatgagggcatcggaatctacgaaagccttgcccaaatggctgcagacaggcgaaagattctgccgtttgcgaaggcgtacgaggctatggtcgaaaaagcggacgtgacatgcgggatgaagaacctgccggatacgaaggaacagcagaaccggaacatacgggaagattttttctcgcattttcgtgaggataggaagagcaggatgaaagaagtattggaatccgggaagtatattccgcaggagatattgaacatcactgatttttga

SEQ ID NO: 52063 - DNA, 1620 bp, Lachnospiraceae bacterium 3-2
atgcagtatgaatttttaaaacattttcccagaaggatgaagaacgtggggctgtatgcgctgatcatacagaacagtgcccaaaagactatatggaagcagtacggctttcagaagcttgacgagcagctcaacgtaatctttgcggtaatgctctatattatggagcagtccttaaaggaagaaaactgtgtgatggacgatatcggggcatacatagataccgtcaatatgcagagcttttgcaaggatatgacctatgatgactgcagaaagctgggagattttattgtaaatgtggtgctgtcaaatgaagggaaggtcatgcattttgacggttttgattttggaaaaaatgagtaccagagtatgcatatcagctatgtagctaatcggattgtgtatattgaccgtgagcttaagcgcacgtcttattatctgacagacgacggatataacctgatgttggcgactcttgagattgagaataatatgaagcttaccatccatgagatgatctttcagatgcatctggagaagcagagctatgataaagcagtggatgagattaaaaatgtgttcaatcttttgcgtatccagcttcagaagattcaggaggctatggggaagatcaggcgcaatgcgctgaattactcggtgaaggactacggggatatcctcaaagagaatttgcagacaatcgatgagacaaaggagaaattccagaattacagagaacgggtgaaaagccgggtaaaagagcttgagcaggagaatattgacgtaaagcgcttagatgccaaggatgaggagaagcttaactatcttagggagattgaatcatacttaaatcgcacgatcgatgagcaccagaagatactggggagccattttgacctgaaggcgctgtatacgaaggagcttgaggagctgatacagatgtcttttatcaagcgtttttccctgcgggcagagctttatgacaaggtgcttgagaatcccgaagctcttgagcggctggattattttctaaggccgcttttcgggcgggaagtggataagacctataatctaaataaggcgtttcagctccagcgcccggtgaagaagaagcgggaggaggacactcaggaggcccttgactttgatgaggaggaatggcagcttgatcaggaaaaacgtcggaggaagaagcttaagcgctatgaaaagagccttggttttcttctcagggagacgaagggcaggggagagcttacccttaaggaactcagtacccgtctggagagagccggggaagacaaggagcagcttattcccactgtggagattttcaaagagattatggtggagttgattaagaaccgggagattgatattgaggcgctgaaaagggaacgcagcgaatatatccaggatcggccgggagagtttcagctcaatgagatgcttctctatctggtggaggaatatccggagaacagcgatatcaagaggatagaggttaaccgtattgaggacggcagtacagtgtcctttgacggtattttgaatgaggacggaatcaggaagagcatccgctgttcaaatgtgtcggtgcgggtgaaacgaaaggaataa

SEQ ID NO: 52064 - DNA, 717 bp, Lachnospiraceae bacterium 3-2
atggcttacgaattggatgatataaaggcgagccaggagatcttttattatctcctggaaaaccacgagctccgggaggaggaagagatgcttctttataaagcatacacggaagaagaggaagttcagaatctggtgaaatcccagggggagattgcgggcagtaccatcgagcggtacggcaatgtgatttacctgatcccgaaggaggagaataattttcttggattttcaaaggcacagttaaaatcggcgctctgcaggtcgggggccacggacaaggattactatctctcccagtttgtgattctaactctcctggtggaatttttcgatgggcaggggagcagcagcaaggcacgggaatatatccgggtaggcgagctgcagaaccttgtctccggccatcttaaagaaggggcggaaaatctgggcgaggaggaagaagagcgggcgggaatcgcattttcaaacatgtacgaggcgtacgaggcgctaaagtcggatgagaaggggtcccgggccaagacaacgaaggaaggattccttcaccatattcttttgtttttgcaaaagcaggggttgattgaatacgtggagcaggatgagatgataaagacgacgcggaagctggacagcttcatggactggaatcttttgaaccagaataattaccagagagtgctgcgtgtactgggggtggcggaaaatgagtaa

SEQ ID NO: 52065 - DNA, 4524 bp, Lachnospiraceae bacterium 3-2
atgagtaagatacagacagtgcggctgatcaatatcggttacaataataatgcaatccgcatcagtgacgagtgctttcatatgaacggggagagcacccttttgtctctgaggaacggcggcgggaagtcggtgctggtgcagatgatgacggcgccttttgtgcataagcgataccgggatacgaaggatcgtcccttcgagagctattttactacaaataagccgtcttttgtgctggtggaatgggcgttagacaatcaggcgggctatgtgctcaccgggatgatggtcagaaggagccaggatacttcggaggggaataacgagaatctggagatggtgaatctcatctgcgagtataacggcccctgtgaggaagacatccatcacctgccggtggtgaagaaagataaaaaggagatgaccttgaaaaatttctccgactgcaggcagctcttcgagggctataaaaaagaccgctcgaagaagtttttctgttacgacatgacgaatgcggcccagtccaggcagtattttgacaagttaatggagtaccagattcactacaaggagtgggagactatcattaaaaaggtgaatctcaaggaatccggcctgtctgagctgttttccgactgccgggatgaaaagggacttgtggagaaatggtttcttgacgcggtggagagcaagctcaacaaagagaagaaccgcatgaaggaatttcaggacacgctggaaaaatatgtgggccagtataaggagaataaatccagtatcaagcggtacgatacaatccagaagtttaaaggggaagcggtcagtatccaggagcaggccggggagtatcaggaggcagaggaaaaaaagcgggcacaggagaaccttgtggcctgttttatcgcgcagttaaacagcctccacgaagtgacgcaggaggagcttgataagacgcgggagcaggaggaggaagtcttagtttcgatggagcgggtggagtacgaaagactgtcaagcgagatacacagacttgataaagagtgtcgcttccatatcagcaacagggacatgctcgacagtgagaaagagggtttagagcacgaggcggaaaggattgagcggacgcttaaccttctcctgtgtgcgaagcaggaaatagctcttaaggaagaggagagcgagcttgaatatatccgccagagactgcaggtagtcaggaaaaaggaagaagacctggggccggagaggaattatctcggctatactttgcggcgctggtatgaagctttgctgaagaggaacaaggaggagtgcgggcagaatgagaaggactgccgcaggattttggaggagattgtccgtgagcggataaagcttaccgaccttggacagaagctctacgagaatgcttcaagggagggagccttaaagagcaggacatatttttacgatgagcgtgaggaagagtttaaccagcgctatgaggaggagttagcgcgcaatatccttggagagtatgagcccgggatgttagacatcaagaaggcggcctacgaaaaggcgcttagtgaggagacgagacggcgtctcggcatgagaaggcagcaggagcaggaacgagagaaaaagaagagcatggagcgcagccttgaggatatgcgcacagagaagattaaaaaaagcgccgggctttcccagcagaaaaaattgagagaagattatgaaaaggagcttgaggaacggcgagtgatcttgcggtatctgaatctcgaggattccctgatgtttgagcggggcgagattctgcgcgtgtcggagagaaagcttttggagattgacagcgtcaggaggaatcttgaaaaagaggaggacgctctccagaaagaatatcagcgtttgactcagggaaaagtgttggagctttccgaggaggtcaagaccggatttgaaaatctgggaatccatgtggtgtacggcatggagtggcttaagaagaacggctatccggaacgtaaaaatcaggagttggtaaggagcaacccgtttcttccctacgccctgatcttatccgagcaggagcttagtaaattatctgccagcggcactgagctgtatacgtctacgccgattcctatcgtcttgagggaaactcttgaggagagcagggaagcagacggcggtggggttcaggtatttcccggtgtcagcttctatgtgtattttaatgagaatcttttggacgaggaaaaactgggacttcttgtgcaggagaaggagcggcagattcagaagaaacgagaagtgcttgctgtccgccggacagaatataaagaatactttgaacgccaggagcagcttcgaaaccaacgggtagacaagcttaactgggagcagaatgaaaagtctatcgaaaagttggaggaagagattgcggcgctggaggaaagcttaagaaagacatcggctgccttgtcgaagctcagggaggagaccgaaaagcgggagcaggatatccgaaaagcggaaaaagagattgaacgtcagaaaaggcggcttgaggatttccagagactttaccgggactatgaagcctatgagaccagcaggcgggagcttgagaagtgccgacgcgaaaaggataagcttgaggagcggcagaagcttgccaggaaccaggaacaaaagcttcaagacgagcagaggacgaaagaggccagaaaggacagccttgcgagggaacaggagaaactttgggaaaatatccgtaaatacgagcggtatcagagcattccaaagggagcagccaagccaaagatacttgagagcggcaatgcagatatctgggcgaggtttcttggagacgcgggggaagaggcgaaagagccgggagatattcatgatgcgtatatggagaccgcggacattgacgctgcggatatccgggagctggaggcaaggtatgccgctatcaccatgagcatgtcccaggagcttcaggagttggaagagcaggagagaaagactgcaaagcgctgccagaatgcatccgaggagcttaagaggcttggaggaaaatacggccttcgggcggatgagtggaaaggcgtttcctacagccgcaaggaggagcagcatcaagaggccatgcttgaagaacgtcgggaaaagataacacagaaacagcggctctggaatgaggaggacaaaaagattgcactgatcattcagagaagggaagaccgcaaaaaggagatgttagaggagtgcgggcaggaggcgccgcttccggaggataagattcagaatcttgattttgcagccagaaaaaataagctggcttatgagaaaaaagagcttcaccgccagcaagagggctataaggaacggttgaaaagctatgatgaaaacctgacggcgctttcggagtacaatgattttaaggtagtcttagaggtggaatgggagcaggatttcgcggccatggacgggaggaagctgcgtgaatttaaggggatgctcatcagggatttcaaccagagcatgagaaaacgccaggaggaaaaggaacatcttgctcatgtgctcaaccgcattgtgcggctggaagattttcaggaggacttctacaagaagccgttggaggccatgctggagcttaccgacgatgcctcgcaggtgcttttgcagctatctactactatacagtcttacgacagtctgatggagaagcttaaggtggacgtgtcgctggtggagcaggagaaaaataatatcgcggggctttttgaggactatgtaaaggaggttcaccggaatctgggcaagattgactgcaattctacgataaccattcgaaaccgtccggtgaagatgttaaagattcttcttccggagtgggaggagaatgagaatctgtatcggattcgtctccaggatatgattgacaaggtgacccagaagggcctggagctgtttgagaagaatgaaaatgcccaggaatatttcggcatccagataactacaaagaacttgtacgatacggtcatcggtatcggaaacgttcagatacggctatataagattgaggagcagagagaatacccaattacttgggcggaggtggcgagaaactccggcggagaaggatttttgtcggcgttcgtcattttgtcaagcctgctttattatatgcggaaagatgatacagacattttcgcggacaggaatgaagggaaggttttgatcatggacaatccgtttgcccagaccaatgcgtcccatcttctcaagccacttatggatgtggcagaaaagaccaatacccagatgatctgcctgaccggacttggcggcgaatctatctacaaccggtttgacaatatctacgtgctgaacctgattgcggcaagcttaaggggcggcatgcaatatctgcgggcagaccatatgcggggcgatgagccagatacgatggtagtgtcgcagattgaagtgattgagcagcaggaattggtattttag

SEQ ID NO: 52066 - DNA, 993 bp, Lachnospiraceae bacterium 3-2
atgaagcgggtgtctttggagcaattggtttctgcgaaaggagagatttcgtatctgcagcagtatcagtacattatggagctgatggaaaacggaaagattaagcctttgaaggcttcaaagacgaatggaaagaagccggcgctttaccgggaatactggctaatagaacctgagaaggattacagcgctctaaaggaggagctaaagtaccgtcttcatgggcggattgacgtggattattatctggaacatccacaggtatatgagcgggagaggccgtgggtgttaaagctcagtgattatcttaagaaaagcagggaaaaattggaatataaggtatcggtaaatgaacggagctttgagatctggagccgggagaagtttcttacgaaagaacagggaaaggcagtattaaagcactgcggtatcggagaagattttcttaatacctatggaaccagtgagcccttgtcctactattcaagcacaagacggacgcctcagaatatggttattttggaaaataaagataccttttacagtatgcgaagccacctgctcggggggcatgaaaggatactcgggatgccggttggaacgttgatctacggagcgggaaaaggaattcttaagcgtttttctgatttttctgtctgtgtggaaccttacatgacggaaaaggagaacgggatttattattttggagatcttgactatgaaggaatcggaatctatgaacggttggcttcgttgtttcaggaggagtgggagattgttccgtttgtgagtgcctatgagcggatgctaaaaaaggcggaagacgggggcttagatgggctgccggagacgaaggagcagcagaaccgaaagatcagcggagcgttttttcagtatttttctgaggagtcgtcagaaaagatgagggcagtgatagagagcggaaggtatattccgcaggagattttgaatatatcggatttttgccggtga

SEQ ID NO: 52067 - DNA, 1440 bp, Streptomyces albulus CCRC 11814
gtgaaggcactcgcggtcgccgacccggtcctcgacctggaacgccgcaagccactgctcgcctcacgcgggtgggccggctaccaaatggaggaattggcgctcaccgccatcgacaccgtcacactgaagatggacttcgacgacggtgcacgacacgaggacattgtggccgccatggcacgtgtcgcagggcttcagatgccgcagcacgaccgtgacgagcacaccgccgtggccggctgggtcctcgacaacctgctgaacgttggcaccgtcgaccgcgacttcagccacctctacggaatcgtctccaacagcacctacaccgcgcatgccttctccttcaagctgctgcgcgaagtcccaggacccgacggacggccacggctgcgcgcctccaacgaagcgatcgcggtactcgtcggcgcggtggacctcgacatcgcctccgaacaggtcgctgccgacgccaagctcgaagccctggtgcgacgagggcggctgaccgacgcccaccgcgccgcggagatggcgctgcgccgcaccgtgcaatacaccgaacacatccgcacacgcctggaaggcatgcgccgggacatctgctcggttgactgggtccgtgacgtgcaacgcatgcagaccgaagcgctggaacacatcgaggaccgcatcaacgccgaaaacaccatcaaggacaacctggtccggatgatggaaaacagcaccgaagacaccaccccggcccaggctgccgagctgatcgcgatcctccaggagtgcctgcgtagacacgcgtcactgcaggcgaacctgcaggaagtaggcgaacggttccgcgccgaacaagaacgccagagtttcgtgccgccccccagccgagcccacgtcgccctcgaacgccagctgctcgtaccggccctgcaactgccagtacggcatgcctatccactgctcagcacgttcgcgacggcggtgaccccgccgcaccgcccggcgatcatctacctcccggacctgatcgccggcctgatgacgtcgccggccgaacccgacggcgacgacggcctgatcatcgagcccgaattcggcgatgcgctagacaccgccactttctccgacgagcagtacacggccgtcgcctcactgctgaaacagaccgacaccgacggcatccgactgtccgaccttttgaacgcagcacgccagcacggcgtatcggccggacagcgcaacctcgaccatctgctggccttgcacgtactgggtctgttcggcgcaccgcgccacgaccccgagcgcggcacagtactggcagccttggccgacgaccgcgaactggacgacgaccggttcgcgggccacgacctcctggtggtccacaacccggcagcctccgtccagccggccgccaacgatctcgaggagggcgcggcgtga

SEQ ID NO: 52068 - DNA, 4497 bp, Streptomyces albulus CCRC 11814
atgtacgaactgaaccgcatccgtctgtacaacatcggcccgaccggggcccgttacggcgacgtcctgctggagctgtccgagggcggctcaccgatccccgtcagcactctcatcccagcggccggccagctgttccggcgcccagcaccggcgacactgctcgtgctggagaacggcggcggaaagtccgtgctgatccggatgctgctgtccacggtgctgcccgagaggcagtcccgcaaaggccgtgaggcactgcgcgcgtacgtggtgtccgcggcagccccctcccacgtggtcatggaatgggttcatgtccgcaccggtgagacgctggtgaccgggcaggtgctgaccccggccacggacggcaccgtggagcggacgttctactcgctcagccccaacgccgagacgaacctcgccacgctgcccttcgccgagggcgggcgccggctgcggatgaacgcctaccaggacgcgctcaggcggctggacgccggtgacaagacactccgcctggaggtcgaaaaacggcagggggagtgggagaagcacctgcggcggctcggcctggagccggacctgttcgcggtccagcaggcgatgaacgtcgatgagggagacgcggccgaggcattcaagaccaccactggccggcagttcgcgcagtggctgctgagcaaggcgatggacgccgaggacttcaccgagctgggtgatgcctttggcgcctatgccaaaaacatcggccgacgcgagcaactcctgctggaccgcgacttctccaccgccacggccacagccgccgaacacctggcccgccggcacaccgagcagaagacggcagccgaggcagcccaccacgccgcgaaggcgctggcacacctcgcggcacaggtgcgcacgtccgtccagcacgcggacgaggcactgcacgcactgcgtgaggactccgcgatggcgaaggagaacgccgcacaacagcagcaggcccgcgacgaggccgacctgctccacaaggaggtgcgacgcaggaccctggtgctgcgccgcgacgcggcccactcccggaccgtccaggcagaggaacagcttgcagaggaacgcagcgagctagctgcctgggccgtcgtacccacggtgctgaaagccgccaccgcacacgagaagtaccgggtcgccagcgaactactggacgacgccgaactggccgcgggagctgcccggctccgccgcgaccaggccggcgcctgcttcgccggcgccctgcaccgcagcaggcagcagtgcgcggagcaggccgacggactggaccgcaagagcgcccacagcaagacagcggcagccgaggctcaacgcggcgcggccgaaggggagaagcaggccaccgcgcgcaccgtccgagccgaactcctcggccaacaagtcgagcgcgtggactctcgccataaggaggcccggcgggccggcctgatcgccgaagacgaatccgtggccgaagccgacgcccgcctgcgtgccaaagccgccgacagcaagatccaggcgacgcgggaacgcgaggagtgccagaagctcgagcaggaggcccgccggctcgacgaggccgcgaatcagctgatcgagcccgaggtcagggcccggcaggcgggggaggccgcgatacgggcggtcgaggacacccagagggccgcggcagaacttgccgcccagacgctgttgcgtgaactcgccgaactcgacggtgacgaggatgcacccggcagcgaccccgcgcagtggctggaagacaacgcgtccccgctgcgtaacctggccgccgcggcgcaagcgtcggccggccagcagctggacgcgctgcgcgccgacgaccgggcggaccagcggctgatcgaagccctcaccgtcgaggacgaggccctcatgccgccgcgccaggccgttgaggaccttctcgagctgctggccgagcaccagatcactgccaccgcgggctggagggctctggaacagctggtgaacccccgcctgcaggccgcatccatccaagcccaccccgcactggtcgacggcatcgtggtggccgaccaggaaaccctgcagagggcgcgaaccctgctcacacagatgccgcagctgccggccgcggccgtgctcgtctccacccccgagccactggaaacagaaccgccccagccgagcagcggattcgtcgtggagccgacccccgccctgcacgactcccaggccgctgcccagctgcgcgaacaggccgaagcacggatcgaagaacgccgccgagccctgcacgaatgcgccgaacgccaggcagcagccttccagctggaaggccagctcacccactggctgagcaaccacccggcgggatacatcgagcaactgcgctccttcgcgaacgcccaatcggccgcggccgccgacgccaaggccgccctcgacaccgcccgcgccacatgcctgcaggccgcaaacaccctggccgcgcgcaccaccaccgtccaggactccgaacaagccgccctggaggccgcccgcgccgccgattccttccaactgctcgcccgagaggccggcgacgccgacaagaaccgcgcagagatcccgacacttcaaacagaggccgaagaacatcgcacagcagcccaggaactgcgcgaggcagccgaccgactgcgcgaccaagccaccgaatacgcggtgcaagccgagtcgctccgccgcgacgccgccgcttacgccgcccggctggacaaggtcgtctacggagaccagcccctcaccctcggccccggtgaacacgacctggccgcactggagatcgcctaccaccaagcggcagagggcttccgcgccgtggaagtcggcgaggaccttcgccggcgcgtagaagaggcgcagaaggaaacaaccgaccgggatgccgaactacgccgtgaaccggaagagaccgtgaaccgggccgaagcactggcagcatccgcagaagccggcagcgccgaaaccatcgaggccacgaaacggcggcttggccgcaccgtgcgcagcctggagacccagtaccgcactctgagcaagcacagcggccgactggaagcagacgcaacaaccgccggtcagcccagcgggaaaccctggaccactctcgatgccgactggaccccctcggaccccgccgacggcacgcagctcaccgaacgggcagcctccgcgctgaagaacgcagaagccctgctcaagacagccgcggagacacaacgggccaccgaacgcaaactccgcaccagcgaagccgcgtcacgcgagatgaccgtcgtccaccgcagcctcaccacggccacccgcagactggaactgccgtccagcgccaccccgttcaccggaaccgccgacgaagcacagcaggccgccgaggaggtaatacagacccacagcaccgcaaccgaacaattatacgaagcgggtcgggccgtcaacgaagccgtcgtgcaattccgcgaagcggccaaccagaaccgattcgccaagctcaaggcaccgatctcccaacaactcacggagatcgacaccacgtcgctgatcgagcgcgccgaccagtggacggttcaactcgcaaaccgggccgcaagcttgaccaccgacctggaagactccgaacgccaccgcaaactgctgatcgaccagctcaaacaccacaccaaccaggcactggccctgctggaaaaggccgagcggctctcccgcctgcccgaaggcgccggggcatgggccaaacagagaatcctgaagatcggcttcagcacaccggagccgcagatcctggccatacggatcgccgagagcctcgacgagaacgcccgcacccagccccacctgcccggccgcgacctggtactgcgatgcgtcggcgccgcggtcccacgcgacttcaaggtggagatcctcaagcccgacgccgccggccgcgccgaatacgcatccatcagcgacatgagcaaagtgttctccggcggccaggaactcaccggcgcgatcatgctgtactgcacccttgccgcactacgcggcagcacacggaccggagcccgcgccaccagccgccagggcggaatgctggtcctggacaacccgatcggcaaagcgaacgccgactacctgctgagcctgcaaatgaacatggccgccgcactcggcgtccaactgatctacaccaccgggaacatggaagaccgcgtgctggccacgttccccctgtgcatccggctgcgcaacgacaccgaccaacgcaccgggacacgccacctgcacgtcaccgaccacatcgcacacgaaacaacgccggacgaaggcggcgccaccggccaactcctcgccgcacgactgctggtgaaaccacgtgacccccacaccccgctcgaaaacagcgacgcacgtcaggagaaccaccacgaccagatggctaccgaccagtga

SEQ ID NO: 52069 - DNA, 1086 bp, Streptomyces albulus CCRC 11814
gtgagcaacaaccgaggcgacacggagcctgaaaagcaaccgctgtccccttcagcggcctgcctggcaaccaccctgacctcgaggacggaacaccgcgtcgaacaggccacgatcctcgacgccttcacccaggcatgccccgagacagccggcaccacccaaagccgccccgtcctgtccgccctgctcgacgaactcgccgaccaccacctgatcgagctgccacgcacacgtgacggatgggacaacgcacagccaccgctgccgcgctggctccgtctccccgcaccacccaaggccacagaacccagaacagcacgcacagcacccctcatgtggcgccgggaactctcctgggcaagcgccatcaaactgaccaccgcccagaccgagaccctcaagacgatcaaccgctggctgcgcgacaccgacggggacacccaccggcggaccatgatccccatgcgcgaacgctccctggaaatcttcggcgacgaaaaacgccttgacgcactcaccaccaccacgctgttcgcacctggacgcctcaccctgactaccctgttcaccgagcggatcccaccacccctggcctatgaacacctcgggggcggcggcaccgtcctggtgatcgagaacagcgacaccttcgcaaccgtcagcacactgctcgcccaagaccccgggtgcgtcagctatgtggcgttcggcggcggccacgccttcgtggcttccgtcacacgcatcgcgaacctcaaaggcgtgacggacatcgcctactacggcgatctcgacgatgacggcctcaccatcccacagcgagccaacgcatcaggcacagcatcaggactcccgcccatccgacccgccctcggcctctacaggctccttctcaggcaggacatccaaggaccggccccgaaacaagtcgaccctcttgccgccgaacgacgcgtctcctggctgcccgaacccctccgccacccagcggccaacatcctcaccgccgggaaccgactggctcaagaagccacaggaataacactcctccagcaggaccactcatggcgcgacgacctgtaa

SEQ ID NO: 52070 - DNA, 1551 bp, Coprococcus sp. HPP0074; identical to SEQ ID NO: 51868

SEQ ID NO: 52071 - DNA, 717 bp, Coprococcus sp. HPP0074; identical to SEQ ID NO: 51869

SEQ ID NO: 52072 - DNA, 4413 bp, Coprococcus sp. HPP0074
atgccgcatattaacagaatccgggtaaacaacatcaaatataacgtgggaactcagttttatgacgacttgtgccttcggtttcaagggaaaaacagcctttatgatctggcaaatggagggggaaagagtgttctgatgcttctgcttttacagaatctgatcccaaactgtacactggatgacaaacagccggtagaaaagttgtttcggggaagcaccgggagcagtgtcattcactctttgatcgagtgggaccttgacaggccggatcaggaagagtgtggatttcggtttatgacgactggattctgtgcacgaaagaaggcagatcggatcaaagagggggaggaggaagtctcatcttcggcgattgaatattttaactactgtattttttataatgagtttaatgattatgatattttaaatcttcctcttgtaaatggaaaagagcgggttacctttaaagggctaaaagaactcatcaaacggcttcaggccgaatcaaaccggaagctttcagtgaaaatttttgaaaattccaaaagtgaatatcaaagtttcattgcaggacatggattatatgagagtcagtggaacattatccgcgggatcaataagacggaaggtcatgtacgtacttattttgagagcaattataggacaagccgaaaagtagtagaagatcttttgatcgaggagattattcaaaaggcataccagcttcagaccggtaaggaaaaggatgctgaagaactggcacagacactgttggatatccgggaacagatggtagaactgtcaaagaaaaaggagcagatttctaattacgacaggcagattacggtgattcaagagtttctgacaaagtttgaaccattgttacagaactttgaattgtgcagggaaaatgagcagaagacaagcgtattttatcataccctccttgatgaaagagagcggattgaggcagaagcggagcaattggaggaagcgctacagaacatgcaggaacaacagcaggaaacggagcgaatcttgttgactttagatctgcaggaactggaatgtcatcttgatgaagccaattatgaaagagaacagaaggaaaagcagaaagagcagttgaaagaggcagtcgaagaattaagacagactgtgacagagaaagagtctgtccagtattttcttaattacgcaaaagcacagtcgcgggcacatactatcgaggcagagatggagcggatgaagcagggaaatgaggaactctaccagtctttactggagatgactgcccagaaaaaaagaaaagatgagcagatttttgaacagcttaacaggcagaaagatgaggctgagaaaaatcgagagacttccagaagagaaaaggaagaggcagacaaaaaggagcgggaaagcgataatgcccgcgctgtattaaaaagccgtcttatagaaaatgagaaagagcgcaccgctctgcaaaaagaaatcggcgaggggatgaaagcattcccatttcttctccgggagcagattaaggatacgatcatagaaaaagaaaagaaagaagatgccgagcgagagtcgaagagaacgctggaacaagagtgtgagacgataaaagaacagcttcagtcagacaggctgatggctaaggatctggagcatgaggcaaaggaattgcatacaaaagaggaggaatgtcaggcacagctggcaatctatgaggagctgacagaaaaagtagcacagagaatggaagtatatggcgagaaagatgtctaccggttactggagttgttaaaggagaaacagcgggagacgatcattttgctccatgacggacagaaccgtcagtcagaactgcaaaaacagctggagcagcttcaaaaaggaattttattccaggtaactccggaagcagagcagctgaaagagtttctttaccgaaaatacggggatggagtgcttggcacagagttgttagagcagatgcagggggagaaaaaggaagaggtgcttggccggattccatacttgccgtacagcattgtcgtcgggcaccggatctacgagaagatccttgcagaaccaaaaccggaagagtggcagaatgtaagctggatgatcccggtcgtggatcagacatatctggagcatggacagtttgatgcaggggacggagtgatgtttgcaggaaaagaaactgcgtattttctggaaaaagagcagctggaaaaagaaatacaccggacagaagaagtattgaatctggaacataaaaagcaggaacagttgagagaacaacagaaagtgctgacagcggacacagatggcgtgcaagagtatgtgacaaactatttcgaaaactatgccggttggctggaagaacagcaggagagaaaagaaaaaagagcacaggtgatggaggcacaggaacagttaaaagagaaggaaaagaaactgtgtgcaagagctgcagagctggagagaaagattcctgaaagtgcagcaaagattaagaaactggcagaggagatcctgtccttgcaaaggctggaggacatatttagaaagtcagatcttgtggaagcaaatcaaagggagtggaaggaaaagaaagcagagctggaactggaaaaggaaacactttggagactggtgcaggcaaaagagcaggagatttctgaggcagacggacgaatccggcagattacggcacagattatggaacggaagatgggatgggagagatatgctacctattataaagaagagattccgatccaagaaccgattccggaacgtctggaggaagagttggatggtgccatcgcagcatttgaaaaggaaaataaagatgtaagagaaaaaagcgagacacttcaggttatccgggaacagattacatcctatctgcgagaattaagaagcagaaaggcagatgtaaagatgctggaacagctctatgaggagcagaaacttgcggaagtgtccgacgaagagattgaggcgcagaaagaacatctgatggaggaagagaagctattacaaagatgtgagaaaaaagtatcggagctggtacttgcatgtacgcgattccagtcacaggcagatgtgatcgccgggcagatcagggagagattctaccgaatcgagcggctcccgattgcagcagggacgattgagatagagaaggaacggcagaaggagctacaacagcagtgcaagagagaactggcagaattgttccggaaacagaaggaaactggaaaagcgcaggaagaaatccagacgatgatcggaaagattacatgggttgcagaagagtatcacatcaaagatatgtccgtcaagacacttccaggatttgttatcttagactggaaagaaaccgagcgtcagatcatgagtggatggcagaagatgaaagcgagaaaaacagcggcagaaactgcatttggcaaggcaaaggcgtggtgtgaagagacactgaccggacttggcgcaggaagttttgcactgcagatgaaagaacagatcccggttccgcaaagttttgaggaggcagataagacgattaagcggttggaagaagcatgtgtgatgatccaaatgggaagagatcagattgaggaaagccttcgtgatatcgagaagattaaaagtagttttgaaaatcaatgtttacagcggtgtaatacgatccgcatggaactggataagtttccgaaactcagcagtattatgatcgatgagaaactgacgcagatcgtccggttgaagattccatatgtgagagaagaacagcagcaaatgcagatttccaattatcttggacaagtgattgaaaacctgaaaaaatacgagaccgagcaggaaaagaaaaaatatctcattcaagaactgtcgatgaagcgaatgttctcggcaatcgtcacagatatgaaccggatcagtctggaactttacaaaagagagcggatcaaagaacagagtcgccacctaagatacgaggaggcagttggaagtaccggacagtcgcagggaatctacatccagtttttgatcgcaatcatcaattacattgcaagtattcattcctaccatgcaaatgaggagtctctaaaaaaagtaatcttcatcgacaatccatttggtgcggcgaaggatacatatatctgggaaccaatctttgcgatgcttgcagcaaatcgggtgcagctgatcgtgccgacaagaggtgcgacacctgcgatcatcggcaaatttgatgtcaactatctgctcgggcagaagatggtcggacaaaaacagcagaccgttattgtagattatcgcagcaagatcgatgtagaagaagctgagtatgtaaaaatggaatatgagcaggcaacactgttttaa

SEQ ID NO: 52073 - DNA, 1230 bp, Coprococcus sp. HPP0074
atgattggagtacgaaaaagtgagggggcaaagaggatgagaaagaatctggaacggtattttgcagagcgcagagagaagaaaaaaacagggaatatccgtgtcacctatgaggaattgcttgagcaggcagcgggaaacgaagagcggaagcttctggagatcagaaccgggagagtaagggagtttcagcagcttttggaagcgtttgttcaggagggagtgctaagtccggtgaaaagaagtaagaaaccgggatacatggcgacggtctatgaacggtatgagattgtcggcaataaagaaaaagtggtggaagatccggaatatcttgctcttttgcattcctatgtgggcacgaaggtgcttgaattttataagagaaaccggagagcgtttgagcaggatcgggaagcgattggtatactctataactactattgcaggacagagaaagtatggatgactgcaaatgaacttggctattacctgttcggtgatgagaaagcattcgaacagccggagggagaaaaagagaagcaagtgtcagatgagcaggaaacgagtacggaaaaggatggtaggggaaggtacaggaaaaaggccggagcttacacacatctgttaaatcggatgggatttgatatagagacggatctgcatgctttctatacgaaggagccatttatttgtcaggtacgcccatctttttttgaaaagaatatcaggaaaattttgatcgtagaaaataaagatacgtattttcggatcaagaacggaatatatggaacggaatatgactgtgtgatttacgggtcggggtggaagattataagagccttttctctcgcagaagaaactggtataatggagacagataccatagaatattttggagatatcgatcccgaagggtttgcgatttattatgaattgaaaacgcagtatgcatcgtattcgattcggctgaagatggagttttatgagaagattttagaggcagtcagaggaagtgagagaaagcccgagaaaatcagagggaagattcagaatcgggcacgggaggtactaccatctgcccttcaggaatttgatacagagacagcagattttttgcagagaatgatgttgaaagatctgtgctatatcccgcaggaagcactgattcttgtcgggaaagcagaggtggaaaatactacaaggagaatcagaagtaatggagttacatag

SEQ ID NO: 52074 - DNA, 1551 bp, Coprococcus sp. HPP0048
atggagttacatagaaatttgcttgaggagatccgggcagaacaagggcttcggatggagagtatgaaaaaatattatccattttttgagattgtcagtcatgatctgaagcagtttcaaaatggaaaatacaagtcgattgacataggatatgtgttgatggcagtgcttagaatgttgatcgaagaaaataattttaacaataccggagtaacttatacggactatttaaattttgtcattccgtttttggagagtgagtttgcactggactgtacaccggaagagtatgctcagcttgcagggtatgtgtttgataagataaaaaatgacggaaagccgttctcctatgaattttatgatccagaggagaagatccggaaggttgccagagtatggctgatgaaaagtcattttcaagaaggaaatatttattattacattacggagagtgggattgaattttatctgaacacaaaggagttcaaagaagaaagcaagattagtatacagcagcttcttttggagaagatgatccgcacccagaacttcaaaggcggtcgtgagattgtaaagcgaatttgcaatgaggtactcaaactgaaaatgcagaagagagaagtactgcaggtacttgtgcatgatttgaaaaacggactttctctctaccgggaattttttcaggagagtgtctgctggtttgatgaggaacacgatctgtttatgaaaaatacgaggctgattgccggggcaatgtccatgctatctccggttgatcagattaaaaataaagaagagatctttttgctggatagcgaactgaagcgggcgatggcgatgcattcagagttattgagtgagtgtatggatttgaggagaaaagttgacagtatggtggaacaggggacattaaacgcgattcgtccggttgtctatttccgtcagtttcttgagacggcccttaaaaaagatgatgtggaacaattgaaattgcttgcggagcccttgtttcaggtgaaaaagaagaagatgtttgatctgaagcggctggatgaaatgctggcattacgccgcggtatggatgaggaacgtgaggagatcgagtcagaggaagaggcggattatgtctatgatgacgaactggaagaacagcggatcagcagcaattaccggatccttgtgcgggaattgtttgcgatgttgaagaaaacagactgtttcacgctgcgggagtggaatgagcaattagaggtacggtatggacagaagatttttgcaaatggagattattattcgttcctcgtcaatctgtgccaaaagcatgagattgtaattcgggatgcagtaagacacccggcgacaaattttgaggcagttttgaaacaatattttgaaatagaaggcaccgaggaagagttgcagatggatttttgtctggaaacactgacggatgaggaaccagttacttttctcgaatgtttttcggtgacgaacataagagtggaaaggatgaatggagatgacagagcagacgctggaaacagggattga

SEQ ID NO: 52075 - DNA, 717 bp, Coprococcus sp. HPP0048
atgacagagcagacgctggaaacagggattgagatttttgccagactgatcaatcaggaggcagtaaaatatcaaggcgaacatacgaagctctatgaggcatatacgcagaatggagacatatttgatacggtaaataagattacaaaggcgctgaatctggagatttatgattaccggggagggttgtatctgacaccgggagaatcgaatcatgtttttggatatacgaatgaagaactaaaggagatgatcggacttcggctcaatcgggagttgttcctttgctacttcattatttatcacatcatcacaaaattttatacagattcagcgacttatacttatcaggagtatgtcaaggttccggaaattgtggaagcagtagatgcttcttttcaagggttagcagagaaagtggagacgcttgcactgacagaggtggaggaatacagttttgagcagatggcgcttgcctgggatttgccacttctcaccaatgaggatagttccgtgatccgggcagaaaaaggttcccgggcaggaatggtaaagaagacatttcaatttctgatccgtcaaggattgtttctggaagtggaggatcgatattatccgacagaccgtttttcggcgctgatcgagagctattttgagtcggagcagagtcgtatttatgagattatgacaggaggtagagacgatgccgcatattaa

SEQ ID NO: 52076 - DNA, 4413 bp, Coprococcus sp. HPP0048
atgccgcatattaacagaatccgggtaaacaacatcaaatataacgtgggaactcagttttatgacgacttgtgccttcggtttcaagggaaaaacagcctttatgatctggcaaatggagggggaaagagtgttctgatgcttctgcttttacagaatctgatcccaaactgtacactggatgacaaacagccggtagaaaagttgtttcggggaagcaccgggagcagtgtcatccactctttgatcgagtgggaccttgacaggccggatcaggaagagtgtggatttcggtttatgacgactggattctgtgcacgaaagaaggcagatcggatcaaagagggggaggaggaagtctcatcttcggcgattgaatattttaactactgtattttttataatgagtttaatgattatgatattttaaatcttcctcttgtaaatggaaaagagcggattacctttaaagggctaaaagaactcatcaaacggcttcaggccgaatcaaaccggaagctttcagtgaaaatttttgaaaattccaaaagtgaatatcaaagtttcattgcaagccatggattatatgagagtcagtggaacattatccgtgggatcaataagacggaaggccatgtacgtacttattttgagagcaattataggacaagcagaaaagtagtagaagatcttttgatcgaggagattattcaaaaggcataccagcttcagactggtaaggaaaaggatgctgaagaactggcacagacactgttggatatccaggaacagatggtagaactgtcaaagaaaaaggagcagatttctaattacgacaggcagattacggtgattcaagagtttctgacaaagtttgaaccattgttacagaactttgaattgtgcagggaaaatgagcagaagacaagcgtattttatcataccctccttgatgaaagagagcggattgaagcagaagcggagcaattggaggaagcgctgcagaacatgcaggaacaacagcaggaaacggagcgaatcttgttgactttagatctgcaggaactggaatgtcatcttgatgaagccaattatgaaagagaacagaaggaaaagcagaaagagcagttgaaagaggcagtcgaagaattaagacagactgtgacagagaaagagtctgtccaatattttcttaattacgcaaaagcacagtcgcgggcacatactatcgaggtagagatggagcggatgaagcagggaaatgaggaactctaccagtctttgctggagatgactgcccagaaaaaaagaaaagatgagcagatttttgaacagcttaataggcagaaagatgaggctgagaaaaatcgagagacttccagaagagaaaaggaagaggcagataaaaaggagcgggaaagcgataatgcccgcgctgtattagaaagccgtcttatagaaaatgagaaagagcgcaccgctctgcaaaaagaaatcggcgaggggatgaaagcattcccatttcttctccgggagcaaattaaggatacgatcatagaaaaagaaaaggaagaagatgccgagcgagagtcgaagagaacgctggaacaagagtgtgagacgataaaagaacagcttcagtcagacaggctgatggctaaggatctggagcatgaggcaaaggaattgcatacaaaagaggaggaatgtcaggcacagctggcaatctatgaggagctgacagaaaaagtagcacagagaatggaagtatatggcgagaaagatgtctaccggttactggagttgttaaaggagaaacagcgggagacgattattttgctccatgacggacagaaccgtcagtcagaactgcaaaaacagctggagcagcttcaaaaaggaattttattccaggtaactccggaagcagagcagctgaaagagtttctttaccgaaaatacggggatggagtgcttggcacagagttgttagagcagatgcagggggagaaaaaggaagaggtgcttggccggattccatacttgccgtacagcattgtcgtcgggcatcggatctacgagaagatccttgcagaaccaaaaccggaagagtggcagaatgtaagctggatgatcccggtcgtggatcagacatatctggagcatggacagtttgatgcaggggacggagtgatgtttgcaggaaaagaaactgcgtattttctggaaaaagagcagctggaaaaagaaatacaccggacagaagaagtattggatctggaacataaaaagcaggaacagttgagagaacaacagaaagtgctgacagcggacacagatggcgtgcaagagtatgtgacaaactatttcgaaaactatgccggttggttggaagaacagcaggagagaaaagaaaaaagagcacaggtgatggaggcacaggaacagttaaaagagaaggaaaagaaactgtgtgcaagagttgcagagctggagagaaagattcctgaaagtgtagcaaagattaagaaactggcagaggagatcctgtccttacaaaggctggaggacacatttagaaagtcagatcttgtggaagcaaatcaaagggagtggaaggaaaagaaagcagagctggaactggaaaaggaagcactttggagactggtgcaggcaaaagaacgggagatttctgaagcagacggacgaatccggcagattacggcacagattatggaacggaagatgggatgggagagatatgctgcctattataaagaagagattccgatacaagaaccgattccggaacgtctggaggaagagttggatggtgccatcgcagcatttgaaaaggaaaataaagatgtaagagaaaaaagcgagacacttcaggtcatccgggaacagattacatcctatctgcgagaattaagaagcagaaaggcagatgtaaagatgctggaacagctctatgaggagcagaaacttgcggaagtgtccgacgaagagattgaggcgcagaaagaacatctgatggaggaagagaagctattacaaagatgtgagaaaaaagtatcggagctggtacttgcatgtacgcgattccagtcacaggcagatgtgatcgccgggcagatcagggagagattctaccgaatcgagcggctcccgattgcagcagggacgattgagatagagaaggaacggcagaaagagctacaacagcagtgcaagagagaactggcagaattgttccggaaacagaaggaaactggaaaagcgcaggaagaaatccagacgatgatcggaaagattacatgggttgcagaagagtatcacatcaaagatatgtccgtcaagacacttccaggatttgttatcttagactggaaggaaaccgagcgtcagatcatgagtggatggcagaagatgaaagcgagaaaaacagcggcagaaactgcatttggcaaggcaaaggcgtggtgtgaagagacgctgaccggacttggcgcaggaagttttgcactgcagatgaaagaacagatcccggttccgcaaagttttgaggaggcagataagacgattaagcggttggaagaagcatgtgtgatgatccaaatgggaagagatcagattgaggaaagccttcgtgatatcgagaagattaaaagtagttttgaaaatcaatgtttacagcggtgtaatacgatccgcatggaactggataagtttccgaaactcagcagcattatgattgatgagaaactgacgcagatcgtccggttgaagattccatatgtgagagaagagcagcagcaaatgcagatttccaattatcttggacaagtgattgaaaacctgggaaaatacgagaccgagcaggaaaagaaaaaatatctcattcaagaactgtcgatgaagcggatgttctcggcaatcgtcacagatatgaaccggatcagtctggaactttacaaaagagagcggatcaaagaacagagccgccacctaagatacgaggaggcagttggaagtaccggacagtcgcagggaatctatatccagtttttgatcgcaatcatcaattacattgcaagtattcattcctaccatgcaaatgaggactccctaaagaaagtaatcttcatcgacaatccattcggtgcggcgaaggatacatatatctgggaaccaatctttgcgatgcttgcagcaaatcgggtgcagctgatcgtgccgacaagaggtgcgacaccggcgatcatcggcaaatttgatgtcaactatctgctcgggcagaagatggtcggacaaaaacagcagaccgttattgtagattatcgcagcaagattgatgtagaagaagctgaatatataaaaatggaatatgagcaggcaacactgttttaa

SEQ ID NO: 52077 - DNA, 1230 bp, Coprococcus sp. HPP0048
atgattggagtacgaaaaagtgagggggcaaagaggatgagaaagaatctggaacggtattttgcaaagcgcagagagaagaaaaaaacagggaatatccgtgtcacctatgaggaattgcttgagcaggcagcgggaaacgaagagaggaagctcctggagatcagaaccgggagagtgagggagtttcagcagcttttggaagcgtttgttcaggagggagtgctaagtccggtgaaaagaagtaagaaaccaggatatctggcgacggtctatgaacggtatgagattgtcggcaataaagaaaaagtggtggaagatccggaatatcttgctcttttgcattcatatgtgggcacgaaggtgcttgaattttataagagaaaccggagagcgtttgagcaggatcgggaagcgattgatatactctataactactattgcaggatagagaaagtatggatgactgcaaatgaacttggctattacctgttcggggatgagaaagcattcgaacagccggagggagaaaaagagaagcaagcgtcagatgagcaggaaatgagtacggaaaaggatggtggaggaaggcacaggaaaaaggccggagcttacacgcatctgttaaatcggatgggatttgacatagagacggatctgcatgctttctatacgaaagagccatttatttgtcaggtgcgcccatctttttttgaaaagaatatcaggaaaattttgattgtagaaaataaagatacgtattttcggatcaagaacggaatatatggaaaggaatatgattgtgtgatttacggggaggggtggaagattataagagccttttctctcgcagaagaaactggtataatggagacagataccatagaatattttggagatatcgatcccgaagggtttgcgatttattatgaattaaaaacgcagtatgcatcgtattcgatccggctgaagatggagttttatgagaagattttagaggcagtcagaggaagtgagagaaagcccggaaaaatcagagggaagattcagaatcgggcgcgggaggtactaccatctgcccttcaggaatttgatacagagacagcagattttttgcagagaatgatgttgaaagatctgtgctatatcccgcaggaagcactgattcttgtcggggaagcagaggtggaaaatactacaaggagaatcagaagtaatggagttacatag

SEQ ID NO: 52078 - DNA, 1527 bp, Clostridium sp. CAG:590
atggcagagaaatacattatgattcatgacattttgagtgagcataaggatcgaatgttgaacttaaaaaagtattatccgtttttcgtgttgtgtgatacgacattttcccagtacaaagaaggaaaatattcgaatctggacatgggatatattactatggctactttgcggtttctgatcaacgagaataatttccatgagagtgaaattacatatgaacagtacgagacatttttgttagaggtgctgcatcgggaattttccttagcggagaacgaaaatgaggaaaaggaattatgcagctacatattcgataagattaaaaatgatggcaaggcatttacgttcccgtactttgatccggaggaaaagaagaagaaaacaagtcgtgttaaattagtggacagccggatcgtagatggtgttgtgctataccatgtaacaacggatggtattgagttttatctggataccaaggagatcaaggaagaaagtaatatttccgtgcaacagctgctgttggagaaaatgatccggtccgagaattttgcaggtggtattgaagtagtcaaacggatcaataatgaggtgggcaagctttcccttaagaagaaggaagtgttagatctgctagggtatgatgtgtttgcaggtgcaaaagccagcgaagaatatatggagacggtgtcacgatggtttgaggaggagtccaaattatttgagaagaaccgtgctttgatcgacaaagcatatgcaaaggcaaattcggaatccggtgcggctgttttaggcgagattcacaagctggatacggagcttaagaagaccattatccgtcatggagagctgatccgtgaaacgatcgaattacagaatattgcggatgagatgatcggacgtgccaaacttcggaaacttcgtccggtattccagttccgggatgcccttcaaaagacgatgaagtatgaccgggcggatgcgctgggtatgttggtgacgccattatttatgccgaaacttacgaagacatttgcggtggaatcggttgaccgtatgctggagagtaaggcggatcagtctgattatggagagaagatcgaaaagaaacaggtcgatgccgattatatatatgaggatgaagtggaagaagaacgaattgcggagaatttcggacgattgtttgaagaactgctggagcaattatggaaacacgggaagaccacacttccggaactgatggcgatttatgagatcaaatttggaaaagagatctatcgcaacggggatgtctattcttttctggtacatttagcccagaagaaccggtatgagttaaagtctatgcaggacaaacaggatacgttcctagaaggcattgttatgaagaagttaagtgtcgagaagaaggacaagtatgggaacatggtatttgagatcttctttgaggtcgggaatattctgaactttggagagaagaaggatgaagcgttcagcattaccgatatgagatttgagacagtgtaa

SEQ ID NO: 52079 - DNA, 720 bp, Clostridium sp. CAG:590
atggaaatgaaaaatttagaaaaggcaaccgatatctatgcgaagctgatcacaggcgaagagatcaaacggggtggaacgaacggcagcctgtatgacgattattatggcaatgccgaggtatatgagattgtcggtgtcattttgaaaaaattgaatctgaacatatacgaatataaggaaagtttgtttttgtcggcaggagaaggcaatcggatctttggttattcaaatgaagaattgaaacgtgcaatgaatctgcgttataataaagagctgtatttgtgttattttattatgtatgagatattgttgtcattttattcggattctgcctcctatcagtttaaggaatatatccgtttagaagatgtctgtgatgagataacaaaagctttgtctgtctatacgaaagacattgcggtatatgatacagataatgaacaggaacagagttttcggacgattgcattgctgtgggatgaacttccggcaagcagtaacgagaatcaggaggagattcgcgcctcccgtgcttctaagatcagtttcgtaaagctgacgttcaattttttagttggcgagaaattatttgtagaagtgaataaacgctattatccaaccgatcgattcaaagcaatcgtagaacactatttcgaggaatatcgcggtcagatatatgatatattatctgcacaaagaaaggaaccacatgcctaa

SEQ ID NO: 52080 - DNA, 4485 bp, Clostridium sp. CAG:590
atgcctaatattaatcgaattcgagtaaataatgtaaaatataattttggaacacagggctatgatgatttttccatgcgtatgtatggaaagaatacattatatgatcttgcaaatggtggcggaaaaagtgtgttgatgcttcttttgctgcagaatctgattcccaattgtaccttagatgagaaacagccgatcgagaaactgttccggaacggtggagggaacacaacgattcattctcttgttgagtggaaattagacgacaaagacatcaaagagggattccgctacatgacaaccggattttgtgccagaaaagcaaaagacggtgatgcagatcagattgcactgccgggtgcagaacaggcggcacaggaacagaatgtaacaagggacagtgcatcgatagaatattttaactactgcattttttatcgggattataatgataatgatattgtgaatcttcctttgcaaaatagtaaagagaggattacttatagtgggctgaagaattatctgaaggatcttgcaagacgcaacctgaaccttaaggtgtatgtatttgaacgaaagggagaataccagcgttttatcagccggtatggtttgtttgagagccagtgggagattatccgtggaattaacaagacggaggggcatgtccggacgtattttgagacgcattataagactacacggaaagtagtggaggatcttctgatcgaggagatcattgagaaggcatttttagtaaagacggaacaaaatgatgtcaatgaggatatggcaaagacactgcttgatatcaaggataagcttgtggaactttcgcgtaaaaagagtgacatcgccaattatgacaaagaaaccgagctcatgcatttattagagggaagagtgtcttcttttctttctttgtatgaagaaaaggataaagttaccaaaacacttgcggacgtctatgcgaccggcgaacatttaagggagcagggagaagcggagattactgccatggaagagaaaaaggaagcatatgacaggcgtcaggtatttgagaaaaaacgaatagagggacttaagattgtccgggatcagtatgatctgctacgggttcaggaagaaatgcagggacttttgaaatatgtgaatcaggcagaacaggagcttgcaattgcaaaacaggagcttgatctgaaagagagtatcaatgattatctgcgttatctgaaagataaggcacagatggatgagaatcaggcgatgatcgatgcgtcaatggattcgaataccgatcagcttgccagattacacacatatgcctataccaggaaacagatggatgaccgcagactggcagatatccggaaacagttagagcggaaagagaaagcatttcaggcgaaaaaggaagaggcagaacggctttcgcatgttgcggaggaaggaaatgttgcattggcggttgcaaagagccataaggaacattttgaaaaagagtaccacaaatacatggaagagattgcggccgtaagaaaggatatctccattcttgtgttgggagatctggaagatctcgaaaaaacacttcgggaagaagaacaggaattgacgcaaaagagagaggtttcggaggagtcttatcttgcagattatacacaggttaatgccttggaacgggagctgtatgtggagcaggaatccttgcagaccgcagaacgggcattgcaggaagcgtctgataatcataaggaatatattgagaatcaggaacgccttaagaaaatgacacaggtatatggtgtaaatgatatggcacagttatatcatacgatcaaggaacgtgccttccaacagaagatagcagttgcggaactggagaagaagatcgcagcgtggaaccggcatttggagcaggtgcatgaaggaaggattttagaggaatcagaagcggttacaaaggtaaaggattatctcgagagccgtcatggagattttgcgttgtccggagtggattatctgtcggcacttccaaaggcaaaccgggaagagttattgcagtgtttcccaatgctgccatatggtgtggtaacaaaacagtttgatctggttgaagaggatgaacggattggaacgcttgaacttggcaatcaggcagtgacgatctatgaccggacgatgttggagacaccgcatcttccggcaaaggaaaaaggagtgctccttattgcgaaggatccacagacatttgtggaagaagatgcacttgcgatggaagcaacccgtttggaaaagcagcttgcgcaattgcaggaggatctggaacgggcacgggaattagatgctgtttacgaggaagatctggattatactgcaaagttgaatgacactgcatttttaaatgcagaacaacgggtgcaggaactgcgggaacaggtgttagatcatcagagaaagatcgaacagctggaaaaggatatcgagcggacgcaaaagcactgtaaagtacagcagcaggacgcagaaaaatggaaacagacattaaatgagaatcagaaagaacagatcaaattagccggaatccgtgcaaagagcgatctggcggaggagagcagacaacagttagaacattatgatgcagaagtgaaacgactttctgccgatacaacagacgcagactcccgattggaacatgcccggttggaagcagaggaattgcagggacagattgttcatatggaacagcagattgcagaaatgacaagagactgggatgatctgtacaaagaatattatgtagaaggcaatttgactgcggttaatatttcagaagaacagttgaaagcggagttccttgctgcaaaggcagttgtggaacaggcaacgatcgtattggaagataagaagaaactgatcacggcactttcggaaagtatggaacggggaatgaaactgatccgtaggcgtggcatttcagtggaacagttagaggcattgcagcagacggaaggacttcatccggtggatgagacattgcttaaccgaatgagtgcacagttatctcagatctcggtacgctgcgatcagcttcgggcagattataagaagaaggaacaggaggcttcccggctggaaggtcgtgtagaacaggcaattcagaccatgacagaccggtttggtcaggaggcgtttgccgaattagagtttgtctctgccgatacggaacatgtaacgccgacgatatccaaagaggatgcactacaggcgattgcggaaggggatcgtatcctcaaagaattgcaggaagagatccggaattatgacaaggaataccggcagtatgtaaagaacaacggagtcatcattgatctgtataaggatgtaaagcgaattgtggagagtgaagagttagatatcacacaggctgacatcttgtccgaagatcaggcaaagatccgcgagatctttgaagagagcctgctggcatatgataagagcaataaagcgcttgcaagagcaaaacaggagctgctcaattataagacacagaccgcaaatacattttatacaatgggtgcatttgaattgtcggattccgtcaaggaggatgttgagattccggagacttacgaggatgcaaagacactgcttgcgaatattcgtgaaatgatttcctatattgctttggaaaaagaacgtgtggagcagggaattgaggacatggaggcaattaagaataattttgagaatcaatgtattgaaagatgccgcgatgtccggacggaattggataagctgccaaagctttccagaatccagttagacggcgagatgatccagatggtcagtctttccgttccgtatgtgaaggatgaatttatcaaacagagaatgtcggattatatagatgaagtggtaaatggtgcggatcaatttcaggataacaatgaccggatcaaatatatgaaaaacagactcttgcttaaaaagctgtttggggttatggtaacagatatgaatgcaatccggctgaaattatataaacgggagcgtatcaaggaacagagccggtatcttcgctatgaagaagcggttggaagtaccggacaatcacagggtatctatattcagttcctggtgtcgatcattaattatatatctggaatgtacgcaccggaagcagaggcaaatgagctgaagaaagtaatctttatcgataatccgtttggtgcggcaaaggatatctatatctgggaaccaatctttgccctgcttaagacgaacaacgtacagttgatcgttccggcgcgtggtgcgacaccggcgatcacgaaccggtttgatgtcaactacatcttaggacagcagcttgtgaatggcagacagcagacggttgtaacagattaccgcagtcaggtggaacaggatgaggtagagtaccggaacttagagtacagtcagggaacatttgacttcatataa

SEQ ID NO: 52081 - DNA, 1611 bp, Ruminococcus sp. CAG:60
ttgcagtacgaattcctcaaaaattttccaagacgaatgaaaaatgtgggactgtatgcggtgctcattcagaacagcgctcagaaaatgtcctggaaacagtttggcttttcaaaatttgatgaacagctgaatcttatttttgctgttatgctttacattatggagcagtccctgaaagaagaaaattgtaccatggatgatatcggggcatatattgatacccttaataccagatatctgcaaaagcaaatcacctacgaggactgcaggaagctgggggattttattgtcaacgtcattctgtccaacgaaggccgtgccatgtattttgacgggtacgatttcgagcagaatgcctatcatattatgcatgtcagttatgtggcgaaccgtattgtttatcttgatcaggaggttcgcagaacgtcctattatcttaccgatgacgggtataatcttatactttccacccttgaaattgaaaataatatgaagcttaccattcacgaaatgatctttcagatgcatctggaaaagcagagctacgacaaggctgtggatgagataaaaaatgtatttaacctgatgcggatccagcttcagaagattcaggaagctatgggaaaaatcagaagaaatgcattgaattactccgtaaaggattacgaagaaatccttttggaaaatctggatactatcagcgacaccaaagaaaaatttcagaaataccgggaattggttcgaagccgggtaaaaaatctggaagaagaaaatattaatgttcgtcgtctgggagaaaaggaagaggaaaatctggagaatcttcgtatcatagaaggatacctgaaccgcaccatcgatgaacatcagaaaattctcagcagtcattttgacctgaaggctctttataccaaagaactggaattattgtctcaggtatcgctgatccagagattttctttccgaaacgatttttatgataaggttctggaaaaaccagcgtctcttggaaatctggaatattttttgcggcctttatttaatcaggagccagagaaaatttataatctgaataaggcgttgttatatcagaaacccagtgtacgaaatgaggaagaagatacagaagaaattctggattttgatgaagaagcataccagaaagaacaggaaaaaaagcgaaaagaaaaactgaaatgttatgaaaacagcctgggatttcttatagaacagacggttgaaacaggagaaatttctcttttagaaatacaaagcaggcaggaaaacctaaaccagctcattccaaatgtagaaatttttaaggaaattatggtagaactgattcgaaataaagaaattgatatggacgccctgaaaagagaacgaagtgaatttattcaggatcagacatctgattttcagctcaatgaaatgcttctgcagctttgtgaaggaaaattttcacagcagaaaataagaaaaatagaagtatacagaattgaagacggaaataccgttatttttgataatgtgttgactgaaggtggagaaaggaagagcatccgctgttccaatatccttgtccgaatcttaagaaatgaggaatag

SEQ ID NO: 52082 - DNA, 714 bp, Ruminococcus sp. CAG:60
atggcatacgaagcagaagaagtcctttccagccaggagatcttttactatttgctggaacatcatgaattgagagaagaggatgagcctcttttatataaggcctatacggaagaggaagcaatccggaatctggtaaaatcccagggtgaggtggctgcagccaatgtagaacgctatggaaatgttatttatctgattcccaaagaagaaaataattttctgggattttccaagcagcagttaaagaatacgttatgtaaatctacagcaacagacaaagactactacttatcccaatttgtaatacttacattgcttgtggaattttttgatgggcagggaagcagcagtaaagcccgggaatatatgcgggtgggagagcttatgaactgtatttccacaaggctgaaggaaggtgcagcagaagaggaggatgagaaagatacagcaggcatttccttccggattctgtacgaaacctatgaggctctgaagtctgatgacagaggttccagaatgaaaacaacgaaagaaggtttcatttacaacattctgatgttcctgcagaaacagggactggttgaatatgtagagcaggacgagatgataaaaaccaccagaaaactggatcattttatggactggaaccttctgaatcagaacaattatgagcgagttctcagagtactgggggtggcaaaggatgagtaa

SEQ ID NO: 52083 - DNA, 4410 bp, Ruminococcus sp. CAG:60
atgagtaagattaatgcaatacgtctgatcaatgtgaattacaacaacaatgcatatcgcatcagtgatgaaaccatgtatttcaatggagaaagtacattgctttctcttcagaatggcggcggaaaatccgtactggtgcagatgctgacagccccatttgtccatcagagatatcgcaataccaaggaccgtctgtttgaaagctatttcacaaccaataaaccctcttttattctggtggaatgggtccttgaccagggcgcaggctatgtccttaccgggcttatggtgagaaaagcccaggatctgcaggaggacaaaaaagagaacctggatataatcggcattgtgagtgaatatcaggagccatgtattcaggacatccgtcatcttcccgtagttgaaaagggcaaaaaagagatgattctgaagaatttcaattcctgtaaactgttgttcgaaagctacaaaaaagacagggatatgaagtttttctattatgacctgaccaactatgctcagtcccggcagtactttgacaagctgatggaataccagatcaattataaagaatgggagactatcattaagaaaattaatgtgaaagagtctggcttatccgatcttttttccgactgcagagatgaaaaaggcctgacagaaaagtggtttctggaagccattgagagcaagctgaataaagacaaaaaccgtatccgcgagttccagtctattctggaaaaatacgctggacagtacaaggataaccgttccaaaatcaagcgaagagacaatatccgtgcctttaaagaagaggcagagtctatccgcacaagggcagaagaatatcaggaagctgagcgtgaagagggaaagcaggagaacaaaattgcctggtttatccatgatgtgaacgctcttttgaatgacacccaaaaggaatacagtgcgtcaaaagaacagctggaaggtctggataaggctgttgcaagagtagaatatgaggagctttccagcaaggtttatgaaagtgaaaaagagaaaaaccttcatcttagtgaccgtgatatgattgatatggaacgggaaaatcttcaggaagaggcagctaagacacaggaaaagctgcatattctggcttgtgccagaggacagcagtccgttaatgaggagaaaggggaattagagcttctccgggaaaaaattgcggtggcaaggaagcagggagaggatctggagccagagcgcagggcacttggattttcactgaaatgcttttttgagggacagcttcgggataaccgcgggcagcaaaacatacagaatgaaagtgcaaaaaaggcaggagaagaggctgacaaaaaagcgcaaaaaattcaggagctggaagaaaaaatacgtgattgttttggaaaaaaaggaaaactggaaagccagattgaagcatacagccgcgtggaagaacagtacaattccaaatatcaggaagaattaaggcgcaatattcttggcagttatgaagctggaacccttcagatctgtcagcagatttacgaacaggatctggaaaaagcagtgcgggagcgcaccgaaagccagaaaaaatgggaagcagacaaggaaacaatccgtggtcaggagcgcagattagaagataaaaaagaagctttaattcacaagaaaataaaaattcagaagcagacaggcagatatcagacctatgaaaaagaactggaagacagaaaagcggttctcaaatatctggatatggaagaacgctatctcctggatcgggaaaggattcttgacgtttcaggacgaaagctgcgggaactggaagaacttcgcagaaatctggagaaggaagaggacactctggaaaaggaatacacaggcctgaccagcggcaaagtcctggaactgccagaagaactggaaaatgaactgaaaaacctggatatccatgcagtttacggtatggaatggctgaaaaagaacggctattcccagaagaaaaaccaggagcttgtgcgtcgaaatccgttccttccgtacgccctgattcttaccaggcaggagatggaaaagctgggacgaaatgggaaaaacatttgtacttcttttccagtacctattgtagaaagggaaaagcttgaggaagttcaggagaaatacgcggataaaattgtaagatttccgggaatcagtttttatattctgtttaatgaaaacctgttggatgaagagaagcttcaggcaatgatctgggagaaaaggcagaagctggaaaaaatcgggcaggctgttttacttcgcaaaaaggaatatgcagagtatttccagcgtcaggaaatgatcaaaaatcagaccgtgacaaaggaaagctggcaggaagtacaggaaactctggagaagctggaagaagagaaaaagcgtctggaaaaggaaataagggacgattcccagagtcttgaaaaactgaaaaaagaccatgatgaactgcaagcttttattgccagggcgggaatggaaattcagcgtcagcgacaaaagctggaggattttaagcagctgaaaagggactacgactcctatgaaagcaaccgtgaagtactggaaaagtgcaaaaaagaagaagcacgctatcaggaaaatcagaagcttgccagagaccggcagaggaaacttctggaagaaaagaagactttggaatacagtataaacatgctgggcagggaagaagaacggcttagtgagaagtatgcccgatatgccgcatatgagaatgcggaacagaattttcacatagatgagagtttgtcggcagatcagatggaagcacgttatgaagcaattacctcggttctttcccaggaactgaaagatctggaagcacaggagaagaaagtggcaggacgtttccagcgggcaatggatgaccttgagtaccagcagaaaaaatacaaattaaagccttcgcagtggcaaaatgtgttttatgaccggaaagaagaaacgcaccaggaagtaatactggaagattttcagcgtaaaatccagacgaaagatctgcagtggaatgaggctgataaaaaggctgcggttgcgcagagtaggatcagcgaactgatgaaacgaatccgttctgtatgcggcatggagaatccgctccctcagaatgaaattcagggacagaattttgcggcacgaagaaaccagctccttttccagataaaagaagaaaaaaagcatgctgatttcctgaatggaaaggttcgaagctatgaagaaaatttaactgctttgtcagaatataatgagctgattccagcagaaacagaagagtgggaaactatttcctttgatatggaagctgcagaactgagaaagtttaaagggattctcattcgcgattacaatcagagaatcagggataccagacagaaaaaagaagaactggtgcagctgttaaacaagatagtccggatggaagcgttccaggatgatttctaccggaagccgctggagcagatgctggaactctccggagatgcaggccgggttctgatccagttgagaacaacggtgcagtcttacgatagtcttatggaaaagcttgaagtggacatttccgtagtagaaagagaaaaggaaagaatcgtagagcttatggaggattatgttcaggaaatccacagaaatcttggaaagattgatcataattccactattacaattcgggaaaagcctgtaaaaatgttaaggatccagattcctgactgggaagaaaatgcaggactttatcatcttcgtctggaggattttatagataaggttactatggaaggggtggagcttttcgagagaaatgaaaatgcccaggaatttttcggctccagcattactaccagaaatctttacgatcaggttgtaggaattggaaatgtgcagatccatctttataaaatcgaagctcagagagaatatcccataacctggaaagaagtagcgagaaactctggaggcgagggatttttatctgcgtttgttattttgtccagccttctgtactatatgcgaaaagatgatacagacatttttgctgacagaaatgaaggaaaggttctgatcatggataatccttttgcacagacaaatgcttcccatttgctgattccgctgatggatatggcgaagaaaaccaatacccagctgatctgtctcaccggattgggcggagattccatttacaaccgttttgacaatatttatattctaaatctcattgccgccagcctccgcggcggcatgcagtatctgaaagcagagcataaaagaggcaaagagccagatgaactgatcacagccagaatcgaggttggggagcagcaggaactgttgttttaa

SEQ ID NO: 52084 - DNA, 981 bp, Ruminococcus sp. CAG:60
atgaaacgaatttccttagaagctcttcttcgcactatgcaggatcagtcctatcaggagcaatacgaatatattcggaagctgcttgaagaagaaaaaataaagcccgtgaaagcatccaggaccaatgggaaaaagcctgcactttatcgggaatattggattctggaagagaagaaggattacagcgagtatatagaggaaataaaatataatttttctacaaggatttcagtagattattatcttacacatccagatgtttatgaaacagatcgaccatgggtgcttctgttgaatgagtacctgaaagaacataaggacgctttgaagaccgcagagtcactgaatgagagaagctttgaaatctggagcagagagaaattcctggacagggagcaagggaagaaaatactgaatcgatgcggactgggcttagaatttttgaatatctatcggacgacagaaccgttggcatattacactcatacaagaaataccccgcagaatctcctgattttggaaaacaaagatccttttttcagtatgcgaagccatttattgagcgggcatactgaaatttttaatatggaagtgggaacactcatttatggggcaggcaaaggtattctccgttccttccaggattttgacctgtgtgcggaaccctatatgacatattctggaaataagattttttactttggtgatctggactatgagggaattggaatatatgagaatctggtagaacgatttcaggacagatgggaaatcaagccctttattcctgcatatgaagcaatgctgaacaaggcagaccgcctggaaaatttgccagagaccaaagaacatcagaaccgaaatattacttccatattcttttcctatttcagcaacactactgtggaaaaaatgcaggcagttttacagaatgaaaggtatgttccacaggaaattctaaacagagcagacttttag

SEQ ID NO: 52085 - DNA, 1548 bp, Clostridium sp. CAG:632
gtggcagagaactacatcatgattaacgatataatggaagagcatcatgcccggatgcagaatctgcggaagtactatcctttttttgttttaaatgagacaacatttacccagtacaaggacggcaagtattccgacctggatatgggatatattacgatggccagcctgcggtttctgatcaatgagaatcagtttaacgagcagactgttacctatgagcagtatgaggcatttttgctggagcttctgcatcgggattttcatttgcaggagtcaccggaggaagagagcgagctggcaggctacatatttgataagctgaaaaatgacggcagaccgtttgagtttcatttcttcgatccggaggataagaaaaggaaaacagccagagtgaagctgatcgagagcgagattgaggaccaggttgtaagatatcatatcactgcagagggaatcgagttttatctggataccaaggaagtgaaggatgagagcaaaatcagtgtgcagcagctgcttttggagaagatgattacagccaagaacttcaagggtggtatagaggttgttcaccggatcaacagtgaggtgaagcgtctgctggcacagaaggaatccgttatagcattgttgagccatgatgtgtttaagggagcagaggcttgtgagaattatatggcaacggttgccagatggtttgaagaggagcagaagctgttcgccaagaacaaggcgctgatcgagcagacactggcgaaggcgagtgtaagtgaagccggagcgaaggaaacgacagcattttatcgttctctggaggaaatcagccgcctggaaacagagctgaagaagacgatacaccggcatggggagctgatccgggagacaaccgacctgcaggatattgcagatcagatgatccatcaggcgaagatccgcagactgcggaatgtatttgattttcggggcagtcttcagaggctgaaggagcgggatgatccggcagctatgcggtatatactggcaccgctgtttgcaccgaagattgagaagagctttaatctaaatgcaattgataatatgctgacctataagacagagcaggcagatcacggcgagaagatcataaaggaagaaacgaatcggaatttccgctatgaggatgagaaagaggatgagagaatccttcataacttcggtcagatgttttatgagctgttggatcagttggagaagaaggaatccattgagctaaaggagttcagtgcgattctggaaatccggtatggagatcagttcttaaagaacggcgattattactcattcctggttcatctggcacagaagtcggagtattctgttcggaagctgtatgagaagccggagaccttccttgagaatctggtgcaggaagcatgggatgaagaagcaaaggaacggttcctgtgcacaggatttacactcgagtttctggagcaggaagagatcaccattccacaggatgagacagagtttacaattaccaatatcatgttttataggaaatag

SEQ ID NO: 52086 - DNA, 723 bp, Clostridium sp. CAG:632
atggatagtcgaaatatggataaagcattggaaatatatgcaaagctgaccatgggagaggacgtgcgccgctcgcatccggagaatggcagcttgtatgaggcatattatcagaatgcagaggtctatgagatactgaatcagatattaaagaagctgaacctgaatatatacgaatataaagaggcactttacctgaccgcaggggaaggcaaccgggtcttcggatataccaatgaggaattgaagcggttgatgggacttcgttataaccgggagctttacatggcatattatattatgtatcagattatgttgtgtttttatcaggattcggcatcttatcagtaccgggaatatgtacggctggaggagattgtaaaagaggtcagtgactcgctgctggcaattacgggcgatcttcagatctatgcgatggatgagattgaggagaacagctttaagagtctggcgctgctgtgggaggagcttccaacggtgacaggcgaggacagagagcagctccgggcatcacgggcttcccggatgggactggtaaagctggtctgcaatttcctgatcagtcagggactgtttctcgatgtgcaggaacggtattatccaaccgaccggatgaaagcactgaccgagcagtattttgaagaataccgtggacatatttatgaattgctggaaggaggagaggatcatgccgagtattaa

SEQ ID NO: 52087 - DNA, 4461 bp, Clostridium sp. CAG:632
atgccgagtattaaccggattcgtgtgaacaatgtgaaatataattttggaacgcagcagtatgatgatttcacaatgcgtatgtatgggaaaaatactctgtatgatctggcaaacggaggtggaaaaagtatcctgatgctcctgcttttgcaaaacctgattccgaactgtaccttggatgagaagcagccggtagagaagctgttccgtaccggtggcggtaatacgaccattcattccctgatcgaatggaagctggacgagccggagctgcatgaaggataccgatatatgactaccgggttctgtgcaaggaaagccaaggattctccggacgaggaggatggcggcaaggagatggcggcgattgaatatttcaattactgtattctttaccgggactataacgagaatgatattataaatctgccactggtgaaggatggagagcgggtaagctataccggttggaagaattatttaaaagagctgggcagacgggacatgaagttgtcggtacaggtatttgaccgcaagggggaatatcagagatatatcagtcagttcggactgtatgagagccactgggagatcatccggggaatcaataagacagagggacatgtccggacttattttgagacgaattataagactgccagaaaggtagtagaagaccttctgatagaagaaatcatagaaaaggcatatctggtaaagatcgataagaatgcagatccggatgatatggcacacactctgcttgagatcaaggataagctggtagagctgacgaagaagaaacgggagattgcagactatgaccgtcagacagaactcctgcatgtactcgaggcaagggtagcagcatttctggaattatatgagaaacagtctgaccagtgtgccaatctggcaaatgtctgtgttaccggtgcaactctggcaaagcagagcgaggagaagctgaaagcactggagctggcaaaggatgagaagaagaagatcatccgggcacggcagaagcagcaggcgaatttaaaaatccaccgggataagctggagtaccgggaattactggcggagattgaacgcctgcaggctgagatagccggtcatgagcagtcggtgaaggactgtcaacaggagctgaaccgaaaagagagtatcaatgactatctggattactggaaggataagtctcagaaggaggaacatgaggctgtgatcgaggcctccctgcatcagaatgatgaccagttatccttattaaaggcgcttgtaaaagaacgcaggaagcgggatgaacagatattaaagacattgtcggagtcagagaaacaggcagaggaagactatcaggaagctgaaggaaggctgacctccagtgagaatctgacgcatgaggcagaggtggcatttgcagttgcagagcatgaggagaagcaggcatcggaacggtatgctacagctatggaagagcttcaggcactgcgtaagaagatgacgtttaccagcctgcagaatccggagaccttgctggaagaacagaccgcacaggcggaacaggagaagattcatctgactgagctggagaatcaggtatatgagatacagaacctccggcatgagaagctgaaggagtgcgagaaacggaatcaggagctggatcagatcatagcacggatagaggaactgaagaccggaagccgggaatatcaggaacaggcagataagttaaaacgtatgcttgaaatctatggagggcaggcagcagagaagtctgccgagtggatgacgaatgcagatatgggaaggctgtcagatcagatcaatcagcgttatctggacaatctggcgatgatttccaatgtcagaaagcagataacagcacaggagaaacggttacagggactggcagagggacggctggttgctccgacagaggctgtagatcgggtgaaatattatattgagagccggcataaccgcaatgcagtatttggtatggattatctggtggcacagccggaagagcggagaagccatcttcttgcattacatccattgctcccatatggattgctggtagatacatttgaaggtctggataatgaccgcaagctgcgggaactgaatctaggcgatggatttcttcctatatataatatggagcatttggaggatactgcagaaaaaattccggaggacggagtgatctttctgcagcggggaacgcaggcatttgtatcaacagaagcaatcgaggaagaaaaggaacgcaggcagacagaactggaggaattgcagaatgaactggagcgtctggaagaaatgagccggacctatcaggaggacagtacatttgtagcaggactacagggaatcgcagttctggatgtagaacaggagcttttaaaagcacaggaggaattgcgagaagaacagaatgcagttgcactgtgtacgcaggagctggaggatacagagcgggagttggaacagttgcgcagtcagctgaccggctgcaagcaggctgtttattccaaactggaggaacaggggcagctgaggaccttggtgtcattatctgagcggacacagaaggcagagaaggatttgcagacctgtaaggcagaacaggaacgattggataaattactggaagaacatcgacaggcgcttcatcattggaaagtacgatatgcggacaccggcaaacggttgcaggagcttcggaaacagcgacaggaacgtacagtagactgggaacagtattataagacctattatgatgaaaatgcggccggtacaaaagaacagtgcgagcaggtggcggcacttgacaaagagcagttggatgccagattgaaggcacagctgtcagtggtagaaaaaggcacggtagctctggaggataagaaaaagttgatcacgaccttacaggcctctatgagccggttccgaaaagcaatcgagaagcgtggaaattccatggaagaactggagaagctgcggcagaccaatgaactgttcacagtcgatgaacgggatctggagttgctcagtacggaattatccagactgactcttgcggcagatgcattgaagcatcatgtggaaggacgcaggcagaaagcagatcgtctggaaggtaagatcgagcaggcaatccgtaccatggaagaacagttcggaccatgtgaggagctgcaggtatccgtgatggagatcgatgcggagctggagaccggggaacaacagctgaaccggttgaatacggaatatcagcagatggagaccgattatgcggaagataccagagaatatacggcaattctggatttatataaggatgtgaaacgaatcgtagagacgaatgatatccggcttcaggatgcaaaggcactggtggtaggcaaagagcagttacgggaactgtttgaacagagcctgcttgcgtatgataagagcaccaaggcactggacaaggcaagaggcgaactgcagcgatataagaatcagactgcacaggcacttctggaaatgcaggcatttgagttgtcccagacgatcagcaatgatgtggcggttccgaaaaattatggagaggcaagaaatctccgggagagtctttcttctattataaatgtgatcgcactggaaaaggagcgtgtggcgcagggcatcgaagatatgcagtttatcaagtctaattttgagaagcagtgtgttcagcggtgtcaggatgtgaaaaacgagctggagaagcttccgaagctctcccggattatgctggatggagaggcgatccagatggtcggattgacgattccgtatgtgaaggaagaatttatccagcagagaatgtcagactatattgatgatgtggtgcagggagcagaccgattccagaatcagaatgaacggattaagtacattcgcagcaggctggagttgaagaagcttttcagtgtactggttacggatatgaataatatccgcctgaccttatataagcgggagcgcattaaggagcagagccggtatctgcggtatgaggaggctgtcggaagtacggggcagtcacagggtatttacatccagtttctgatctctatcattaactatatatccggtctgtatgctccgaatggtgagaatgataaacggatgaaaaccatctttattgataatccgtttggcgcagcaaaggatgtctatatatgggaaccgatttttgcactgcttaagacaaatcatgtacaactgatcgttccggccagaggtgcaacgccggcgatcaccgcgcggtttgaggtgaattatgtcttagggcagcagatggtcggaaagaggcagcagacagtggtagtggattaccgcagtcaggtggatcaggaagagctggaatatcacagcctggaatatgaacaggtaagctttgattttatatag

SEQ ID NO: 52088 - DNA, 309 bp, Eubacterium sp. CAG:146
atgcagtatgaatttttgaagaatttcccccggagaatgaaaaatataggtttgtatgcagtcattgttcaaaacagtgttcagaaattatcgtggaaacagtatggatttacaaagttcgatgaacagataaatcttttatttatcgtattactttatattatggaacagtcgttaaaagaagaaaagtgtacgatggatgctatagcaacatatgtagatacgattaatgtgcagtatatgcagaaagatatttcatatgagcaaggcaggaagcttttcaagatgcaagctataaaacaccattag

SEQ ID NO: 52089 - DNA, 981 bp, Eubacterium sp. CAG:146
atgctgaaaatctgtgatgatgcagataaagttttacaacagctcaatgttacgatagcatcctacgactctttaatgaaacaactggaagtagatatttcgatggttgaatcagaaaagaaaaatgtcacagaacttttgcaggattatattcaaaatatccataaaaatcttgcacggataggcagtaactctacaataaaaatcagagaaaaatccttgaaaatgttaaaaataaccttgcctgtctgggaagataacgaaaaattatataatcttcgtctcagtgattttgtggatgaaatcactgaagaaggaatacacttatttgaaaacaatgaaaatgcgcaggaatatattggaagaaaagttacgagtaaaaacttatatgatactgtagtagggattggaaatgtacagattcagctttataaaattgaagaacagagagaacgacagataagctggaatcaggtggcaagaaattcaggaggagaaggattcctgtcggcatttgttattctctcaagtctgctggattatatgaggaaagatgattctgatatattcatggatatgcatgaaggaaaagtactcttgatggataatccattcgcccagaccaatgcagaatatcttttaaaaccattaatgaatcttgccgaaaaaacgaatacacaattaatttgtctcaccggactgggcggagaatctatttataatcgatttgataatatttatgtattgaatcttatagaagcgcatctgggatatggtataaacacactccgaagccgcatctgggatagggtattatttcttttttctgactatctaaatctacggtttaacaacatggaatgtgccagaaggctatggtcttccggaaaattaaattttaaaggattgacactcaaattgttatctttccaacataaattactaatttgttatttgttatcaaaaccagacagccgctaa

SEQ ID NO: 52090 - DNA, 981 bp, Eubacterium sp. CAG:146
atgaaaaaaattttattggaaaaacttttagaaaaatgcagagaacaaacttatcaaaaacagtatgagtacattatgaatctgctggaggaagagaagattaagtcggtgaaggcttccagattgaatggaaagagtccggctctttatcgtgagtactgggtattggaagaaaagaaggactatagcacttatattgaagaattaagatatgagattgttccggatatttctgtagattattatttaagacatttagaaagttatgaagcagacaggacatgggtgcttgagttaaatcaatatttgaaaaataaaaaaaagacacttcagtttaaagtatcggtaaatgaacgcagttttgaaatctggggacaggagaagttcttatctagaggacagggaaagcgtattttgaatcggtgtggactggagctgtctttttttaatatttacgagacgacagaaccgcttgcatattattcacgtacaagaaatattccgcaaaatttattaatattagaaaataaagatactttttttagtatgcgtcgtcatcttttggaaggaaatgaggagatacttggaataaagattgatacgttgatttatggagctggaaaggggatttttcgaagctttgaagattttgacttgtgtgtggaaccttatatgcaggcggaaggaaaccaaatattttattttggagatctggactatgaaggtattggaatttatgagaatttagctgagctttttaatgaagggtggaaaatcattccgtttatggccggatatgagaagctgttagataaagctgtgaaggctgtcagtattccagagactaaagagaggcaaaatagaaatataaaaaatattttcttttcttatttttcaacagaacgaataaagcagatgaaagaaattttggaaaagggaagatatgttccacaggaaattttaaatatttcagatttttag

SEQ ID NO: 52091 - DNA, 1518 bp, Eubacterium sp. CAG:86
atggctgtaaatatggtaaacgatattgtctccggacacagggcgagaatgctcaatttaaaaaaatattatccgttttttaaactcacagagatttcattgtcacagtttaaagacggcaagtacgaaatacttgatatgggatatatcgttatgggtattttacgcttttttatagaagaaaataacttcaatgaaaaagatgttacataccctgaataccttgaattttttcatgaactcatttcaagggatttcggacttttattaagtgaagaagaaaacagggaaattggcggctacatttttgataaaattaaaaatgacggccgcccttttgattttgaatattttgacccggttgaaagaaaaaagagaatttcgcgggtaaggatgatagaaagcacaataagggacaatatagtgtggtatacgataagtcccgatgctgtggaattttatcttgatacaaaagagataaaagatgagagcaggataagtgtgcagcagtttctgcttgaaaaaatgatacaggcaaagaatttcaaaggtggtacggaagttgttgaaagaattaatgaagaggtaagcaggctcgcacttgtacagcaggatgtaatgaatacgcttgcatccgatgtttttgccggaatagaagcataccgtgattttgtggaaacgggaatgcgttggtttgatgatgaggaaaagctgtttaagaaaaacagtgatttaataaaatcggcacttgaaaaaatatcgccgggagggcaggcggatgcagcatattataagacaatcagtgagatatatgagcttgaaaaccagctgaaagttgcaatgaacagacacgcacagcttcttggggcatgcacccatatgcagaaactcacagatgatgctgtaaggcatgcaaaactttctcagataagaagccatgttgatttcacatcacttttaaaaaagatgacggaaaatggtgatgcatcagtgctgattcctcttataaacggaattttaaaaccaaatacgaagaaaacatttaatcttaattccatagatgaagcacttacaatgagacctgcaagatatcaggagatagaaaaggtaagtgtgaaaaagcagaaagaaatcatatttgaagatgaactggaagagaaaagaattgcggataattatgtatttataatgaaaaatcttatttcggcactgcacaaaaaagaagagttcacactggaagaatttaatctgtcaatgaaaaatatgtattccgaaaatgttcttaaaaatgcagattatttttcatttttcgtaaatctgtgccagaagaaaaagcatataatcggcggtgcagatatggatagtgaaagttttatggatgatatattgaaaaaatattttgagaatgaagccccggttgctttttctatagatgaggggaatggcaaaatgcttggacttatggacggatgtgaagtgagcgacgttacattccatagagaagattacagcaattaa

SEQ ID NO: 52092 - DNA, 777 bp, Eubacterium sp. CAG:86
atggagagcagaaatttagacagagcattagatatcgtgtcaaaacttatcaatggcgaaaatgttggtgaaaatggagataatgcagcactgtatcaggagtacagcacaaatgcacaggtttatgacattgttatgatgactcttaaaaagatgaatcttgacatatatgagtataaaaacagcctgtatgtaagtgcaggccagaataatccggtgtttggatatactaacgaagagttgagaaaagaacttggagttaagttgaacagagaattgtatcttgcatattttgttatttacaatactattacatcattttacagtgatacgtcagcagcaaattatacaagttacgtgcgtattgaagatgtaatagaaaatgttgataattccataaacggtataattgataagcgaaacggcatagtccttgatgagatagaggaaaacagttttaagcagattgcgttaagctgggaggaacttccggcctcatctgacagtgttcaggctgggatgagggcagcgagaaattcaaaagccggatttgtcaaaatggtttttaattttcttgtaaatcaggggctgcttgttgataattcggaaaagccggaaaattctgtggataatacaaaagaagatgaaaattctggtggaaatctttattatcctacaaacagattccgggcacttatagagaattactttgatgaatataaaggaagatttacgcagattttatcgaaaggagagaagaacgatgccacagattaa

SEQ ID NO: 52093 - DNA, 4440 bp, Eubacterium sp. CAG:86
atgccacagattaacagaatcagggtaaacaatgtaaagtacaatttcggaacacagatgtatgatgattttatgatgcgtccaaattgcagcagcatgatttatgaccttgcgaacggcggtggtaagagtcttctcatgctcatgcttttgcagaatgtaattccgaactgtacacttgatgagaagcagccggttgaaaagcttttcaggcaggggggaggaaatacagtcatacattctcttgtggaatggaaactggagccatgttacagaaaagataattatacatatatgacaacaggattttgtgcgagaaaagcgggtgcacagagcaattcgtcgggtatagaatattttaattatgctattttctacagggaattcggcgacaatgatataaaaaatcttccacttacaagtaacggtgagagaataacatacaacggattgaaagaatatcttagaaatcttgaaaaagatgattttaatgtgtcggtaaaaatatttgacagaaaaggagattatcagaatttcctgtcacattacggaatatatgagagccagtgggaaattatacgtggaatcaataaaacagaaggacatgtaagaacttattttgagagcaattacagaacaagccgtaaagttgtggaagatctgcttattgaagagattatagaaaaatcatttaataataagttaggtgtgactgatgatgaaggtcagatggcaaggacacttcttgatattaaagataagctgcttgaattgtcaaaaaagaattcacagataggcaattataacagtcaggttgaagaaatagaaaaatttgctcagtatgcagaatcattcaaagtgaattttataaaaaagcaggaacttgaggaaaagatatacaggcttttgtgtgcctgcaaaattataattgctgacagggaagcattatcagagcagaatagttccgatttggaaaaaatacaggaaaaaattaataatgaacagtatctgattcagtcggcacaggttgcaagcgagcagaagtcacttgatgcaatacgtgagcttgttgatgtttacagtgcaaagattgaagcggcagacagccgttttgccgaaagaaaagagctgcttagaaaatctgaatcagtcaatgattatgcagattatcttaaatatgaaaatgattttaacaaaataaaacagacgatagacaacagaatgcgtgagcatgacgacattacggcagagctgcatgatatagctgtaaaaatatttgaactgtcaaatgatgagcgggaaaaattaaaagaaagtcttaaacaatcgcaaaaagagctgcagactgcggaggataattataaagaagcacagaaaacgtttgattcactgacaaaagaagaggcagctgcacaaagtctcgtttcatttttaaagagccgcattgaaaatgacgaaaagcagatggcggttctcatggaaaaatgtggaataattattgcagaaaatgtcgaggcagagcttttaacatcagaagagaatattaaagatgccagacaggagatacagcaaaaagataaggcatataatgatttgaaactccggcttggcgatactcagacagacattgcaagaattgatgtcggacttgaatttataaaaaaagaaatcgaagatgtcaagaaaatacaggcagagtatgagcagacaaaggacaaacttaatacgctctcaaaaatatataatgatgaaaatacggcaggacttgatataaagataaaggagtatagtgacagccttgacagcgagtattttgaagcggaaaaagaggcacaaagacttactgcatttattgaaaatgcaaagaaacaccaatatttattagatgcaaagaacagaacaaagttaaaagaatatctttttacaagatataaagatgatgtcaaagaaggtgctgactggcttgcacagcttgatgagaaacagcgtacagatgtaaagaggcgtattccgtttgtagaatacagttttattgtaaaaaataattttgataaaataaaaaatgatgcggcacttgccagctttaatcttgattcgtataccgttccgattgtgagtgaagataatgtcctggatgcaaaagtccagattgataaaaatacagttgtatttgcaatgaaagatatggatttccttaaagatgatgcaaaaaccgagtcggagattgcggcggcacaggaagagcttgataatattaatcataaaatagaaaaaattgaagaccgccgaaaagttgtacttggtgactattgttatgtcataaataataagatgcaaaggtttgaaaaagcatcagatgatttacgcaggctcacagagaatatgtcgcagagcagggaaaatcatgaaaagctgaaagcagaagaacagcttcttaaaaagcagtgtgatagtgcggctgcacaggcagaatcagcaaaaaagacatatacagaggagtgcagccgttatgagattttaaaacttgcaaaaaaacataaggagcagcttgccggagaatatgcaaagcagagacaggcacttcttgatgcagataatctttcacgaaaacttggagattcacagacggatgttgaaaataagaaagaaattcttgagaatgtaagtaaaactcttgcggtatatgaacaaaaaattgagactgcacaaaaagactgggaagaaaattacaaccatttttatgatatggatatagatacatcagacaaaccggaaaaagaatttgcaggtatgacatacatgcagcttgaatcaagatttttcggactgaaagacatattggacaaagagatggttgacgttgcagataaagaagctcttatggaacattaccgtatttcaatggaaaagtgcaaaaaagccattgaataccgtggtgatgattttaaaacagtaaaatcagattttgaaacaggtaaaacgattgtttcagatgcacaggaacttcttcacataaaacagcagattgctgatatagagaaggagacgagagctgacagagatgaatttgatgcacagaatgcacttatgaaccgtcttgagggtagtattgcacatgctgtgagccagataaaagaaagattcggtgaatatgaaccgcttttgtgtgaaaatcctgaaagctacatcagccagcataagaattatataaaagagcttgatgagagaacacaacgcattaaagaagagatagcaggtcaggcaaaagctttaaaaaaatattatatatgtgaaaaagatcttgagagaattgtgacagatgccggtatggatattccggatgaggaagcagttgccaatgttttcaggcagaatgaaaatgcatatgatttaaagattcttgagactgagacagattcatatgagaaaatctcaaaggattattcacagcttgtaaagcttattgaaaaaagaagagaagattttcagagcaggaaagaacaattctgccgccgtcttgtggaatttgatgcagatgagctttcggcagaaatgaatgcttcgataaatattccgtctgattgcaaagatgtagaggtgttatgcagtgggcttcgcaggacgaatgaatacatagtattggaaaaagagcgtgtttcaaagggtattgaagatatggaacagataaaagacaactttgaaaaccgttgtatacagacgtgctacaatataaaaacagaacttgacagacttcctggtctttcaacaatacgtcttgatgatgaaatcatatcgatgattgggctgtttattccatatgtaaaggaagaactgtataagagcaggatgtcattatatatagatgagacaattgcaatgtctgaaagcatttcgtcacaggaagaaagattgaaatatataagaaacaggctcacatggaaacgtcttttttctgtaatagtaactgatatgaatgcaataagggtacagctttataaacgtgagcgtatcaaggaccagagcaggtatctgcgatatgaggaggcagttggctctacgggacagtcacagggaatttatatacagtttcttatagctgtaataaattatattgcaagtgttaacgcatcagttagtgaaacggcagttcttggaaaaacaatatttattgataatccgttcggtgccgcaaaagatatttatatatgggaaccgatttttaagcttttaaagacaaaccatgtacagcttatcgttccggcaagaggtgcaacaccggcaattacaggaagatttgacgttaattatatacttggacaaaaacttgttgacggaagacagcagactgttgtcgttgattattacagcaggacaaacacgacccagctggaatatacgagaatggattatgagcagacgagctttgagtttttcgtataa

SEQ ID NO: 52094 - DNA, 1527 bp, Butyrivibrio sp. CAG:318
atgccgcaggagcatattttagtcaatgacataattgcagaccacaaagagcgcatgctcaaccttagaaagtattatccttttttcaaattgtctgaggtgtccttctcatggtttaaggacggtatttatgacaatcttgatatgggatatattcttatggctgtcctgcgcttttttattgaggaaaataactttaaagaacgcgatgttacatatcagatgtattatgattttatgagtgcatgcatcagacgtgattttgccgttacgctcacaccggaggataataaggttctggtggattatatattcgacaaactcaagaatgacggaagaccgtttatgtttgagtattatgacccggttgaccgggtacgcagggtatcgagggtgaagctgcttgagagcagaatacaggatggaacggtatggtattcgataagtccggacggaatagaattttatcttgaaaccaaggaaatcaaggatgagagccgcattaacgtagagcagcttcttctcgagaaaatgattgagtccgaagatttcaagggcggaacagaagtcgttaagaggattaacgaggaagtggaacggttgaaattacgccgcaataaggtgcttgatattctctctgaggatgtatttgccggagttgatgcgtatgagaatttctttgatacgggaataagatggttcgcggacgaacagaaattatttgccaagaacagggaattaatcgaatcggcaatgagccggtttggcgatgcggacgatagccgttcttcaaaagctgcggaacagatatacagacttgatacggaactcaaaatagcgatgaataatcacagtgaacttcttaaagcctgtacggaacttggaatcaggactgatgaaatcgtgagaaaagcaaagctcggccggttaagaagccggtttgatttcaagggcgcacttgatattatgattaagaaggacatgccgcaggcacttgaatatgtggtaaaaccgtttcttggactgaatatacataagacttttgatctggtcaaggtcgaagatattctcagttacaggccgtatgaggcagagacacctgagcagatagaagaagagacggcggcagagattgtatttgaggatgaacttgatgatgaacgattcaggcggaatgcgggtgcacttatgcatgtgcttctggagatgcttacgaagaatgatgagtttacattgggtgaatacaatggcgcagttatgaacatttttggcagtgaagtcttcaaaaatggggattattatgcttttctcgtacatctttgcggaaaaaaggattattttatgcaggccggcgagaataccggagaaacttttcttgatgagatcatagcagggcttatggacagggaggagttccttaaatacagcggaatgcattttatacttgaactggcggatggtaatttgcacgaaatcattccttatacgggaatgagcattactgattttacgataaaaagaatttga

SEQ ID NO: 52095 - DNA, 729 bp, Butyrivibrio sp. CAG:318
atggagaacagaaatcttgaaaaggcacttgatattgtgaccgcgctttttatgggcgaggatgtgaaagccggcggtgcgaatgcgatgctgtatgatgagtatagccataacagcgaggtatatgactgtgttgtacagattttaaagagatttgacattaatctgtatgaatataacgattcgcttttcataagcgccggtgcggacaacagagtattcggttattccaacgaggaattgaagaaaataatgggactcagactcaataaagaactttttttggtatactttataatatatatgatcataatcagattttacaaagattccatgacagggacatttctggaatatatcaggcaggaagatattgtgaaagcggtgagtgcatctctcggaggaatgatagaccactcatccggaatcgtgatggatgaggcggaagaaaaatcgttcaaggcagttgcgcttgtgtgggacgaactcccggatgtaagtgttgaagacaagggaggacagagggcagcaaagaattcgcgcatgggatatgtaaagctgacatttaattttctgattacgcagaatctgtttatagaatcgggagaattatattatcctactccgagattcaaggcaatcgccgagaaatattttgaggaaaacagaggacggcttcatgagattttgtcgtcggataaggaggaagatacagatgccgcagattaa
